United States Patent Application Publication US 2024/0327476 A1 - sequence listing, part 19

SEQ ID NO: 21068 - DNA, 7879 bp, Homo sapiens
  source 1..7879: mol_type = unassigned DNA
tgtgcgtcgcgctctcgccctcctcttcccgctgcagtgtctatggagcgaggctacgtttcattgccgccctggcttaacccttccggcgcctaaaaggacggccggccggccggctcccttgcaccaggaagaagtcttagcagccagcgggccctggtcaggaaactctaaggtacaaggaaaacagttgaggaaggagccagagcgctccggtttggtcctcgggcttcgctggggcggggcgcaggcgttggctttaagaaaggggaggggacagtgcaatccgggttgcccgcggagttcggccaaggaagtcttccgctcgctccggagcgaggagcctgtagagaggctgttcccagctccagctctaacctcgcctacaccttgggcgggcccaagtgtcacgtttgcaattgctcaggaaggatccggcccgtctccggaggcaagtcgggctgcggtttttgctgcttatctgggaaggcgatgcctaagggacatgctgcttgctaggcagcaccctgccgggatccgactgcgatagttagctctccctggccctgaagccatcgccggggcgcctgttctctgtccggaccagccagcgctcctcaggagtctcactgaaacagaaccatgggtcatcccccgctggagttcagcgactgctacctggacagccccgatttccgcgagaggctcaagtgttatgagcaggaactggagaggaccaacaaattcatcaaagacgtaatcaaagacggcaacgcgcttatcagcgctatgagaaattattcttctgctgttcagaaattttcccagacgctgcagtcatttcagtttgatttcattggagacactctgactgatgatgaaattaacatcgctgaatccttcaaggaatttgctgaattgctcaacgaggtagaaaatgagaggatgatgatggtacacaatgctagtgatttgctgattaaacccttggaaaatttccggaaggaacaaataggcttcaccaaggagcggaaaaagaaatttgaaaaggatggtgagaggttttattctttactggatcggcacttacacctgtcttcaaaaaagaaagaatctcagttacaagaggcagacctacaggtggacaaggagaggcacaattttttcgagtcctctcttgattatgtttatcaaatccaggaagttcaggagtccaagaagttcaatattgtggagcctgtcttggcctttcttcatagtctgttcatttctaacagcctgactgtggagctcacacaggatttcctcccatacaaacaacagctccaactcagtttacagaatacaagaaatcatttctccagtacccgggaagagatggaagaacttaagaaaaggatgaaagaagctccccagacatgcaaacttccaggacagccaactattgaaggctatctctatacacaagagaaatgggctttaggaatatcctgggtgaaatactattgccagtatgagaaagagaccaaaacactgaccatgacgcctatggagcagaagccaggtgctaagcaggggcccttggacttaacactgaagtactgtgtgagaaggaagacggagtctatcgacaagaggttctgttttgacatagaaactaatgaaaggccaggaaccatcactctgcaggccctttcagaagctaacagaaggctatggatggaagccatggatgggaaagaacctatctaccacagccctataacaaaacagcaagaaatggagctaaatgaagtgggcttcaagtttgtcaggaagtgcatcaatattattgagaccaaagggatcaagacagaagggttgtaccgcactgtgggcagcaatattcaggttcagaagctgctgaatgccttttttgatcctaaatgcccaggagatgttgattttcataatagtgactgggacattaagacaatcaccagctccttgaaattctacctcaggaatctttctgaacctgtcatgacctatagacttcacaaagagctggtctctgctgccaagtctgacaacctggattaccgcctaggagctattcactccctggtatataagctaccagaaaagaaccgagagatgctggaacttctgataagacacttggtcaatgtgtgtgagcacagcaaagagaatcttatgaccccctccaacatgggagtaatctttgggcccaccctgatgagagctcaggaggacactgtggccgccatgatgaacatcaaattccagaacatagtggtggaaatactaatcgagcactttggcaagatctatttaggtccacctgaggaaagcgctgcaccgccagtgcctccgcctcgggtgacagcaagaaggcacaaaccaatcacgatttcaaagcgcttgctgcgagaaaggacggttttctatacttcttccctggatgaaagcgaagatgaaatccaacatcaaacaccgaatggtactatcaccagcagcatagaaccccccaagccaccacaacaccccaaactacctattcagaggagtggggaaactgatcctgggaggaagtccccaagcaggcctattttggatggcaagttggagccctgcccagaggtggacgtggggaagttggtgtctaggctgcaggatggagggaccaagatcaccccaaaggccaccaatggacccatgccaggctctgggcccaccaagaccccctctttccacataaagagaccagctccccggcccctggcccaccacaaggagggggatgctgacagtttcagcaaagtgcggcctccaggagaaaagccaaccatcatccgccccccagtgaggcccccagatcctccctgccgggcagctactccccaaaagccagaaccaaagccagatattgtggctggcaatgcgggggaaatcacatcatctgtggtggcttccaggaccaggttttttgaaacagcttcccggaaaacaggaagttctcaaggcagacttcctggagatgaaagttgaggctacaggttttaaaagccttggcctcagaggaccctttccaggttctgaaagagtctttcttcttcaaacctttgtgtgcggagtcattttgtgttgaagagcagctccttcctagccttgcactttcagactctctctgggaggccataaaataaggagcatatgtcctagacaggtgtttatatctcctttgtattctgtcttcatcccctcagaaggtctgttttgagttcctataacactgtgaagagctggactccctcaagccagactctgccaaaaccaagatatccacttacctgagttgaagaggggagctcagttttcaactcttccctgaacttcctgcttcctcagagggccattgaactctgagagatttggggctaaagactgatctcaggggtcttaccttgaactgaaggccacttgagttggggccattgcttaccttggttggaagggaatagaaatgtttgctgaacattggagaatctcaacatgtctcctactgaggatatggacactggtgccatgtcagcgctctggtgctgcagtatgttgccaagagcccgtctgctcctgcgaggctatgagtgggatgagtgatgcccccacagcacctccatgtggacttaggaaggtggccttcctgctgttacatgcagccacttaggacaaatctgcaaagcatgttttgcatgtaaaagcctaggtctatttggattattctttctccttttttttgacagcttcctgtcaagcaatcaagaaacaaacaaaagctgaacacatttctttttaaaaaaaggagactgtgtttggtcctgtaggagttctattttggggtcaaatgctagaaaaattgttaaggtggattgaggccaggcagctgtcactgctgcttcatgtttgccttctgcacataaactcttttatctcctgaaaaaagcagttcttaacccagtgtccatggactcagaaactccatgatgcccctgagatggtatgcacaattccatgacaatatgccctttctggggagatagtccataatgttctgctaaatttcaaatgggctcgtgacccaaaaaagtcaagaaccacagcacttgagtaaaatactctttttacaatccatataagcccttgattggaagggcttttcaaaatcatttagtctaacaactgcccagtttccagtcgggggaactgaggcagagcaaggtagtgatcacaccagtacaagatctcaggtcccaggctcctatgcaagttttttttccccattatatcacacttatctagcaagggaccttgtggtttgtggctttagtggccatcatttctgggggttggcttttaccctttttcttgaatatttgccaccaagtgaaaaatgttaggacataaacccttgccaggtccctttcatttgctatctctattattggaaaggacctaaaaattggtgtaatggggcagaaatctgaggaatggacatttctaattcctgtttgttgaagggaagttgctggaaagagcatcagtacttgtttctatgcagatgcctgggccgtagcttgtctgtagcgtctgtataattataatgttgcccagtgtgagggaaagagctttcctacttgcactcttctaccaaggccctgttagtgcactgattatagtactgacagataaacctagataaagagatagagagtgagtacatgcacactcatgtgcaaacccactcagagatgcatttggaacagtgctactgaaaggcagtagtcattttcaagactgaattccaaacatggtttattggtgagttaggaacatgtaaggccaagtacactgagagcctttttgaaagtaattgagtggaaacttgatgccattctaaatcaaggcatatccaggtggcccggttgaactcactccactgtacccagtctcaaaggccaggttgctaagaaaccaggagtaaaagagtcaagtgaccatcatttcacctgctgcttgcccccaatagtagtctctgtgaggccttactgacctcacctaggaagtgatttttgagcccttgtttcagggctgtggcctccctgctctatcctgaataaagcagacaggtgtgcagattttggccatgaaagcatggctaatagggccacagtccctttaaagaaacatggtttgactctggttttcttgggggaaaataccacaatcaccgatgcaaacattggaagattattgagagccctagaaagctgctgtgatcccagtagaaaatatgtcccagaaatgtcatgagattgctgtgtgttgcctgggacacagatcaagggcctatcttggagagctggggaccagcagtctgcctggaggccagggagcagtggctgagtagctctgcctttgctctggtctataccttaagaatgccaaagaatgaatttcaacgcctgcctttggcactctgacttaaagtgcaaaaagcttctgtggcgaggcatgctatcatggaatgagactggcttgccctaggcttaatggatgggcagtcattttgcagaggctatgggaagagggtgataatagaagagtggcagctataggaaattatcaacataccttggccagcaagttagagaatctggcaatggatgaactgaaagtgatgaactggcagggataacaaagaacctaacatttattaagcacgtatttattaactgctcagtgtttcatattcatgcaagtattctcattttacagagaaagaaattatggcccagggggctaaagtaaacaactcaagggcacatagaaagtaaataaaaggactgtgatttgaatccaggccactcttagcccatgctgttttccctttgccacactgtggtaggtgtttgaacagaggccacattactagagttggcatgactcttgactcttgcctgcctaacaaaatattgaaaggcaaacatttgaaggagggagggggtgcaggttcagtttatatggaaatgcaaactgggctggaagatattcctgagttaggctttctcttcatattcagcttgcacatttggtaatgtttttaagatgatcatctaattttattttgtgaagtgaaggatttgtgttttagttggcagttgttaagtccttggcttgccatttttcaaaaagtaaaaaggtcctcacaggtgtctccatacttcgccaaggttgtagcatgggcagtttcagtttcagcctaagagactggtgacatccacaaatgcagttttagaagcagaaaaggtcttggtgcctctgcagtacttgatgtattggggtcaaatctctacaaatttttctgtggtgatagcaaaatcaagagatggcttacaaaaagaaatattgaatttttatttttgaagtttttgttttttaaaaggttgggggtgttcagccactgagggacaaaacttagcatctaatttcaattatagtgtcatgcagagtatttctaaagtaattggttatcatgggaaagtattctcttttcaagaagttctttgattctgtaataactagaacaaataaagtagtaaaagaagaaatagttctgtgactaggaaaaaattgcttttgagagaacatagatcaattatactacttctaaggtagctgcagataagtggccttgacacattacaagcctggaaaaaaacatcagaaataataaaaaatttcagagagaatcaagatacctttttttttcttttttttttcttttttttattatactctaagttttagggtacatgtgcacattgtgcaggttagttacatatgtatacatgtgccatgctggtgcgctgcacccactaatgtgtcatctagcattaggtatatctcccagtgctatccctcccccctcccccgaccccaccacagtccccagagtgtgatattccccttcctgtgtccatgtgatctcattgttcaattcccacctatgagtgagaatatgcggtgtttggttttttgttcttgcgatagtttactgagaatgatggtttccaatttcatccatgtccctacaaaggatatgaactcatcattttttatggctgcatagtattccatggtgtatatgtgccacattttcttaatccagtctatcattgttggacatttgggttggttccaagtctttgctattgtgaatagtgccgcaataaacatacgtgtgcatgtgtctttatagcagcatgatttatactcatttgggtatatacccagtaatgggatggctgggtcaaatggtatttctagttctagatccctgaggaatcgccacactgacttccacaatggttgaactagtttacagtccaaccaacagtgtaaaagtgttcctatttctccgcatcctctccagcacctgttgtttcctgactttttaatgattgccattctaactggtgtgagatgatatctcatagtggttttgatttgcatttctctgatggccagtgatgatgagcatttcttcatgtgttttttggctgcataaatgtcttcttttgagaagtgtctgttcatgtccttcgcgaaggacaagataccttaaagataagttttcgataaagaaaagccttcattttcctgggggaaatgaagcacttgatgccaaggacattagtagagggctagaaagattgcctgtgtgaaagacatatgctatatccaaataataaaacaaacgagatcctggggctcattcatgtgactttcaataaagtatgtagactgtctaatataa

SEQ ID NO: 21069 - DNA, 2959 bp, Homo sapiens
  source 1..2959: mol_type = unassigned DNA
agtgcaatccgggttgcccgcggagttcggccaaggaagtcttccgctcgctccggagcgaggagcctgtagagaggctgttcccagctccagctctaacctcgcctacaccttgggcgggcccaagtgtcacgtttgcaattgctcaggaaggatccggcccgtctccggaggcaagtcgggctgcggtttttgctgcttatctgggaaggcgatgcctaagggacatgctgcttgctaggcagcaccctgccgggatccgactgcgatagttagctctccctggccctgaagccatcgccggggcgcctgttctctgtccggaccagccagcgctcctcaggagtctcactgaaacagaaccatgggtcatcccccgctggagttcagcgactgctacctggacagccccgatttccgcgagaggctcaagtgttatgagcaggaactggagaggaccaacaaattcatcaaagacgtaatcaaagacggcaacgcgcttatcagcgctatgagaaattattcttctgctgttcagaaattttcccagacgctgcagtcatttcagtttgatttcattggagacactctgactgatgatgaaattaacatcgctgaatccttcaaggaatttgctgaattgctcaacgaggtagaaaatgagaggatgatgatggtacacaatgctagtgatttgctgattaaacccttggaaaatttccggaaggaacaaataggcttcaccaaggagcggaaaaagaaatttgaaaaggatggtgagaggttttattctttactggatcggcacttacacctgtcttcaaaaaagaaagaatctcagttacaagaggcagacctacaggtggacaaggagaggcacaattttttcgagtcctctcttgattatgtttatcaaatccaggaagttcaggagtccaagaagttcaatattgtggagcctgtcttggcctttcttcatagtctgttcatttctaacagcctgactgtggagctcacacaggatttcctcccatacaaacaacagctccaactcagtttacagaatacaagaaatcatttctccagtacccgggaagagatggaagaacttaagaaaaggatgaaagaagctccccagacatgcaaacttccaggacagccaactattgaaggctatctctatacacaagagaaatgggctttaggaatatcctgggtgaaatactattgccagtatgagaaagagaccaaaacactgaccatgacgcctatggagcagaagccaggtgctaagcaggggcccttggacttaacactgaagtactgtgtgagaaggaagacggagtctatcgacaagaggttctgttttgacatagaaactaatgaaaggccaggaaccatcactctgcaggccctttcagaagctaacagaaggctatggatggaagccatggatgggaaagaacctatctaccacagccctataacaaaacagcaagaaatggagctaaatgaagtgggcttcaagtttgtcaggaagtgcatcaatattattgagaccaaagggatcaagacagaagggttgtaccgcactgtgggcagcaatattcaggttcagaagctgctgaatgccttttttgatcctaaatgcccaggagatgttgattttcataatagtgactgggacattaagacaatcaccagctccttgaaattctacctcaggaatctttctgaacctgtcatgacctatagacttcacaaagagctggtctctgctgccaagtctgacaacctggattaccgcctaggagctattcactccctggtatataagctaccagaaaagaaccgagagatgctggaacttctgataagacacttggtcaatgtgtgtgagcacagcaaagagaatcttatgaccccctccaacatgggagtaatctttgggcccaccctgatgagagctcaggaggacactgtggccgccatgatgaacatcaaattccagaacatagtggtggaaatactaatcgagcactttggcaagatctatttaggtccacctgaggaaagcgctgcaccgccagtgcctccgcctcgggtgacagcaagaaggcacaaaccaatcacgatttcaaagcgcttgctgcgagaaaggacggttttctatacttcttccctggatgaaagcgaaggggatgctgacagtttcagcaaagtgcggcctccaggagaaaagccaaccatcatccgccccccagtgaggcccccagatcctccctgccgggcagctactccccaaaagccagaaccaaagccagatattgtggctggcaatgcgggggaaatcacatcatctgtggtggcttccaggaccaggttttttgaaacagcttcccggaaaacaggaagttctcaaggcagacttcctggagatgaaagttgaggctacaggttttaaaagccttggcctcagaggaccctttccaggttctgaaagagtctttcttcttcaaacctttgtgtgcggagtcattttgtgttgaagagcagctccttcctagccttgcactttcagactctctctgggaggccataaaataaggagcatatgtcctagacaggtgtttatatctcctttgtattctgtcttcatcccctcagaaggtctgttttgagttcctataacactgtgaagagctggactccctcaagccagactctgccaaaaccaagatatccacttacctgagttgaagaggggagctcagttttcaactcttccctgaacttcctgcttcctcagagggccattgaactctgagagatttggggctaaagactgatctcaggggtcttaccttgaactgaaggccacttgagttggggccattgcttaccttggttggaagggaatagaaatgtttgctgaacattggagaatctcaacatgtct

SEQ ID NO: 21070 - DNA, 582 bp, Homo sapiens
  source 1..582: mol_type = unassigned DNA
ataatgcgtctttgttgaaacaagggagctttgttctttacttctgggctctctcagtgattttaacaggaatccagaggcagcagcacacttctcagtaccacaaggaaggtggatgggaataggtttccagctggaagtttatctagtctgacaacctggattaccgcctaggagctattcactccctggtatataagctaccagaaaagaaccgagagatgctggaacttctgataagacacttggtcaatgtgtgtgagcacagcaaagagaatcttatgaccccctccaacatgggagtaatctttgggcccaccctgatgagagctcaggaggacactgtggccgccatgatgaacatcaaattccagaacatagtggtggaaatactaatcgagcactttggcaagatatcttccttctttctccacagatctatttaggtccacctgaggaaagcgctgcaccgccagtgcctccgcctcgggtgacagcaagaaggcacaaaccaatcacgatttcaaagcgcttgctgcgagaaaggacggttttctatacttcttccctggatgaaagcga

SEQ ID NO: 21071 - DNA, 3310 bp, Homo sapiens
  source 1..3310: mol_type = unassigned DNA
tagatggtcaattagagttcccagggtttgaagcctgtaactgctgccgccgctcaagccctccagagcattgctacggctgctgcccttgtactactacctccaaatacgttcttgctggtagtggcggcagcaggaccaattacctcttttttgctctccctcgagaagctccagatggcgtcttccgtgggcaacgtggccgacagcacagggttagctgagttggcacatcgagaatatcaggcaggagattttgaggcagctgagagacactgcatgcagctctggagacaagagccagacaatactggtgtgcttttattactttcatctatacacttccagtgtcgaaggctggacagatctgctcactttagcactctggcaattaaacagaacccccttctggcagaagcttattcgaatttggggaatgtgtacaaggaaagagggcagttgcaggaggcaattgagcattatcgacatgcattgcgtctcaaacctgatttcatcgatggttatattaacctggcagccgccttggtagcagcgggtgacatggaaggggcagtacaagcttacgtctctgctcttcagtacaatcctgatttgtactgtgttcgcagtgacctggggaacctgctcaaagccctgggtcgcttggaagaagccaaggcatgttatttgaaagcaattgagacgcaaccgaactttgcagtagcttggagtaatcttggctgtgttttcaatgcacaaggggaaatttggcttgcaattcatcactttgaaaaggctgtcacccttgacccaaactttctggatgcttatatcaatttaggaaatgtcttgaaagaggcacgcatttttgacagagctgtggcagcttatcttcgtgccctaagtttgagtccaaatcacgcagtggtgcacggcaacctggcttgtgtatactatgagcaaggcctgatagatctggcaatagacacctacaggcgggctatcgaactacaaccacatttccctgatgcttactgcaacctagccaatgctctcaaagagaagggcagtgttgctgaagcagaagattgttataatacagctctccgtctgtgtcccacccatgcagactctctgaataacctagccaatatcaaacgagaacagggaaacattgaagaggcagttcgcttgtatcgtaaagcattagaagtcttcccagagtttgctgctgcccattcaaatttagcaagtgtactgcagcagcagggaaaactgcaggaagctctgatgcattataaggaggctattcgaatcagtcctacctttgctgatgcctactctaatatgggaaacactctaaaggagatgcaggatgttcagggagccttgcagtgttatacgcgtgccatccaaattaatcctgcatttgcagatgcacatagcaatctggcttccattcataaggattcagggaatattccagaagccatagcttcttaccgcacggctctgaaacttaagcctgattttcctgatgcttattgtaacttggctcattgcctgcagattgtctgtgattggacagactatgatgagcgaatgaagaagttggtcagtattgtggctgaccagttagagaagaataggttgccttctgtgcatcctcatcatagtatgctatatcctctttctcatggcttcaggaaggctattgctgagaggcacggcaacctgtgcttagataagattaatgttcttcataaaccaccatatgaacatccaaaagacttgaagctcagtgatggtcggctgcgtgtaggatatgtgagttccgactttgggaatcatcctacttctcaccttatgcagtctattccaggcatgcacaatcctgataaatttgaggtgttctgttatgccctgagcccagacgatggcacaaacttccgagtgaaggtgatggcagaagccaatcatttcattgatctttctcagattccatgcaatggaaaagcagctgatcgcatccatcaggatggaattcatatccttgtaaatatgaatggctatactaagggcgctcgaaatgagctttttgctctcaggccagctcctattcaggcaatgtggctgggataccctgggacgagtggtgcgcttttcatggattatattatcactgatcaggaaacttcgccagctgaagttgctgagcagtattccgagaaattggcttatatgccccacactttttttattggtgatcatgctaatatgttccctcacctgaagaaaaaagcagtcatcgattttaagtccaatgggcacatttatgacaatcggatagttctgaatggcatcgacctcaaagcatttcttgatagtctaccagatgtgaaaattgtcaagatgaagtgtcctgatggaggagacaatgcagatagcagtaacacagctcttaatatgcctgttattcctatgaatactattgcagaagcagttattgaaatgattaaccgaggacagattcaaataacaattaatggattcagtattagcaatggactggcaactactcagatcaacaataaggctgcaactggagaggaggttccccgtaccattattgtaaccacccgttctcagtacgggttaccagaagatgccatcgtatactgtaactttaatcagttgtataaaattgacccttctactttgcagatgtgggcaaacattctgaagcgtgttcccaatagtgtactctggctgttgcgttttccagcagtaggagaacctaatattcaacagtatgcacaaaacatgggcctgccccagaaccgtatcattttttcacctgttgctcctaaagaggaacacgtcaggagaggccagctggctgatgtctgcttggacactccactctgtaatgggcacaccacagggatggatgtcctctgggcagggacccccatggtgactatgccaggagagactcttgcttctcgagttgcagcatcccagctcacttgcttaggttgtcttgagcttattgctaaaaacagacaagaatatgaagacatagctgtgaagctgggaactgatctagaatacctgaagaaagttcgtggcaaagtctggaagcaaagaatatctagccctctgttcaacaccaaacaatacacaatggaactagagcggctctatctacagatgtgggagcattatgcagctggcaacaaacctgaccacatgattaagcctgttgaagtcactgagtcagcataaataaagactgcacaggagaatt

SEQ ID NO: 21072 - DNA, 5461 bp, Homo sapiens
  source 1..5461: mol_type = unassigned DNA
ggccgaggagccgtcgccgccatttcaagaccgtactaggtagatggtcaattagagttcccagggtttgaagcctgtaactgctgccgccgctcaagccctccagagcattgctacggctgctgcccttgtactactacctccaaatacgttcttgctggtagtggcggcagcaggaccaattacctcttttttgctctccctcgagaagctccagatggcgtcttccgtgggcaacgtggccgacagcacagaaccaacgaaacgtatgctttccttccaagggttagctgagttggcacatcgagaatatcaggcaggagattttgaggcagctgagagacactgcatgcagctctggagacaagagccagacaatactggtgtgcttttattactttcatctatacacttccagtgtcgaaggctggacagatctgctcactttagcactctggcaattaaacagaacccccttctggcagaagcttattcgaatttggggaatgtgtacaaggaaagagggcagttgcaggaggcaattgagcattatcgacatgcattgcgtctcaaacctgatttcatcgatggttatattaacctggcagccgccttggtagcagcgggtgacatggaaggggcagtacaagcttacgtctctgctcttcagtacaatcctgatttgtactgtgttcgcagtgacctggggaacctgctcaaagccctgggtcgcttggaagaagccaaggcatgttatttgaaagcaattgagacgcaaccgaactttgcagtagcttggagtaatcttggctgtgttttcaatgcacaaggggaaatttggcttgcaattcatcactttgaaaaggctgtcacccttgacccaaactttctggatgcttatatcaatttaggaaatgtcttgaaagaggcacgcatttttgacagagctgtggcagcttatcttcgtgccctaagtttgagtccaaatcacgcagtggtgcacggcaacctggcttgtgtatactatgagcaaggcctgatagatctggcaatagacacctacaggcgggctatcgaactacaaccacatttccctgatgcttactgcaacctagccaatgctctcaaagagaagggcagtgttgctgaagcagaagattgttataatacagctctccgtctgtgtcccacccatgcagactctctgaataacctagccaatatcaaacgagaacagggaaacattgaagaggcagttcgcttgtatcgtaaagcattagaagtcttcccagagtttgctgctgcccattcaaatttagcaagtgtactgcagcagcagggaaaactgcaggaagctctgatgcattataaggaggctattcgaatcagtcctacctttgctgatgcctactctaatatgggaaacactctaaaggagatgcaggatgttcagggagccttgcagtgttatacgcgtgccatccaaattaatcctgcatttgcagatgcacatagcaatctggcttccattcataaggattcagggaatattccagaagccatagcttcttaccgcacggctctgaaacttaagcctgattttcctgatgcttattgtaacttggctcattgcctgcagattgtctgtgattggacagactatgatgagcgaatgaagaagttggtcagtattgtggctgaccagttagagaagaataggttgccttctgtgcatcctcatcatagtatgctatatcctctttctcatggcttcaggaaggctattgctgagaggcacggcaacctgtgcttagataagattaatgttcttcataaaccaccatatgaacatccaaaagacttgaagctcagtgatggtcggctgcgtgtaggatatgtgagttccgactttgggaatcatcctacttctcaccttatgcagtctattccaggcatgcacaatcctgataaatttgaggtgttctgttatgccctgagcccagacgatggcacaaacttccgagtgaaggtgatggcagaagccaatcatttcattgatctttctcagattccatgcaatggaaaagcagctgatcgcatccatcaggatggaattcatatccttgtaaatatgaatggctatactaagggcgctcgaaatgagctttttgctctcaggccagctcctattcaggcaatgtggctgggataccctgggacgagtggtgcgcttttcatggattatattatcactgatcaggaaacttcgccagctgaagttgctgagcagtattccgagaaattggcttatatgccccacactttttttattggtgatcatgctaatatgttccctcacctgaagaaaaaagcagtcatcgattttaagtccaatgggcacatttatgacaatcggatagttctgaatggcatcgacctcaaagcatttcttgatagtctaccagatgtgaaaattgtcaagatgaagtgtcctgatggaggagacaatgcagatagcagtaacacagctcttaatatgcctgttattcctatgaatactattgcagaagcagttattgaaatgattaaccgaggacagattcaaataacaattaatggattcagtattagcaatggactggcaactactcagatcaacaataaggctgcaactggagaggaggttccccgtaccattattgtaaccacccgttctcagtacgggttaccagaagatgccatcgtatactgtaactttaatcagttgtataaaattgacccttctactttgcagatgtgggcaaacattctgaagcgtgttcccaatagtgtactctggctgttgcgttttccagcagtaggagaacctaatattcaacagtatgcacaaaacatgggcctgccccagaaccgtatcattttttcacctgttgctcctaaagaggaacacgtcaggagaggccagctggctgatgtctgcttggacactccactctgtaatgggcacaccacagggatggatgtcctctgggcagggacccccatggtgactatgccaggagagactcttgcttctcgagttgcagcatcccagctcacttgcttaggttgtcttgagcttattgctaaaaacagacaagaatatgaagacatagctgtgaagctgggaactgatctagaatacctgaagaaagttcgtggcaaagtctggaagcaaagaatatctagccctctgttcaacaccaaacaatacacaatggaactagagcggctctatctacagatgtgggagcattatgcagctggcaacaaacctgaccacatgattaagcctgttgaagtcactgagtcagcataaataaagactgcacaggagaattacccctatacctgagcctcaaccttctgggggaaagggaactagataacatacttcttacttgtctgtacagtaccttgttgcagatgggtgatatataatggtaatagaatagcacagccagacttgcttcctgcatggtagggagagacacaaaagatgggaaactgcttttccacaaggaatctccgtagaattttgcggcgaccagatggtgcataggtctggaaggtctgatctcccttggtcttccatgggatggttagtgtggaggggagatatagattgtccggccgctttgtgattccatggattgattcagtcttctggatttttttttctttatattttgggtactggagcttttaaaaatgtttggtttcaggtatttttattcatgtgaagtgtatatgattctcttgagataaggttttaagctaaaatgttactccctgttttagtttctgaactctgacagattgacagggactttgctggtgtagtctttttataggttttataaaccacttgagcctatatcagtcgttttagtgtctgacctaatatttggagctatcagtgctttgttgatttagatgatgactcaagattttttctggtccatttcccatttccttttcttccctgacccccataccctcacccttaaaattctcctgtaactcaactaacaaaatcaagcctgattcaaaacatcctagggtgttttaaacacaccatctggtgccaaatgaagatttttaggagtgattactaattatcaagggcacagttgtggtactgtcattgataataatatagtttttttttttttcctaattttgacctgtttcaccagtgttttacccttgactgccccttctatgctgcttccaaaagtgatagtgtgtgtaagatttttaccttcctttctaaagttttttttttttttttttaagtgagtcctgttcttcctatttctttcagcagaaatgaaatcccaggtaagtataagtattcaagtatttgatcagtaagtcacagttatctccagtgcattaaataaccttcatcaagaaataggttataggtaaaatctctgaaggatcatctatgtattcaagtaattattttttagataataactgtcttctggacttggtcttgaagtctgtacagattcagcctcagtagtagcgaactgcactgctgtttggtttggagtacaaattagacttatagtcctcctggaacttgagttattaaaatcataggaataaaattatgggatctcaacaaagggtcgagggtttgaggcttaaacaagccaacatatgaatatatgttttgtctcgctatactgcacttacgctatccagttgcaggtaattttttgtctgctagtagtgttctagattatgtctttccaaagcgctgaggctgtgcacctattctgtagttgcagctgatgcctgaatgtatcctagctgacaaattattgattaataagaacttgaatttctggaagattcttactgttaaccaaattttgagcaaggagtctcaaaggtaattctgaaccagaattacatgttaatgaacagtgtaccttttaacagtgtaaatcacggaatatccgtgaagggatttcttaatttattttttaccggttgattgaaatatcagttaaaggttgccagcatggttgcagataaactgatgtttgaaattcgctgaaatacttaatgtggaataggataatatacttccaatgccctcaaggctgtgaccttacagccattttacatagcacatcattcctcctatagggatgaactttttcctggcacgaaaagtagccgctctggttgaagctttgcttattgtaacaggcttttatttccaggtaatatgtcttggaagacttaattctgattagagatatagatattactggaaactaattgttttttttctattgtactctgctttatcaaagaagtaaaacatttaaatcgtactacagaaattaagatgttgtcttgcgatccttaataaatgaatgatttccctttaatacgg

SEQ ID NO: 21073 - DNA, 695 bp, Homo sapiens
  source 1..695: mol_type = unassigned DNA
cagtgggcctgggaagatgtgtttcccctggatgtgcacattcctgtttgtggcttatcgcctctcatttattctgtgtgagtaggtagaaaatgagcatcacggacgtgctcagtgctgacgacattgcagcagcgctccaggaatgccgagacccagacacttttgaaccccaaaaattcttccagacatcaggcctctccaagatgtcagccaatcaggtgaaggatgttttccggttcatagacaacgaccagagcgggtacctggatgaagaagagcttaagtttttcctccagaagtttgagagtggtgccagagaactgaccgagtcagaaaccaagtccttgatggctgcggcggataatgatggagatgggaaaattggagcagaggaattccaggaaatggtgcattcttaaaagccccagtctctggagaaaagagagaaagggataatcacctggaaggattccaaagccctgggaatggggaaccccacatcccatccctacctaatttgttaattttccctgaaaaccttctgcagtttgctcattgttttagtgaggtcacgagggagtcactcctgactttcttggtggtgggtatatgccctgacaacttctgtaagccccccttcccccaacaggcaatgcctctaaaaatcacccaataaagacaggcttctcatc

SEQ ID NO: 21074 - DNA, 623 bp, Homo sapiens
  source 1..623: mol_type = unassigned DNA
ggaaatctaagaggttgtaactatcactttttctagcctatataaggtaggtcagtaaggtagcaaaaacacatctgttgttttgctccttcaactctttttcctgattcttcctggggggaaaccgaaaacggtgaaaaatgagcatcacggacgtgctcagtgctgacgacattgcagcagcgctccaggaatgccgagacccagacacttttgaaccccaaaaattcttccagacatcaggcctctccaagatgtcagccaatcaggtgaaggatgttttccggttcatagacaacgaccagagcgggtacctggatgaagaagagcttaagtttttcctccagaagtttgagagtggtgccagagaactgaccgagtcagaaaccaagtccttgatggctgcggcggataatgatggagatgggaaaattggagcagaggaattccaggaaatggtgcattcttaaaagccccagtctctggagaaaagagagaaagggataatcacctggaaggattccaaagccctgggaatggggaaccccacatcccatccctacctaatttgttaattttccctgaaaaccttctgcagtttgctcattgttttagtgaggtca

SEQ ID NO: 21075 - DNA, 2365 bp, Homo sapiens
  source 1..2365: mol_type = unassigned DNA
aaagcagtgcttctctctggggccaaggccagagctgtggacaccttatcccactcatcctcatcctcttcctctgataaagcccctaccagtgctgataaagtctttctcgtgagagcctagaggccttaaaaaaaaaagtgcttgaaagagaaggggacaaaggaacaccagtattaagaggattttccagtgtttctggcagttggtccagaaggatgcctccattcctgcttctcacctgcctcttcatcacaggcacctccgtgtcacccgtggccctagatccttgttctgcttacatcagcctgaatgagccctggaggaacactgaccaccagttggatgagtctcaaggtcctcctctatgtgacaaccatgtgaatggggagtggtaccacttcacgggcatggcgggagatgccatgcctaccttctgcataccagaaaaccactgtggaacccacgcacctgtctggctcaatggcagccaccccctagaaggcgacggcattgtgcaacgccaggcttgtgccagcttcaatgggaactgctgtctctggaacaccacggtggaagtcaaggcttgccctggaggctactatgtgtatcgtctgaccaagcccagcgtctgcttccacgtctactgtggtcatttttatgacatctgcgacgaggactgccatggcagctgctcagataccagcgagtgcacatgcgctccaggaactgtgctaggccctgacaggcagacatgctttgatgaaaatgaatgtgagcaaaacaacggtggctgcagtgagatctgtgtgaacctcaaaaactcctaccgctgtgagtgtggggttggccgtgtgctaagaagtgatggcaagacttgtgaagacgttgaaggatgccacaataacaatggtggctgcagccactcttgccttggatctgagaaaggctaccagtgtgaatgtccccggggcctggtgctgtctgaggataaccacacttgccaagtccctgtgttgtgcaaatcaaatgccattgaagtgaacatccccagggagctggttggtggcctggagctcttcctgaccaacacctcctgccgaggagtgtccaacggcacccatgtcaacatcctcttctctctcaagacatgtggtacagtggtcgatgtggtgaatgacaagattgtggccagcaacctcgtgacaggtctacccaagcagaccccggggagcagcggggacttcatcatccgaaccagcaagctgctgatcccggtgacctgcgagtttccacgcctgtacaccatttctgaaggatacgttcccaaccttcgaaactccccactggaaatcatgagccgaaatcatgggatcttcccattcactctggagatcttcaaggacaatgagtttgaagagccttaccgggaagctctgcccaccctcaagcttcgtgactccctctactttggcattgagcccgtggtgcacgtgagcggcttggaaagcttggtggagagctgctttgccacccccacctccaagatcgacgaggtcctgaaatactacctcatccgggatggctgtgtttcagatgactcggtaaagcagtacacatcccgggatcacctagcaaagcacttccaggtccctgtcttcaagtttgtgggcaaagaccacaaggaagtgtttctgcactgccgggttcttgtctgtggagtgttggacgagcgttcccgctgtgcccagggttgccaccggcgaatgcgtcgtggggcaggaggagaggactcagccggtctacagggccagacgctaacaggcggcccgatccgcatcgactgggaggactagttcgtagccatacctcgagtccctgcattggacggctctgctctttggagcttctccccccaccgccctctaagaacatctgccaacagctgggttcagacttcacactgtgagttcagactcccagcaccaactcactctgattctggtccattcagtgggcacaggtcacagcactgctgaacaatgtggcctgggtggggtttcatctttctagggttgaaaactaaactgtccacccagaaagacactcaccccatttccctcatttctttcctacacttaaatacctcgtgtatggtgcaatcagaccacaaaatcagaagctgggtataatatttcaagttacaaaccctagaaaaattaaacagttactgaaattatgacttaaatacccaatgactccttaaatatgtaaattatagttataccttgaaatttcaattcaaatgcagactaattatagggaatttggaagtgtatcaataaaacagtatataattttaaaa

SEQ ID NO: 21076 - DNA, 1181 bp, Homo sapiens
  source 1..1181: mol_type = unassigned DNA
aaagcagtgcttctctctggggccaaggccagagctgtggacaccttatcccactcatcctcatcctcttcctctgataaagcccctaccagtgctgataaagtctttctcgtgagagcctagaggccttaaaaaaaaaagtgcttgaaagagaaggggacaaaggaacaccagtattaagaggattttccagtgtttctggcagttggtccagaaggatgcctccattcctgcttctcacctgcctcttcatcacaggcacctccgtgtcacccgtggccctagatccttgttctgcttacatcagcctgaatgagccctggaggaacactgaccaccagttggatgagtctcaaggtcctcctctatgtgacaaccatgtgaatggggagtggtaccacttcacgggcatggcgggagatgccatgcctaccttctgcataccagaaaaccactgtggaacccacgcacctgtctggctcaatggcagccaccccctagaaggcgacggcattgtgcaacgccaggcttgtgccagcttcaatgggaactgctgtctctggaacaccacggtggaagtcaaggcttgccctggaggctactatgtgtatcgtctgaccaagcccagcgtctgcttccacgtctactgtggtcatttttatgacatctgcgacgaggactgccatggcagctgctcagataccagcgagtgcacatgcgctccaggaactgtgctaggccctgacaggcagacatgctttgatgaaaatgaatgtgagcaaaacaacggtggctgcagtgagatctgtgtgaacctcaaaaactcctaccgctgtgagtgtggggttggccgtgtgctaagaagtgatggcaagacttgtgaagacgttgaaggatgccacaataacaatggtggctgcagccactcttgccttggatctgagaaaggctaccagtgtgaatgtccccggggcctggtgctgtctgaggataaccacacttgccaagtccctgtgttgtgcaaatcaaatgccattgaagtgaacatccccagggagctggttggtggcctggagctcttcctgaccaacacctcctgccgaggagtgtccaacggcacccatgtcaacatcctcttctctctcaagacatgtggtacagtggtcgattcctgttttcaa

SEQ ID NO: 21077 - DNA, 1854 bp, Homo sapiens
  source 1..1854: mol_type = unassigned DNA
gtcacccccagcgggcgcgggccggagcacgggcacccagcatgggggtactgctcacacagaggacgctgctcagtctggtccttgcactcctgtttccaagcatggcgagcatggcggctataggcagctgctcgaaagagtaccgcgtgctccttggccagctccagaagcagacagatctcatgcaggacaccagcagactcctggacccctatatacgtatccaaggcctggatgttcctaaactgagagagcactgcagggagcgccccggggccttccccagtgaggagaccctgagggggctgggcaggcggggcttcctgcagaccctcaatgccacactgggctgcgtcctgcacagactggccgacttagagcagcgcctccccaaggcccaggatttggagaggtctgggctgaacatcgaggacttggagaagctgcagatggcgaggccgaacatcctcgggctcaggaacaacatctactgcatggcccagctgctggacaactcagacacggctgagcccacgaaggctggccggggggcctctcagccgcccacccccacccctgcctcggatgcttttcagcgcaagctggagggctgcaggttcctgcatggctaccatcgcttcatgcactcagtggggcgggtcttcagcaagtggggggagagcccgaaccggagccggagacacagcccccaccaggccctgaggaagggggtgcgcaggaccagaccctccaggaaaggcaagagactcatgaccaggggacagctgccccggtagcctcgagagcaccccttgccggtgaaggatgcggcaggtgctctgtggatgagaggaaccatcgcaggatgacagctcccgggtccccaaacctgttcccctctgctactagccactgagaagtgcactttaagaggtgggagctgggcagacccctctacctcctccaggctgggagacagagtcaggctgttgcgctcccacctcagccccaagttccccaggcccagtggggtggccgggcgggccacgcgggaccgactttccattgattcaggggtctgatgacacaggctgactcatggccgggctgactgcccccctgccttgctccccgaggcctgccggtccttccctctcatgacttgcagggccgttgcccccagacttcctcctttccgtgtttctgaaggggaggtcacagcctgagctggcctcctatgcctcatcatgtcccaaaccagacacctggatgtctgggtgacctcactttaggcagctgtaacagcggcagggtgtcccaggagccctgatccgggggtccagggaatggagctcaggtcccaggccagccccgaagtcgccacgtggcctggggcaggtcactttacctctgtggacctgttttctctttgtgaagctagggagttagaggctgtacaaggcccccactgcctgtcggttgcttggattccctgacgtaaggtggatattaaaaatctgtaaatcaggacaggtggtgcaaatggcgctgggaggtgtacacggaggtctctgtaaaagcagacccacctcccagcgccgggaagcccgtcttgggtcctcgctgctggctgctccccctggtggtggatcctggaattttctcacgcaggagccattgctctcctagagggggtctcagaaactgcgaggccagttccttggagggacatgactaatttatcgatttttatcaatttttatcagttttatatttataagccttatttatgatgtatatttaatgttaatattgtgcaaacttatatttaaaacttgcctggtttctaaa

SEQ ID NO: 21078 - DNA, 1000 bp, Homo sapiens
  source 1..1000: mol_type = unassigned DNA
ggagggaggcaagagaggtcaggggagagccctggccttgtgtgacctgagtaggaccttctcctgagacttggtttacctgtcaggaaagtggggacatggactggaaggtcttccacatctgttccaggctgcacctctggttgaaaaggcagcctctcctggttctagacagagctgaggacacaagctgctcccgggctgcctgccctgaagccctctcaggcccatctacctggatggccagagcagctgacaaggtctggtccttgcactcctgtttccaagcatggcgagcatggcggctataggcagctgctcgaaagagtaccgcgtgctccttggccagctccagaagcagacagatctcatgcaggacaccagcagactcctggacccctatatacgtatccaaggcctggatgttcctaaactgagagagcactgcagggagcgccccggggccttccccagtgaggagaccctgagggggctgggcaggcggggcttcctgcagaccctcaatgccacactgggctgcgtcctgcacagactggccgacttagagcagcgcctccccaaggcccaggatttggagaggtctgggctgaacatcgaggacttggagaagctgcagatggcgaggccgaacatcctcgggctcaggaacaacatctactgcatggcccagctgctggacaactcagacacggctgagcccacgaaggctggccggggggcctctcagccgcccacccccacccctgcctcggatgcttttcagcgcaagctggagggctgcaggttcctgcatggctaccatcgcttcatgcactcagtggggcgggtcttcagcaagtggggggagagcccgaaccggagccggagacacagcccccaccaggccctgaggaagggggtgcgcaggaccagaccctccaggaaaggcaagagactcatgaccaggggacagctgccccggtagcctcgagagcacccc

SEQ ID NO: 21079 - DNA, 5539 bp, Homo sapiens
  source 1..5539: mol_type = unassigned DNA
gcgcttgccccgcagctgattcatagccccggcccgggccgcctctgcacgtccgccccggagcccgcacccgcgccccacgcgccgccgaggactcggcccggctcgtggagcccttcgcccgcggcgtgagtacccccgacccgcccgtccccgctctgctcgcgccctgccgctgcgccgccctcggtggcttttccgacgggcgagccccgtgctgtgcgggaaagaatccgacaacttcgcagcccatcccggctggacgcgaccgggagtgcagcagcccgttcccctcctcggtgccgcctctgcccagcgtttgcttggctgggctaccacctgcgctcggacggcgctcggagggtcctcgcccccggcctgcctacctgaaaaccagaactgatggctctatttgcagtctttcagacaacattcttcttaacattgctgtccttgaggacttaccagagtgaagtcttggctgaacgtttaccattgactcctgtatcacttaaagtttccaccaattctacgcgtcagagtttgcacttacaatggactgtccacaaccttccttatcatcaggaattgaaaatggtatttcagatccagatcagtaggattgaaacatccaatgtcatctgggtggggaattacagcaccactgtgaagtggaaccaggttctgcattggagctgggaatctgagctccctttggaatgtgccacacactttgtaagaataaagagtttggtggacgatgccaagttccctgagccaaatttctggagcaactggagttcctgggaggaagtcagtgtacaagattctactggacaggatatattgttcgttttccctaaagataagctggtggaagaaggcaccaatgttaccatttgttacgtttctaggaacattcaaaataatgtatcctgttatttggaagggaaacagattcatggagaacaacttgatccacatgtaactgcattcaacttgaatagtgtgcctttcattaggaataaagggacaaatatctattgtgaggcaagtcaaggaaatgtcagtgaaggcatgaaaggcatcgttctttttgtctcaaaagtacttgaggagcccaaggacttttcttgtgaaaccgaggacttcaagactttgcactgtacttgggatcctgggacggacactgccttggggtggtctaaacaaccttcccaaagctacactttatttgaatcattttctggggaaaagaaactttgtacacacaaaaactggtgtaattggcaaataactcaagactcacaagaaacctataacttcacactcatagctgaaaattacttaaggaagagaagtgtcaatatcctttttaacctgactcatcgagtttatttaatgaatccttttagtgtcaactttgaaaatgtaaatgccacaaatgccatcatgacctggaaggtgcactccataaggaataatttcacatatttgtgtcagattgaactccatggtgaaggaaaaatgatgcaatacaatgtttccatcaaggtgaacggtgagtacttcttaagtgaactggaacctgccacagagtacatggcgcgagtacggtgtgctgatgccagccacttctggaaatggagtgaatggagtggtcagaacttcaccacacttgaagctgctccctcagaggcccctgatgtctggagaattgtgagcttggagccaggaaatcatactgtgaccttattctggaagccattatcaaaactgcatgccaatggaaagatcctgttctataatgtagttgtagaaaacctagacaaaccatccagttcagagctccattccattccagcaccagccaacagcacaaaactaatccttgacaggtgttcctaccaaatctgcgtcatagccaacaacagtgtgggtgcttctcctgcttctgtaatagtcatctctgcagaccccgaaaacaaagaggttgaggaagaaagaattgcaggcacagagggtggattctctctgtcttggaaaccccaacctggagatgttataggctatgttgtggactggtgtgaccatacccaggatgtgctcggtgatttccagtggaagaatgtaggtcccaataccacaagcacagtcattagcacagatgcttttaggccaggagttcgatatgacttcagaatttatgggttatctacaaaaaggattgcttgtttattagagaaaaaaacaggatactctcaggaacttgctccttcagacaaccctcacgtgctggtggatacattgacatcccactccttcactctgagttggaaagattactctactgaatctcaacctggttttatacaagggtaccatgtctatctgaaatccaaggcgaggcagtgccacccacgatttgaaaaggcagttctttcagatggttcagaatgttgcaaatacaaaattgacaacccggaagaaaaggcattgattgtggacaacctaaagccagaatccttctatgagtttttcatcactccattcactagtgctggtgaaggccccagtgctacgttcacgaaggtcacgactccggatgaacactcctcgatgctgattcatatcctactgcccatggttttctgcgtcttgctcatcatggtcatgtgctacttgaaaagtcagtggatcaaggagacctgttatcctgacatccctgacccttacaagagcagcatcctgtcattaataaaattcaaggagaaccctcacctaataataatgaatgtcagtgactgtatcccagatgctattgaagttgtaagcaagccagaagggacaaagatacagttcctaggcactaggaagtcactcacagaaaccgagttgactaagcctaactacctttatctccttccaacagaaaagaatcactctggccctggcccctgcatctgttttgagaacttgacctataaccaggcagcttctgactctggctcttgtggccatgttccagtatccccaaaagccccaagtatgctgggactaatgacctcacctgaaaatgtactaaaggcactagaaaaaaactacatgaactccctgggagaaatcccagctggagaaacaagtttgaattatgtgtcccagttggcttcacccatgtttggagacaaggacagtctcccaacaaacccagtagaggcaccacactgttcagagtataaaatgcaaatggcagtctccctgcgtcttgccttgcctcccccgaccgagaatagcagcctctcctcaattacccttttagatccaggtgaacactactgctaaccagcatgccgatttcataccttatgctacacagacattaagaagagcagagctggcaccctgtcatcaccagtggccttggtccttaatcccagtacgatttgcaggtctggtttatataagaccactacagtctggctaggttaaaggccagaggctatggaacttaacactccccattggagcaagcttgccctagagacggcaggatcatgggagcatgcttaccttctgctgtttgttccaggctcacctttagaacaggagacttgagcttgacctaaggatatgcattaaccactctacagactcccactcagtactgtacagggtggctgtggtcctagaagttcagtttttactgaggaaatatttccattaacagcaattattatattgaaggctttaataaaggccacaggagacattactatagcatagattgtcaaatgtaaatttactgagcgtgttttataaaaaactcacaggtgtttgaggccaaaacagattttagacttaccttgaacggataagaatctatagttcactgacacagtaaaattaactctgtgggtgggggcggggggcatagctctaatctaatatataaaatgtgtgatgaatcaacaagatttccacaattcttctgtcaagcttactacagtgaaagaatgggattggcaagtaacttctgacttactgtcagttgtacttctgctccatagacatcagtattctgccatcatttttgatgactacctcagaacataaaaaggaacgtatatcacataattccagtcacagtttttggttcctcttttctttcaagaactatatataaatgacctgttttcacttagcatcctttggactctgcagtaggttgtctgggtcaagataactctcagtcacatttatattcatattatgctaaaatagtaaaatgaaacctcattgttggacataatttagatataactaaaaagttctatgaagtgggaaattccgtgttggctctggagcagctttgtctcctctgaaccaatatatcccaaaccaatatatgcaaagcacctggtacacaactggtattttagtacatgttggttcttttggtgcaatctcagctcactgcagcttccgcctcctagattcaaacaaacagttctcctgccccagcctccagagcacctaggactccaggtgcatgctaccacacctgactagtttttatatttttagtagagattgggttttaccatattggccaggctggtctcaaactcctgaccgcaggtgatccacctgcctcagcttccccaagggctgggattacaggtgtgagccaccatgcccagcctatttgtcacattatttgtcacatttattttacttttatttattttttgagatgaaatttcgctcttgttgcccaggctggagtgcaatggtgcagccttggctcactgcaacctccgcctcccagggtcaagcaattctcctgcctcagcctcctgagtagctgggattacaggcatgcaccaccacacccaggtaattttgtatctttagtagagatggggtttcaccatgttggtcaggctgttctcgaactcctgacctcaggtgatctgcctgccttggcctcccaaagtgctgggattacaggcgtgagccactgcgcctagccgtcacatttctaaacaagcatgaaaggggttcatttttgtcttcttcttgcctgccgtcagcatggtggaaatggctctgcctatgctcatgcttctggtgcccaatgccttgcactgtgccattcaacactatgaagagaaacaagtagccacacctcaaaataatgtggctgtcaacaactggcctaaataaacctacacaaaccagtacttgccttttgctggaaacattgattatgtgctcctcacgtagtagaaagcggtatcctgattagtctaacagttgtgttagactttagggccagtattgtcagcatttatttatttatgtacctttgttatgatgggatatttttcatttgaaacttgttcataaaaatgtcaatgacattgatgactgatttgtacatatttttcatatagttttgtttaaaaaataattcacgcaaaatcttgaagtcatttttgctattgaaataaaccttaattaaaatatttcatcatca

SEQ ID NO: 21080 - DNA, 1740 bp, Homo sapiens
  source 1..1740: mol_type = unassigned DNA
gcggccgcctccccccgggactgaagggagggaattcctgtgggtcccaggagtgccaagagtgcgcagcaagacgggaaattgcaaaagacctcacccctctgccctcccccgcggttttccagtaactcccgcccctccgcgcttgccccgcagctgattcatagccccggcccgggccgcctctgcacgtccgccccggagcccgcacccgcgccccacgcgccgccgaggactcggcccggctcgtggagcccttcgcccgcggcaaaaccagaactgatggctctatttgcagtctttcagacaacattcttcttaacattgctgtccttgaggacttaccagagtgaagtcttggctgaacgtttaccattgactcctgtatcacttaaagtttccaccaattctacgcgtcagagtttgcacttacaatggactgtccacaaccttccttatcatcaggaattgaaaatggtatttcagatccagatcagtaggattgaaacatccaatgtcatctgggtggggaattacagcaccactgtgaagtggaaccaggttctgcattggagctgggaatctgagctccctttggaatgtgccacacactttgtaagaataaagagtttggtggacgatgccaagttccctgagccaaatttctggagcaactggagttcctgggaggaagtcagtgtacaagattctactggacaggatatattgttcgttttccctaaagataagctggtggaagaaggcaccaatgttaccatttgttacgtttctaggaacattcaaaataatgtatcctgttatttggaagggaaacagattcatggagaacaacttgatccacatgtaactgcattcaacttgaatagtgtgcctttcattaggaataaagggacaaatatctattgtgaggcaagtcaaggaaatgtcagtgaaggcatgaaaggcatcgttctttttgtctcaaaagtacttgaggagcccaaggacttttcttgtgaaaccgaggacttcaagactttgcactgtacttgggatcctgggacggacactgccttggggtggtctaaacaaccttcccaaagctacactttatttgaatcattttctggggaaaagaaactttgtacacacaaaaactggtgtaattggcaaataactcaagactcacaagaaacctataacttcacactcatagctgaaaattacttaaggaagagaagtgtcaatatcctttttaacctgactcatcgaggtgagactagagttgtcacagcccaccgtggccactaacgtgtctttgtttcacagactgtgtgatcaagtaaatgtgctgtagatctttgcctcattcacagcggaggtgagagttagaatttatacctattgttcatgccacgtttctcctcatggatgcacgcatcccctattatttgtttcttttaataatgtcacgagcaccaatgagcttactacccaacttcaaaactaggactctaacaataacttctgtcatatctcatcctgtaacgcccccaccttcgctccttccgccaagataattatcactttaaattgtgtgcgtgtgtattctcatttcttatgtgatggtaaaaatgcctttattttgtttggttttaatgcatagaaaggacatcaagctgtatgtaataattcagtaattatgtttatataatattaaattgctaatatttgcccata

SEQ ID NO: 21081 - DNA, 2092 bp, Homo sapiens
  source 1..2092: mol_type = unassigned DNA
ccccacagtgagaggaaggaaggcaacagtcgccagcagccgatgtgaagaccggactccgtgcgcccctcgccgcctctgcctggccacatcgatgttgtgtccgccgcctgctcgcccggatcacgatgaacgcgcagctgaccatggaagcgatcggcgagctgcacggggtgagccatgagccggtgcccgcccctgccgacctgctgggcggcagcccccacgcgcgcagctccgtggcgcaccgcggcagccacctgccccccgcgcacccgcgctccatgggcatggcgtccctgctggacggcggcagcggcggcggagattaccaccaccaccaccgggcccctgagcacagcctggccggccccctgcatcccaccatgaccatggcctgcgagactcccccaggtatgagcatgcccaccacctacaccaccttgacccctctgcagccgctgcctcccatctccacagtctcggacaagttcccccaccatcaccaccaccaccatcaccaccaccacccgcaccaccaccagcgcctggcgggcaacgtgagcggtagcttcacgctcatgcgggatgagcgcgggctggcctccatgaataacctctataccccctaccacaaggacgtggccggcatgggccagagcctctcgcccctctccagctccggtctgggcagcatccacaactcccagcaagggctcccccactatgcccacccgggggccgccatgcccaccgacaagatgctcacccccaacggcttcgaagcccaccacccggccatgctcggccgccacggggagcagcacctcacgcccacctcggccggcatggtgcccatcaacggccttcctccgcaccatccccacgcccacctgaacgcccagggccacgggcaactcctgggcacagcccgggagcccaacccttcggtgaccggcgcgcaggtcagcaatggaagtaattcagggcagatggaagagatcaataccaaagaggtggcgcagcgtatcaccaccgagctcaagcgctacagcatcccacaggccatcttcgcgcagagggtgctctgccgctcccaggggaccctctcggacctgctgcgcaaccccaaaccctggagcaaactcaaatccggccgggagaccttccggaggatgtggaagtggctgcaggagccggagttccagcgcatgtccgcgctccgcttagcagcatgcaaaaggaaagaacaagaacatgggaaggatagaggcaacacacccaaaaagcccaggttggtcttcacagatgtccagcgtcgaactctacatgcaatattcaaggaaaataagcgtccatccaaagaattgcaaatcaccatttcccagcagctggggttggagctgagcactgtcagcaacttcttcatgaacgcaagaaggaggagtctggacaagtggcaggacgagggcagctccaattcaggcaactcatcttcttcatcaagcacttgtaccaaagcatgaaggaagaaccacaaactaaaacctcggtggaaaagctttaaattaaaaaaaatttttaaaagaccaggacctcaagatagcaggtttatacttagaaatatttgaagaaaaaaaagcgttatttatagtccaaagaaaccaaagacttagctcacctgcattctgactttgtttggagacacacacttcagcagggcggcgacttggcaagacaaatgatgagcaggaaaacaccactggatctcacaccttcaatccatgaccatcctcgctgtgcttggctgtttagtggtttggagcatagtgattttgagccattgagcggacatcttttaagatcgaactttctcatctgttctaccatgccacgaaggtgtatggtgtctcagtactaccaccaccagtggttacagacttaggcagagctggtcttcagaaatggttgttctataggagtgcaaccaacatggtatggggttgtctgagttcattggattaggagtgtgattttgctcgtctagcctaacgtttgaacctgccaggcccgcaacctaaatgcagattca

SEQ ID NO: 21082 - DNA, 16121 bp, Homo sapiens
  source 1..16121: mol_type = unassigned DNA
gcccccgccgcccccgggccctgatggactgaatgaaggctgcctacaccgcctatcgatgcctcaccaaagacctagaaggctgcgccatgaacccggagctgacaatggaaagtctgggcactttgcacgggccggccggcggcggcagtggcgggggcggcggcgggggcggcgggggcggcggcgggggcccgggccatgagcaggagctgctggccagccccagcccccaccacgcgggccgcggcgccgctggctcgctgcggggccctccgccgcctccaaccgcgcaccaggagctgggcacggcggcagcggcggcagcggcggcgtcgcgctcggccatggtcaccagcatggcctcgatcctggacggcggcgactaccggcccgagctctccatcccgctgcaccacgccatgagcatgtcctgcgactcgtctccgcctggcatgggcatgagcaacacctacaccacgctgacaccgctccagccgctgccacccatctccaccgtgtctgacaagttccaccaccctcacccgcaccaccatccgcaccaccaccaccaccaccaccaccagcgcctgtccggcaacgtcagcggcagcttcaccctcatgcgcgacgagcgcgggctcccggccatgaacaacctctacagtccctacaaggagatgcccggcatgagccagagcctgtccccgctggccgccacgccgctgggcaacgggctaggcggcctccacaacgcgcagcagagtctgcccaactacggtccgccgggccacgacaaaatgctcagccccaacttcgacgcgcaccacactgccatgctgacccgcggtgagcaacacctgtcccgcggcctgggcaccccacctgcggccatgatgtcgcacctgaacggcctgcaccacccgggccacactcagtctcacgggccggtgctggcacccagtcgcgagcggccaccctcgtcctcatcgggctcgcaggtggccacgtcgggccagctggaagaaatcaacaccaaagaggtggcccagcgcatcacagcggagctgaagcgctacagtatcccccaggcgatctttgcgcagagggtgctgtgccggtctcaggggactctctccgacctgctccggaatccaaaaccgtggagtaaactcaaatctggcagggagaccttccgcaggatgtggaagtggcttcaggagcccgagttccagcgcatgtccgccttacgcctggcagcgtgcaaacgcaaagagcaagaaccaaacaaagacaggaacaattcccagaagaagtcccgcctggtgttcactgacctccaacgccgaacactcttcgccatcttcaaggagaacaaacgcccgtcaaaggagatgcagatcaccatttcccagcagctgggcctggagctcacaaccgtcagcaacttcttcatgaacgcccggcgccgcagcctggagaagtggcaagacgatctgagcacagggggctcctcgtccacctccagcacgtgtaccaaagcatgatggaaggactctcacttgggcacaagtcacctccaaatgaggacaacagataccaaaagaaaacaaaggaaaaagacaccggattcctagctggggcccttcactggtgatttgaaagcacaattctcttgcaaagaaacttatattctagctgtaatcataggccaggtgttcttcttttgtttttaatggctatggagtccaagtgcaagctgaaaaattaatctcttagaaccagacactgttctctgagcatgctaagcatcccagaaacccaaatggggccttcctggagcgagttaattccagtatggtgtcaaccaagctcgggattgcttaaaatatcatccatcccacttcaggtcctgtcagcttcttgcagtcagagttcctatgagtaacaataggagtttggcctatgtaaggactctgagtttaggcttccaagatacaacaataagagaagaatctagcaacgagaatgacctcatttgctttccacatgcttagcctcattataccatgttatgtccaagttcacagccacaacatcagaatggtaattactgagcacaagttttaaatatggacgttaaaaaaaaaaatccaaggacctgtttttccaacccagacatcttttcattgaatgatttagaaagctttaagttgatccagcttacaattttttttttctttacctcctggaaatctcatatggtcttggatccgtcaaaaaaaccagtcagttcacttgcgctcaaagtatcaagcacaacaaagataaacagaagtgaggaaggttctgggttcactacatctggattttcaagacacctattgtgaagtcattagggaattgatgagaatatggcttcaagcacattttgcagtttgctacaaattctgttgtacataatgcagacgcacactcaggaggccaatttaactgttaacagtgcatggagcgaatgcagcattttaaaagatctaggtttttttaggtcattaatgtgtccttggttgatcagtcatctggtccctcctactgtgtgttatgaccaccacgtaatccattctcgctctttctgatttggggtttttcctcatccatcccattagtagggatgttttctgtgttttctagcaagaaaaaaaaatcaatcaatcaaacctgcatacatgttactcatgactgtcatctagtcctaaatctcttctgttgttgaatcatccttgcaaaacagctgaatacatctggagaaaacacagcacaccaaagaagcagaatactgcaaaccaaagacatttatgacttgtcattttctagcctaaaaatactgtgattacttttagaaatcagaaaacctctgcaactccgaatggcattcagctcttgcatttggcgcatcatcgggctgagcggaccagctacaccaaggacattagccaagccacccagaggggtggctttgccacaccagttgtcaccttcccatagcaagtggaagagcgcccacagaactctgggagattgcaaaggtcacaatgtgcatatttaccagtgaatggccccgggtggggccacgtgggggtgttcaaagcaagccaaacgctgcaatcattctttacagacacttgagactgacttttttatgaattacttagtcgaaaccaaagaaactttttctgcacctacttctgcaacaaacaaaactgtcccattaaaatgaataaataaatccgtaaatcaatggaaatcaccaccaataagaaggaagcacgccagaaaataaacgaaaacaaaaacagggagacacactgtgttcaaacagacctcttgggacattttttggaagcagattttaaagaaagggttgagacaaagatagaaataaggaagagcctcagtggctgctgcttcatttgacaactcacacggtaatcttaaagctgaagattgtctttaatttgtgcctatgcagtttttcaaaagaacacggaacagagcaacagaaacctcaacagctacaataccaaagatgaggatttctcacaccttttgtttcagttcattatctcctcttgcctggctaaaatactaatagcgccattgaactgtataaaggtaatcaattatgtttctctgagcaacaaaaggaaagggccatttatttgattttattgtttcatttcaattttgtcttatggttttttgccccaacatggaatctctcaaaagtttccatggactccaagtttaagatgttgggatattgaacagttctctctgctcagcagagggtagggaataacattatcacttgaatgttctttgcttaacccttagacttggttccttctatgttcagagtctcatcatcaggggaaggaaagggagtgagggtcagggataggggtcttggtgatgcatcctctcccgagccacagaaccaaagagtttatagaggaatttacagcctcgttttcatgtgattgctacatcctaacagggcttcatttgggggtggggggaaacatgtaaaaataattgccagtttctacttttctattagctttttaaaaatcagctgtaaagttgcatttctaaagaaagatatatataatatataaaatacatatatagatcaacttgacattggtgataaccaaaattattgctgtccaaattcatgtcttgttttggtccagtgcttcatttgctaagtattcggttcagaatttttctcatttctcatgccattccagagttaatttgccactgtggatgatttgaagtattcagatctctatggaagtttctgggacaggtttaaagtcaagatcaagcattttagcatttaacctgttgataaatggatccatggtgtacatgagttttatttgtattcggagtcatctctattctatccctcagcctcgattaaggtggtgagtgaagtgcatccaacagactcggcccagaactgggtcctgacagtggggtgctcatcttctgtaactgttgggaaggctcggtggtccattttcaccagttaaagaatatgaggccagcccagaaatctgttctccaggagctgccctgtcccatctgggtgtgccagaccccctcagtgagcaggtccaccaaagggacttctcacaggggaagcccaactcctgttgcaatgggttgatagatttcctcagggtggtaattaccaattcgtattttgacaagcctatgtgcaaccacagctggcactggggtgggcagtggtgttgggtgggatgggggagagtgtctcaatcctgaagagaaaatataaagcaggttttggggagacttctggagtcctgcccctagagagccccattgttgttctttgtgccccctcctcattccccctatgtgggtctccctatgcaggagctgtgagagaatgtgactctccacaatttttataattcatccttcctaggagattgttcattggctcttcccttgtgtccctttgtcccttgctcatactccatgtttcctttgtcaaaggactaagaaaagagcatatttcagcagaggagtgttcccatgtgggttgatttcaacttgggtatttctaaaagagtccttgtgacatgtgtccagtggaaatggttgctcttttccagactggattgaggaatggagcctgtttgatttggttagtgattctttgacatactaatctcagcgtttgggtctccagcatcctctgaagatgtctagactagtagaggctgcctttgtgacctgacattacaacattggtcaaaccagtcctctgataatcagaagaacatgtcataattgtttaaaaaaaaaaaaaaggcaagaatttctctccaaggagctttaataaatgtctcattccagataatgtcataccagagaaaagtgcttgcttttagaaaattatttacatacatatataaatatatatgtgtatctatacagttatgtatcaaaattttaagccctgcagaatttcaatttgttagaaatctaacagaaaaaaatttctatattgaaaggtaatagaatttaacccagtgagtttactcaaggatttttaaatttaagttaataatttcagagaaaataaccatttgggtgtggttatagtttagtatccattacctcaatccaaggaaaattccaggcattcctcaaccatcaggaaaaggtacagtgtgaaggaacagttctcagccaaatttcacattcttgaggcaacagaaatcaaaacactcagagccattgagtggaaaaacaatttactttattcctttacacaaataggcttgcattgtttttgttttaatgtgattttggtactagggatataattatttcattccaggaaataataaaaaaaaacagacagagccaatacatttctttttttaaaggaaacagcaacaacaataaaaactcagcaccaatatttaaaagcttttccaaaatgtaaaagaagtgtttagcttgcaccatgcataaaggtgcaggctagttgaaccaggaagcatggcacttcctctggagaaatccagaaagagttgcttctaagctcccttttccccctgcaggctcttggcaattgtaggctttagcaaatccagaataattttcaattcaagctaaaataaaatcaacatttggaatgtaaatctgatacacacacacttttctaagtcaaacaacatatttcaaaaccaaaaataaataccttttagataatcagttattttctttgtctatactgggcacccacctactagtgccagtaaattcaagttgaacagatttttaaaatcactattatctgggtatgggggaaacttccccacttttgaaaatgttggtagaattataggaatgtctgtttgattatcattaccaaagtgtcatgacagtatgcctttgtagtgaactcggattttcaggagtttgaatagttggatattttaaaatctaagaagaaaaggcctgtttccaatgttgttgaagaataatgaactctattaaaaagtggagaaaaagataatacatgtggtcaaggttgaccacaaggcccaggcacaactaccttggcgataatcttctagattcgtaacaggttagagctgactttttgtttttgttgttgctgatgctgtgtgattcagacttctcagcctaaccaggaagagtaagtggaaatggtagatgaagaaggggtagagctggtgtatctataactttctgatatttgtctgccaaacttgatatattagtaatttttttatctttagctaagatcaagtcacccctgaaacaacaggagattctagttttaaaataaggccacaaaaatccttacggaatgaagaatggcaccccagttggttgtataagtctcataagataatgatgttgattttaaatatggatgtctcaatgcctgttttctatcaatgatttgtttgtttccaaggtcggggagggaaagaggggagggtttatctgttttagaaagtctcagaatacttataaaatacagaagtagttattaaaatatataggacctcacataggtagatacagaacttaccattgaggctgatgggctgttgtgtgaatcacacaggaccttaaatgaggctcattattctcacacaccaaaatgactctgacagcctgaagcagttattgctagagcccaagctttccttggaggttttggagttaggttgattggaagtaaccagctaataccttttctagtggagaaaaagacattgctaccagcttgttcatcccatagaagtcttccactctgctccatttttagcagcaagcatttcatgtagcataaaccttggcagataagtgtgcctaaggtttatacagtctgtccgcttggatgtatacaaatttagatacatattttaacatgtgttctcatagatgactttataacaacacacattacctataggtgtctagactgtgtacatacaagtgtgtacagacaagcttcatacgtatatactgtaatccgttacaacaaataaattttaaatcatcgtttaacatgtatgtggtacttctacagtgtacattgttttcattatttattgtaacattgaaaaccacagtgcagggaaaacaaaagtatcccagcatcttcatcctgtacacttggaattaatttcatttgggcatatccaagataaactcaactttcaagaaatcttgtatattatttaatcatctgtgttaggatgacacctatgattgatgacttcggttgaatagctttattctggatttttcataactaaagctaaatccaaagacctgaaaaaggacaaaaagaaaaaaaaaaaaagaaaaaacaaagaaaaagaagaaaaaataataaagtcaagcgcaaactgatggggagacagtgggctctggtttccaggattgagacaatggtactgcggtcttggggagactgcgttagctagtggggagtggtgatttttttcatgcttgtcacatctaaatggtctttaacatgagaaagttttagaggttataatttcctgctttgtttttatttagactatcaaatgaagttatacatgttgtcagtcaaaaaatgaagacaccctctgccccaccccacagaatgctttttatcttgtctctttgggttatgacccaacaagctaagtaccattaatgtaattaacttatttaaattagttcctagtacataaatgtataggatttgggtaattatttaatcatccttccttagtttgattctactccttgtacttatttatcaaaacctagaccaatggtgcatcagagatgcaaaattctacttggaatactcttgaagtttagtttgctttataaagcagtgaaattctgttacagacagggaagaaatacaggttacaaaaagagaatttgggatattcttccctcttaaattaacttttaaaatagtctaagtaacaatttttaaattatttaacttaagttcgcagccccacctggtaccaggcgaacttcacctcttaattattgtggccctcggagccttcatattgtaacttatttatttaacttattcagcatctgtgaaaggtgcactgtatagtttatatttttaatttaaaacaacagagagcactgcagtttgtttgctgtcagaacaacagagcaaattttgtggacaagcaatgactattcagcctgaacctgtgcattcagaaaacataagctgagaccctgcttcaccagcctggatttcggggcttctatacagaaactggaaaaataaattttaaaaaaatcgtaaacaaaaagagagaaacccttacactagctgcttccaagaatgaactctgtgtgtatgtaaagcaacaaaacaaaaaaggaaaaaaacaaaaagcagaaaaaagaaaaaaaaaatgaaaaactttctatttctagtgagaaccaaagaaggctacctcactgactttttccatttgtaattttaatcgtgttgatgacaccaaagataccaaagatttctttctctgtgcggtctgcattttgcttgtgctcttttataatttgaacgattttctctgacatatggtatgtacagccacagctcagataccccaaagaaataattatctatgcgacggcggctgctaatttggaaagggatattttctgtgtttctcttatatgtttgctgtctgctcgacatgttcaagatgcgagttcagatgctgctgtaattggattccttaaattctgattacaaattgaggaaggaaactggttggaaatggccttcagtcctagccatggcctctatccccgctgggacctgtcacagtaaagactgccaattactgaaccacagaagctctgaccattgagtagttgagctggaagagaccttaggaatcatttagtccaagccccggtggcccagaggaatgaaatagttatccaaatcaaataactcttgagagtgaaagcccacacatgcctcctggttcctgccccagtgctccgcttattgtacagtgctacctctgcatgagagcggtcccacattgacaaataggatggtggcaatcctttagcaatgagcagggactggggtttatctcttaacattttcagctgtaaaattagtcacaagcattttcagtgtcccattagtacatagtcacatatggtcggttgcttcgtgaaggtggcctgtcttgaaatactagggctcatacgggatttttgccctaggaaaaacatgttgatcccaatgatgtgatcacttttgaacctttccattacaaagcattgtatagataactttttaattcagtaggaggagaaagttcattcttggcctgttggctttgattattatgggtactttaaagtcagtatttatcaagaaagggaacttgaccaccattggcacatgtgacatttaagctcttcagccttttcctttttagttgtaggtgtttacatttcatttctaagccaactctgtatttatgagagaagtttaagccttacatcatttgatactaaagggttatttgtggtaaatgaaaaatgaccccaaaattacagaggaatatgccagtttaagaaatggctacttaaagttgcttctctctttccttcttactcatgaaattaattggtcttcttcaagtttctttagattccattaaatgattaaatcactattaagagccattcatcaacgtgatttgtgtgttagccaatgaatctgtctcagcttttgaccaaatgggttttagacaaatgcaaagatctgcctctagtccatatggctctttttgagtgctagtattttgcatttcacataatgtagttattttgagcttttaaagagagcatttagacaaagaagcaaagagaggaagggaccaatcaactcatcagttccatgcatcaacaaagcatagctagtagaggaatataaatgacagattgacaaactgtaggaaacactgttactctctttctgaagttttcaagcaccatcctatgtgaaagttccctcctgtccaaacaagctcaaggcccatcttctccctatacaaggcaaacctgtaaggccttccttccaaagagtacattgctttggttttcttcctaaattcctattggaattagaactctcagaatccctgggagacagagcaaagatgacttaattcattgagcagcagagctccctataagtgaacatcaccttccccatctttcctactgccacacccatacgagagaggatctagaaagagcgatggcagcctgaacacagaaaacatccccacttggcagacctctcctcagcaatccccccagcctcatgcttcacttgcaaagtgtgacataaccacgggacgagtgccttgcttgaaccaaagcaacgatttagccagtctggacctctctgtgctttttttaattcttcctgtgaatacctcagcttcaactgggcctccatacagtcagttggtgggcttattgtactgtggtgctttgcaatgcaaccctgcaaagaacaagatttgtactaataccaaaggttctttctctatgtctcctcctctgcctccctcgttcttcccttttttctagttcttcacggttccaaagctttactatgaacctgggcatgttggcaatgcagaccgcgcaattccttaccgaattttctcagatatacctcatagacaatagtgtttagagtaatgttattatagcgtatgtaataaattattcactgtttcttttggtaactgtgatttaaaaaaagaaaaaagaaaaaaaagctttatacgttttaggttgtgcttttgtaatagatgaaaaaaggtgcgcttaaaaagaaaatgtatgtttttttccccctttggattttatttatgctggattggggaaagttgcagaatgagcccaaagtttacagtttcatattttgctgaagaaacaatctgtgttcatttgctctgttgaaaagaataattattttctacatttgtgccacttggtctgaacaattaattgttccgtgttaacagtgtagtattatgattagcaactgccaatcagtgctataattttatgcatgaggctaaaaatttagcagtgtgatgcattgtggtcttaatagcaacatttttcattttgaactagatcttcccctttggttcaatggactttatttatgcatgggcgcctattgtttgttagcagttgtggaacagttgtgtatacattaaactgtgaaaatgtacacagttcagcctcagacggtggtaatattggttttattgggagatgtgtcacctcgaaaataccctttacatctgttgggatctgaaaatgagtcacattgaattgggttccagctttataatgagaaacgttattcctaatttttgagttagccaatttgcattccacaaattgggatcctcataacccaaatatatcaccgtatgtgagagggatttgaaagcgagtattgaaaaactcacctttgcatatttaatttccaccaaaaggagttattttggctttatgctcatgaacttagacctaactggccatgtatatgtagatgcaaattcatctagctgtggccctctttgatctctgcttgggaatggctatttttgactatgcgtggtttcttctcgtattttgtgatcaggtcagctcccagtagaaactcaaatggcatcaatattactaactcttctctgcccacttctcttttgtccactctcctagacattcccaccaactgttccagtgatttgggcaaaaatacgcagccatttcccaaaacttcacatgtgcagctatcatggctgtccctccctagacttggaggtgactctcacttaatttttacctgcccaacaatgttccatctaccatctaaaaggtaatataagaagaagttttgaaacccactttaggaaaaccatcttctttaaatccttcaattatctgaggcctctatatgtcaaaactatttttcagttgcaggggattgggcaaacttgttctttcttatacttgggttcaaagacccattctccagtttcatatttcccaaaccaaaatgcttgacataaagccaaatcaactgccaagcacactttattttgcataggagtatgcagcctagggaaccttggttgaaaagcagcagtctgctatgcaaaatattggaaatcactgacagtgtagcattcatattatctgtcaatgagggtatattgggaacgtgctctcgtgaataataaaaagcaacatatttttatttggccttataaattaggttgtggtaatgtaaactttgatatatagtctttttatttttctcttattaatctgccaaagatgggaacagatacaagaatttttcaaattggcttttgtaagacaattgatgattgtaatagtgtttaatcttccagaaagctttatatgttgttccacaataaaattgatatttgtttcagcaaagttttcctgacactcacaaacccacaaactgttcctcttaatgcagatattgtagaatctacaaagttcaaatccatttttgatccaaagaaagtagaggagtatttgagacatgagtgtacccagccctttttttaatcacaggcaatgcatgggtctggctggttacactttgccaagaagacttgtcttatgaaacccaaggtatattttgttatgccattttatgtccttttcttttaacattgtggaaagtggtatgttgaatcaagtgtaagctgagttttccagacaactgaagtagctacatcatgaatgttattttgttattaaagggtttttactcagtgctttgtgccaatggatgtccttttccttggagacacataactacaaaattacctcagcttggcctggttttctctcctgccctcttggggaaacatgggcctggcctgggaaaaggcaggtcatgggctggaaggtaggttttggtactaggaagaaatctctgtatctgtcagctttaaagagaactgggccaaaaatctctaacctcactctctctggactccaacacttccctgcaatcctttggtcttgagcatgtgccagcatgaaggcagactccagttcatacatgaaaggcaagaaaaagaaaatagtaaccttgaatcttctgtgggccaccaggcactcacctttccccaccttgcacactatccagtcaaggctattgcagcccatctggtggctttacatgggacattaccaaaggcttcttcctccatcctggggttgcaaaggatccaggtcccctccatccagtggggctcttccacatcagaagtccccctcccaccatcctctgcatcctgtttagctatcccatctataccttttggagatgattatttagaaaacaaagaaaggtatggaatggggtttcctattgtttgctaggttatattttagcaattctcaattctttgatctggaaaaatacaagagggaaaaggagaccccactatctccctgtgctttgctcccatctcagggggcaggggcagtgcacattgcctatgctgttgatctgtcttgggcgacaggctgaatcacagctattgccccagccaaaaacatggcccatcaatgcctactttatctctgcttgaaaatcctattcaaaaagttgtagagtttgaggtttttatccccccatatcctttgctttggtccagtttggcctttagcataagagtcagctttatctctaggaaagttttttcagattatgacaaggaacctgccacctgggaagaaaagagtccgaagactagcaatcggataggtagtcataccattaacagatacttccttgaaggtagaatattatttcctttctttacagttttgtgttacacaagtccaagtggtgccagcaaacttcttaccgtgaaatgttgtaaaacacctggcatactgaaatttctgaaacaaaaacacaagctccacattgataacttgataaataaccactaaagtttagatgcagggactgagatgatacaggcaaaatcttggtgttggtttctcttttaattcgtatcttcgatcacctaacctttctcaatccaagagcagttcagtcttttctccccaagtctaggatgccaaagagcatcataggaaaagataattagggattgaccagcatttcaattagttctcttcttcatctttgcatttctcaaaagtgttctcctggaccagagggaaagagctggtccattttttttcattctttctattcaaatttttccacccagacaatactttattaacacagatactgtagatccttccttggtcagtgaattattacaagaggagctatccttccaccaaagtgagtgaaaacaagttccagtatcttttcttccatccagttttgttctcagaatccaagtcagtcctgggtcttttctcactttagaccctggcctcagatgtgtttattcttgctatttaaaaatacctttaaatttcacatgctggcctgcagaacttgcatcctttgttctatactgttgactgcttgatggtattgaaaggtgactataatgagggaagaaaggaggaggtaaagagagaagaatttgtcccagatctgtttaaagtttcaaaatttaaaaagggacccattaaattatgggaaaatggctatagagtgtgagcctccgttgaccatatgctcaaagaccgtactctgccacctgccttccaggtagctattctagaaactcagtcctttgtggaaacccaactaccttttaaaagtctctttccagattccaaaaggacaagagatcagagagtcacatatacgcctcttgttttattttcttgctttcacgggtattattgccaagaaaatcgtagggaaaaactttaaacttttcttttcagttgatccctttgacatcacctctcatgtttaaaatcaggaaaacacacccctaaaatttgcactctcttccgttttgaaaaagaaaacccacacacaaatgcacactattaccgtctttcaccctgcgctatatttccaaagtgtattataatccagatattgccccatctcaaacatgttaagtcagactgtgctgaaagactttccagggacggtcaacagggtatatgttcagtggctgccctgaaatcctggtggggatgaggatcacgcttcatcatcaaggggatgcccatcccctgataagctcccagtccttttggaagatttctttgaatgttaattgcattttcagttttgctcatttcccaccccaatgttttgtctgcaacatcgcttacactggattctttctatttttattcctatcattaaatggtagtgctgtaaattctgcaattaatgttaaataaactgctttaattcattg

SEQ ID NO: 21083 - DNA, 16122 bp, Homo sapiens
  source 1..16122: mol_type = unassigned DNA
gcccccgccgcccccgggccctgatggactgaatgaaggctgcctacaccgcctatcgatgcctcaccaaagacctagaaggctgcgccatgaacccggagctgacaatggaaagtctgggcactttgcacgggccggccggcggcggcagtggcgggggcggcggcgggggcggcgggggcggcggcgggggcccgggccatgagcaggagctgctggccagccccagcccccaccacgcgggccgcggcgccgctggctcgctgcggggccctccgccgcctccaaccgcgcaccaggagctgggcacggcggcagcggcggcagcggcggcgtcgcgctcggccatggtcaccagcatggcctcgatcctggacggcggcgactaccggcccgagctctccatcccgctgcaccacgccatgagcatgtcctgcgactcgtctccgcctggcatgggcatgagcaacacctacaccacgctgacaccgctccagccgctgccacccatctccaccgtgtctgacaagttccaccaccctcacccgcaccaccatccgcaccaccaccaccaccaccaccaccagcgcctgtccggcaacgtcagcggcagcttcaccctcatgcgcgacgagcgcgggctcccggccatgaacaacctctacagtccctacaaggagatgcccggcatgagccagagcctgtccccgctggccgccacgccgctgggcaacgggctaggcggcctccacaacgcgcagcagagtctgcccaactacggtccgccgggccacgacaaaatgctcagccccaacttcgacgcgcaccacactgccatgctgacccgcggtgagcaacacctgtcccgcggcctgggcaccccacctgcggccatgatgtcgcacctgaacggcctgcaccacccgggccacactcagtctcacgggccggtgctggcacccagtcgcgagcggccaccctcgtcctcatcgggctcgcaggtggccacgtcgggccagctggaagaaatcaacaccaaagaggtggcccagcgcatcacagcggagctgaagcgctacagtatcccccaggcgatctttgcgcagagggtgctgtgccggtctcaggggactctctccgacctgctccggaatccaaaaccgtggagtaaactcaaatctggcagggagaccttccgcaggatgtggaagtggcttcaggagcccgagttccagcgcatgtccgccttacgcctggcagcgtgcaaacgcaaagagcaagaaccaaacaaagacaggaacaattcccagaagaagtcccgcctggtgttcactgacctccaacgccgaacactcttcgccatcttcaaggagaacaaacgcccgtcaaaggagatgcagatcaccatttcccagcagctgggcctggagctcacaaccgtcagcaacttcttcatgaacgcccggcgccgcagcctggagaagtggcaagacgatctgagcacagggggctcctcgtccacctccagcacgtgtaccaaagcatgatggaaggactctcacttgggcacaagtcacctccaaatgaggacaacagataccaaaagaaaacaaaggaaaaagacaccggattcctagctggggcccttcactggtgatttgaaagcacaattctcttgcaaagaaacttatattctagctgtaatcataggccaggtgttcttcttttgtttttaatggctatggagtccaagtgcaagctgaaaaattaatctcttagaaccagacactgttctctgagcatgctaagcatcccagaaacccaaatggggccttcctggagcgagttaattccagtatggtgtcaaccaagctcgggattgcttaaaatatcatccatcccacttcaggtcctgtcagcttcttgcagtcagagttcctatgagtaacaataggagtttggcctatgtaaggactctgagtttaggcttccaagatacaacaataagagaagaatctagcaacgagaatgacctcatttgctttccacatgcttagcctcattataccatgttatgtccaagttcacagccacaacatcagaatggtaattactgagcacaagttttaaatatggacgttaaaaaaaaaaatccaaggacctgtttttccaacccagacatcttttcattgaatgatttagaaagctttaagttgatccagcttacaattttttttttctttacctcctggaaatctcatatggtcttggatccgtcaaaaaaaccagtcagttcacttgcgctcaaagtatcaagcacaacaaagataaacagaagtgaggaaggttctgggttcactacatctggattttcaagacacctattgtgaagtcattagggaattgatgagaatatggcttcaagcacattttgcagtttgctacaaattctgttgtacataatgcagacgcacactcaggaggccaatttaactgttaacagtgcatggagcgaatgcagcattttaaaagatctaggtttttttaggtcattaatgtgtccttggttgatcagtcatctggtccctcctactgtgtgttatgaccaccacgtaatccattctcgctctttctgatttggggtttttcctcatccatcccattagtagggatgttttctgtgttttctagcaagaaaaaaaaatcaatcaatcaaacctgcatacatgttactcatgactgtcatctagtcctaaatctcttctgttgttgaatcatccttgcaaaacagctgaatacatctggagaaaacacagcacaccaaagaagcagaatactgcaaaccaaagacatttatgacttgtcattttctagcctaaaaatactgtgattacttttagaaatcagaaaacctctgcaactccgaatggcattcagctcttgcatttggcgcatcatcgggctgagcggaccagctacaccaaggacattagccaagccacccagaggggtggctttgccacaccagttgtcaccttcccatagcaagtggaagagcgcccacagaactctgggagattgcaaaggtcacaatgtgcatatttaccagtgaatggccccgggtggggccacgtgggggtgttcaaagcaagccaaacgctgcaatcattctttacagacacttgagactgacttttttatgaattacttagtcgaaaccaaagaaactttttctgcacctacttctgcaacaaacaaaactgtcccattaaaatgaataaataaatccgtaaatcaatggaaatcaccaccaataagaaggaagcacgccagaaaataaacgaaaacaaaaacagggagacacactgtgttcaaacagacctcttgggacattttttggaagcagattttaaagaaagggttgagacaaagatagaaataaggaagagcctcagtggctgctgcttcatttgacaactcacacggtaatcttaaagctgaagattgtctttaatttgtgcctatgcagtttttcaaaagaacacggaacagagcaacagaaacctcaacagctacaataccaaagatgaggatttctcacaccttttgtttcagttcattatctcctcttgcctggctaaaatactaatagcgccattgaactgtataaaggtaatcaattatgtttctctgagcaacaaaaggaaagggccatttatttgattttattgtttcatttcaattttgtcttatggttttttgccccaacatggaatctctcaaaagtttccatggactccaagtttaagatgttgggatattgaacagttctctctgctcagcagagggtagggaataacattatcacttgaatgttctttgcttaacccttagacttggttccttctatgttcagagtctcatcatcaggggaaggaaagggagtgagggtcagggataggggtcttggtgatgcatcctctcccgagccacagaaccaaagagtttatagaggaatttacagcctcgttttcatgtgattgctacatcctaacagggcttcatttgggggtggggggaaacatgtaaaaataattgccagtttctacttttctattagctttttaaaaatcagctgtaaagttgcatttctaaagaaagatatatataatatataaaatacatatatagatcaacttgacattggtgataaccaaaattattgctgtccaaattcatgtcttgttttggtccagtgcttcatttgctaagtattcggttcagaatttttctcatttctcatgccattccagagttaatttgccactgtggatgatttgaagtattcagatctctatggaagtttctgggacaggtttaaagtcaagatcaagcattttagcatttaacctgttgataaatggatccatggtgtacatgagttttatttgtattcggagtcatctctattctatccctcagcctcgattaaggtggtgagtgaagtgcatccaacagactcggcccagaactgggtcctgacagtggggtgctcatcttctgtaactgttgggaaggctcggtggtccattttcaccagttaaagaatatgaggccagcccagaaatctgttctccaggagctgccctgtcccatctgggtgtgccagaccccctcagtgagcaggtccaccaaagggacttctcacaggggaagcccaactcctgttgcaatgggttgatagatttcctcagggtggtaattaccaattcgtattttgacaagcctatgtgcaaccacagctggcactggggtgggcagtggtgttgggtgggatgggggagagtgtctcaatcctgaagagaaaatataaagcaggttttggggagacttctggagtcctgcccctagagagccccattgttgttctttgtgccccctcctcattccccctatgtgggtctccctatgcaggagctgtgagagaatgtgactctccacaatttttataattcatccttcctaggagattgttcattggctcttcccttgtgtccctttgtcccttgctcatactccatgtttcctttgtcaaaggactaagaaaagagcatatttcagcagaggagtgttcccatgtgggttgatttcaacttgggtatttctaaaagagtccttgtgacatgtgtccagtggaaatggttgctcttttccagactggattgaggaatggagcctgtttgatttggttagtgattctttgacatactaatctcagcgtttgggtctccagcatcctctgaagatgtctagactagtagaggctgcctttgtgacctgacattacaacattggtcaaaccagtcctctgataatcagaagaacatgtcataattgtttaaaaaaaaaaaaaaggcaagaatttctctccaaggagctttaataaatgtctcattccagataatgtcataccagagaaaagtgcttgcttttagaaaattatttacatacatatataaatatatatgtgtatctatacagttatgtatcaaaattttaagccctgcagaatttcaatttgttagaaatctaacagaaaaaaatttctatattgaaaggtaatagaatttaacccagtgagtttactcaaggatttttaaatttaagttaataatttcagagaaaataaccatttgggtgtggttatagtttagtatccattacctcaatccaaggaaaattccaggcattcctcaaccatcaggaaaaggtacagtgtgaaggaacagttctcagccaaatttcacattcttgaggcaacagaaatcaaaacactcagagccattgagtggaaaaacaatttactttattcctttacacaaataggcttgcattgtttttgttttaatgtgattttggtactagggatataattatttcattccaggaaataataaaaaaaaacagacagagccaatacatttctttttttaaaggaaacagcaacaacaataaaaactcagcaccaatatttaaaagcttttccaaaatgtaaaagaagtgtttagcttgcaccatgcataaaggtgcaggctagttgaaccaggaagcatggcacttcctctggagaaatccagaaagagttgcttctaagctcccttttccccctgcaggctcttggcaattgtaggctttagcaaatccagaataattttcaattcaagctaaaataaaatcaacatttggaatgtaaatctgatacacacacacttttctaagtcaaacaacatatttcaaaaccaaaaataaataccttttagataatcagttattttctttgtctatactgggcacccacctactagtgccagtaaattcaagttgaacagatttttaaaatcactattatctgggtatgggggaaacttccccacttttgaaaatgttggtagaattataggaatgtctgtttgattatcattaccaaagtgtcatgacagtatgcctttgtagtgaactcggattttcaggagtttgaatagttggatattttaaaatctaagaagaaaaggcctgtttccaatgttgttgaagaataatgaactctattaaaaagtggagaaaaagataatacatgtggtcaaggttgaccacaaggcccaggcacaactaccttggcgataatcttctagattcgtaacaggttagagctgactttttgtttttgttgttgctgatgctgtgtgattcagacttctcagcctaaccaggaagagtaagtggaaatggtagatgaagaaggggtagagctggtgtatctataactttctgatatttgtctgccaaacttgatatattagtaatttttttatctttagctaagatcaagtcacccctgaaacaacaggagattctagttttaaaataaggccacaaaaatccttacggaatgaagaatggcaccccagttggttgtataagtctcataagataatgatgttgattttaaatatggatgtctcaatgcctgttttctatcaatgatttgtttgtttccaaggtcggggagggaaagaggggagggtttatctgttttagaaagtctcagaatacttataaaatacagaagtagttattaaaatatataggacctcacataggtagatacagaacttaccattgaggctgatgggctgttgtgtgaatcacacaggaccttaaatgaggctcattattctcacacaccaaaatgactctgacagcctgaagcagttattgctagagcccaagctttccttggaggttttggagttaggttgattggaagtaaccagctaataccttttctagtggagaaaaagacattgctaccagcttgttcatcccatagaagtcttccactctgctccatttttagcagcaagcatttcatgtagcataaaccttggcagataagtgtgcctaaggtttatacagtctgtccgcttggatgtatacaaatttagatacatattttaacatgtgttctcatagatgactttataacaacacacattacctataggtgtctagactgtgtacatacaagtgtgtacagacaagcttcatacgtatatactgtaatccgttacaacaaataaattttaaatcatcgtttaacatgtatgtggtacttctacagtgtacattgttttcattatttattgtaacattgaaaaccacagtgcagggaaaacaaaagtatcccagcatcttcatcctgtacacttggaattaatttcatttgggcatatccaagataaactcaactttcaagaaatcttgtatattatttaatcatctgtgttaggatgacacctatgattgatgacttcggttgaatagctttattctggatttttcataactaaagctaaatccaaagacctgaaaaaggacaaaaagaaaaaaaaaaaaagaaaaaacaaagaaaaagaagaaaaaataataaagtcaagcgcaaactgatggggagacagtgggctctggtttccaggattgagacaatggtactgcggtcttggggagactgcgttagctagtggggagtggtgatttttttcatgcttgtcacatctaaatggtctttaacatgagaaagttttagaggttataatttcctgctttgtttttatttagactatcaaatgaagttatacatgttgtcagtcaaaaaatgaagacaccctctgccccaccccacagaatgctttttatcttgtctctttgggttatgacccaacaagctaagtaccattaatgtaattaacttatttaaattagttcctagtacataaatgtataggatttgggtaattatttaatcatccttccttagtttgattctactccttgtacttatttatcaaaacctagaccaatggtgcatcagagatgcaaaattctacttggaatactcttgaagtttagtttgctttataaagcagtgaaattctgttacagacagggaagaaatacaggttacaaaaagagaatttgggatattcttccctcttaaattaacttttaaaatagtctaagtaacaatttttaaattatttaacttaagttcgcagccccacctggtaccaggcgaacttcacctcttaattattgtggccctcggagccttcatattgtaacttatttatttaacttattcagcatctgtgaaaggtgcactgtatagtttatatttttaatttaaaacaacagagagcactgcagtttgtttgctgtcagaacaacagagcaaattttgtggacaagcaatgactattcagcctgaacctgtgcattcagaaaacataagctgagaccctgcttcaccagcctggatttcggggcttctatacagaaactggaaaaataaattttaaaaaaatcgtaaacaaaaagagagaaacccttacactagctgcttccaagaatgaactctgtgtgtatgtaaagcaacaaaacaaaaaaggaaaaaaacaaaaagcagaaaaaagaaaaaaaaaatgaaaaactttctatttctagtgagaaccaaagaaggctacctcactgactttttccatttgtaattttaatcgtgttgatgacaccaaagataccaaagatttctttctctgtgcggtctgcattttgcttgtgctcttttataatttgaacgattttctctgacatatggtatgtacagccacagctcagataccccaaagaaataattatctatgcgacggcggctgctaatttggaaagggatattttctgtgtttctcttatatgtttgctgtctgctcgacatgttcaagatgcgagttcagatgctgctgtaattggattccttaaattctgattacaaattgaggaaggaaactggttggaaatggccttcagtcctagccatggcctctatccccgctgggacctgtcacagtaaagactgccaattactgaaccacagaagctctgaccattgagtagttgagctggaagagaccttaggaatcatttagtccaagccccggtggcccagaggaatgaaatagttatccaaatcaaataactcttgagagtgaaagcccacacatgcctcctggttcctgccccagtgctccgcttattgtacagtgctacctctgcatgagagcggtcccacattgacaaataggatggtggcaatcctttagcaatgagcagggactggggtttatctcttaacattttcagctgtaaaattagtcacaagcattttcagtgtcccattagtacatagtcacatatggtcggttgcttcgtgaaggtggcctgtcttgaaatactagggctcatacgggatttttgccctaggaaaaacatgttgatcccaatgatgtgatcacttttgaacctttccattacaaagcattgtatagataactttttaattcagtaggaggagaaagttcattcttggcctgttggctttgattattatgggtactttaaagtcagtatttatcaagaaagggaacttgaccaccattggcacatgtgacatttaagctcttcagccttttcctttttagttgtaggtgtttacatttcatttctaagccaactctgtatttatgagagaagtttaagccttacatcatttgatactaaagggttatttgtggtaaatgaaaaatgaccccaaaattacagaggaatatgccagtttaagaaatggctacttaaagttgcttctctctttccttcttactcatgaaattaattggtcttcttcaagtttctttagattccattaaatgattaaatcactattaagagccattcatcaacgtgatttgtgtgttagccaatgaatctgtctcagcttttgaccaaatgggttttagacaaatgcaaagatctgcctctagtccatatggctctttttgagtgctagtattttgcatttcacataatgtagttattttgagcttttaaagagagcatttagacaaagaagcaaagagaggaagggaccaatcaactcatcagttccatgcatcaacaaagcatagctagtagaggaatataaatgacagattgacaaactgtaggaaacactgttactctctttctgaagttttcaagcaccatcctatgtgaaagttccctcctgtccaaacaagctcaaggcccatcttctccctatacaaggcaaacctgtaaggccttccttccaaagagtacattgctttggttttcttcctaaattcctattggaattagaactctcagaatccctgggagacagagcaaagatgacttaattcattgagcagcagagctccctataagtgaacatcaccttccccatctttcctactgccacacccatacgagagaggatctagaaagagcgatggcagcctgaacacagaaaacatccccacttggcagacctctcctcagcaatccccccagcctcatgcttcacttgcaaagtgtgacataaccacgggacgagtgccttgcttgaaccaaagcaacgatttagccagtctggacctctctgtgctttttttaattcttcctgtgaatacctcagcttcaactgggcctccatacagtcagttggtgggcttattgtactgtggtgctttgcaatgcaaccctgcaaagaacaagatttgtactaataccaaaggttctttctctatgtctcctcctctgcctccctcgttcttcccttttttctagttcttcacggttccaaagctttactatgaacctgggcatgttggcaatgcagaccgcgcaattccttaccgaattttctcagatatacctcatagacaatagtgtttagagtaatgttattatagcgtatgtaataaattattcactgtttcttttggtaactgtgatttaaaaaaagaaaaaagaaaaaaaagctttatacgttttaggttgtgcttttgtaatagatgaaaaaaggtgcgcttaaaaagaaaatgtatgtttttttccccctttggattttatttatgctggattggggaaagttgcagaatgagcccaaagtttacagtttcatattttgctgaagaaacaatctgtgttcatttgctctgttgaaaagaataattattttctacatttgtgccacttggtctgaacaattaattgttccgtgttaacagtgtagtattatgattagcaactgccaatcagtgctataattttatgcatgaggctaaaaatttagcagtgtgatgcattgtggtcttaatagcaacatttttcattttgaactagatcttcccctttggttcaatggactttatttatgcatgggcgcctattgtttgttagcagttgtggaacagttgtgtatacattaaactgtgaaaatgtacacagttcagcctcagacggtggtaatattggttttattgggagatgtgtcacctcgaaaataccctttacatctgttgggatctgaaaatgagtcacattgaattgggttccagctttataatgagaaacgttattcctaatttttgagttagccaatttgcattccacaaattgggatcctcataacccaaatatatcaccgtatgtgagagggatttgaaagcgagtattgaaaaactcacctttgcatatttaatttccaccaaaaggagttattttggctttatgctcatgaacttagacctaactggccatgtatatgtagatgcaaattcatctagctgtggccctctttgatctctgcttgggaatggctatttttgactatgcgtggtttcttctcgtattttgtgatcaggtcagctcccagtagaaactcaaatggcatcaatattactaactcttctctgcccacttctcttttgtccactctcctagacattcccaccaactgttccagtgatttgggcaaaaatacgcagccatttcccaaaacttcacatgtgcagctatcatggctgtccctccctagacttggaggtgactctcacttaatttttacctgcccaacaatgttccatctaccatctaaaaggtaatataagaagaagttttgaaacccactttaggaaaaccatcttctttaaatccttcaattatctgaggcctctatatgtcaaaactatttttcagttgcaggggattgggcaaacttgttctttcttatacttgggttcaaagacccattctccagtttcatatttcccaaaccaaaatgcttgacataaagccaaatcaactgccaagcacactttattttgcataggagtatgcagcctagggaaccttggttgaaaagcagcagtctgctatgcaaaatattggaaatcactgacagtgtagcattcatattatctgtcaatgagggtatattgggaacgtgctctcgtgaataataaaaagcaacatatttttatttggccttataaattaggttgtggtaatgtaaactttgatatatagtctttttatttttctcttattaatctgccaaagatgggaacagatacaagaatttttcaaattggcttttgtaagacaattgatgattgtaatagtgtttaatcttccagaaagctttatatgttgttccacaataaaattgatatttgtttcagcaaagttttcctgacactcacaaacccacaaactgttcctcttaatgcagatattgtagaatctacaaagttcaaatccatttttgatccaaagaaagtagaggagtatttgagacatgagtgtacccagccctttttttaatcacaggcaatgcatgggtctggctggttacactttgccaagaagacttgtcttatgaaacccaaggtatattttgttatgccattttatgtccttttcttttaacattgtggaaagtggtatgttgaatcaagtgtaagctgagttttccagacaactgaagtagctacatcatgaatgttattttgttattaaagggtttttactcagtgctttgtgccaatggatgtccttttccttggagacacataactacaaaattacctcagcttggcctggttttctctcctgccctcttggggaaacatgggcctggcctgggaaaaggcaggtcatgggctggaaggtaggttttggtactaggaagaaatctctgtatctgtcagctttaaagagaactgggccaaaaatctctaacctcactctctctggactccaacacttccctgcaatcctttggtcttgagcatgtgccagcatgaaggcagactccagttcatacatgaaaggcaagaaaaagaaaatagtaaccttgaatcttctgtgggccaccaggcactcacctttccccaccttgcacactatccagtcaaggctattgcagcccatctggtggctttacatgggacattaccaaaggcttcttcctccatcctggggttgcaaaggatccaggtcccctccatccagtggggctcttccacatcagaagtccccctcccaccatcctctgcatcctgtttagctatcccatctataccttttggagatgattatttagaaaacaaagaaaggtatggaatggggtttcctattgtttgctaggttatattttagcaattctcaattctttgatctggaaaaatacaagagggaaaaggagaccccactatctccctgtgctttgctcccatctcagggggcaggggcagtgcacattgcctatgctgttgatctgtcttgggcgacaggctgaatcacagctattgccccagccaaaaacatggcccatcaatgcctactttatctctgcttgaaaatcctattcaaaaagttgtagagtttgaggtttttatccccccatatcctttgctttggtccagtttggcctttagcataagagtcagctttatctctaggaaagttttttcagattatgacaaggaacctgccacctgggaagaaaagagtccgaagactagcaatcggataggtagtcataccattaacagatacttccttgaaggtagaatattatttcctttctttacagttttgtgttacacaagtccaagtggtgccagcaaacttcttaccgtgaaatgttgtaaaacacctggcatactgaaatttctgaaacaaaaacacaagctccacattgataacttgataaataaccactaaagtttagatgcagggactgagatgatacaggcaaaatcttggtgttggtttctcttttaattcgtatcttcgatcacctaacctttctcaatccaagagcagttcagtcttttctccccaagtctaggatgccaaagagcatcataggaaaagataattagggattgaccagcatttcaattagttctcttcttcatctttgcatttctcaaaagtgttctcctggaccagagggaaagagctggtccattttttttcattctttctattcaaatttttccacccagacaatactttattaacacagatactgtagatccttccttggtcagtgaattattacaagaggagctatccttccaccaaagtgagtgaaaacaagttccagtatcttttcttccatccagttttgttctcagaatccaagtcagtcctgggtcttttctcactttagaccctggcctcagatgtgtttattcttgctatttaaaaatacctttaaatttcacatgctggcctgcagaacttgcatcctttgttctatactgttgactgcttgatggtattgaaaggtgactataatgagggaagaaaggaggaggtaaagagagaagaatttgtcccagatctgtttaaagtttcaaaatttaaaaagggacccattaaattatgggaaaatggctatagagtgtgagcctccgttgaccatatgctcaaagaccgtactctgccacctgccttccaggtagctattctagaaactcagtcctttgtggaaacccaactaccttttaaaagtctctttccagattccaaaaggacaagagatcagagagtcacatatacgcctcttgttttattttcttgctttcacgggtattattgccaagaaaatcgtagggaaaaactttaaacttttcttttcagttgatccctttgacatcacctctcatgtttaaaatcaggaaaacacacccctaaaatttgcactctcttccgttttgaaaaagaaaacccacacacaaatgcacactattaccgtctttcaccctgcgctatatttccaaagtgtattataatccagatattgccccatctcaaacatgttaagtcagactgtgctgaaagactttccagggacggtcaacagggtatatgttcagtggctgccctgaaatcctggtggggatgaggatcacgcttcatcatcaaggggatgcccatcccctgataagctcccagtccttttggaagatttctttgaatgttaattgcattttcagttttgctcatttcccaccccaatgttttgtctgcaacatcgcttacactggattctttctatttttattcctatcattaaatggtagtgctgtaaattctgcaattaatgttaaataaactgctttaattcattga

SEQ ID NO: 21084 - DNA, 478 bp, Homo sapiens
  source 1..478: mol_type = unassigned DNA
atggtcgatgatgctggtgccgctgagtcccagcggggcaaacagactccggcccactccctggagcagctgcgtaggttaccacttccgccgccacagattcgcatccggccctggtggtttccggtgcaggaactgagagaccctttggtgttctacctagaggcatggctggcagacgagctctttggcccagaccgagccataattccagaaatggagtggacgagccaggccctgctgacagtggacatagttgactcagggaacctagtcgaaatcaccgttttcgggcggccccgtgtacagaatcgggtgaagagcatgctcctgtgcctggcatggtttcaccgagaacatcgtgcccgagctgagaagatgaaacaccttgagaagaacttgaaggcccatgcatcagacccccactctccccaggatcctgttgcttaagacaacatagttactgttgggaacatct

SEQ ID NO: 21085 - DNA, 1774 bp, Homo sapiens
  source 1..1774: mol_type = unassigned DNA
ccgaggagcctgcggctgctcctggctcacagcgctccgggcgaggagagcgggcggacgccgggggctgggccggtgcgggcggcgaggcaggcggacgaggcgcagagacagcggggcggccggggcgcggcagccggcggcgtcggggccgcggcctctgccttgccgctcccctcgcgtcggatccccgcgcccagggcgcacggtggagagggacgcggcggagccggccggcagccatggaaccggccccctccgccggcgccgagctgcagcccccgctcttcgccaacgcctcggacgcctaccctagcgcctgccccagcgctggcgccaatgcgtcggggccgccaggcgcgcggagcgcctcgtccctcgccctggcaatcgccatcaccgcgctctactcggccgtgtgcgccgtggggctgctgggcaacgtgcttgtcatgttcggcatcgtccggtacactaagatgaagacggccaccaacatctacatcttcaacctggccttagccgatgcgctggccaccagcacgctgcctttccagagtgccaagtacctgatggagacgtggcccttcggcgagctgctctgcaaggctgtgctctccatcgactactacaatatgttcaccagcatcttcacgctcaccatgatgagtgttgaccgctacatcgctgtctgccaccctgtcaaggccctggacttccgcacgcctgccaaggccaagctgatcaacatctgtatctgggtcctggcctcaggcgttggcgtgcccatcatggtcatggctgtgacccgtccccgggacggggcagtggtgtgcatgctccagttccccagccccagctggtactgggacacggtgaccaagatctgcgtgttcctcttcgccttcgtggtgcccatcctcatcatcaccgtgtgctatggcctcatgctgctgcgcctgcgcagtgtgcgcctgctgtcgggctccaaggagaaggaccgcagcctgcggcgcatcacgcgcatggtgctggtggttgtgggcgccttcgtggtgtgttgggcgcccatccacatcttcgtcatcgtctggacgctggtggacatcgaccggcgcgacccgctggtggtggctgcgctgcacctgtgcatcgcgctgggctacgccaatagcagcctcaaccccgtgctctacgctttcctcgacgagaacttcaagcgctgcttccgccagctctgccgcaagccctgcggccgcccagaccccagcagcttcagccgcgcccgcgaagccacggcccgcgagcgtgtcaccgcctgcaccccgtccgatggtcccggcggtggcgctgccgcctgaccaggccatccggcccccagagcgcccctccctagtgacccggaggccacatgagtcccagtgggaggcgcgagccatgatgtggagtggggcagtagaaggtcggaggcttgggaccgccagatggggcctctgtttcggagacgggaccgggccgctagatgggcatggggtgggcctctggtttggggcgaggcagaggacagatcaatggcgcagtgcctctggtctgggtgccccgtccacggctctaggtggggcgggaaagccagtgactccaggagaggagcgggacctgtggctctacaactgagtccttaaacagggcatctccaggaaggcggggcttcaaccttgagacagcttcggtttctaacttggagccggactttcggagttgggggtccgggccc

SEQ ID NO: 21086 - DNA, 975 bp, Homo sapiens
  source 1..975: mol_type = unassigned DNA
atggaaccggccccctccgccggcgccgagctgcagcccccgctcttcgccaacgcctcggacgcctaccctagcgcctgccccagcgctggcgccaatgcgtcggggccgccaggcgcgcggagcgcctcgtccctcgccctggcaatcgccatcaccgcgctctactcggccgtgtgcgccgtggggctgctgggcaacgtgcttgtcatgttcggcatcgtccggtacactaagatgaagacggccaccaacatctacatcttcaacctggccttagccgatgcgctggccaccagcacgctgcctttccagagtgccaagtacctgatggagacgtggcccttcggcgagctgctctgcaaggctgtgctctccatcgactactacaatatgttcaccagcatcttcacgctcaccatgatgagtgttgaccgctacatcgctgtctgccaccctgtcaaggccctggacttccgcacgcctgccaaggccaagctgatcaacatctgtatctgggtcctggcctcaggcgttggcgtgcccatcatggtcatggctgtgacccgtccccgggacggggcagtggtgtgcatgctccagttccccagccccagctggtactgggacacggtgaccaagatctgcgtgttcctcttcgccttcgtggtgtgttgggcgcccatccacatcttcgtcatcgtctggacgctggtggacatcgaccggcgcgacccgctggtggtggctgcgctgcacctgtgcatcgcgctgggctacgccaatagcagcctcaaccccgtgctctacgctttcctcgacgagaacttcaagcgctgcttccgccagctctgccgcaagccctgcggccgcccagaccccagcagcttcagccgcgcccgcgaagccacggcccgcgagcgtgtcaccgcctgcaccccgtccgatggtcccggcggtggcgctgccgcctga

SEQ ID NO: 21087 - DNA, 5014 bp, Homo sapiens
  source 1..5014: mol_type = unassigned DNA
agccgcgtcccggctgcgtcccgccggtcccgccccgccccgccccgcagagccgccgccagtagtgggagacgtgcgctgagaggcgggggctgcgctcggcggaacagcagccctcgggcggagagcggggccggggtccgagagcaggtgatgccaagagctgagcgggactcgtgagcgcgcggttcagcacctaccagggcgtcccgtaaaaaacctcgccttcgcctgtctctgggaaccatagcgccgcaggtgccgcctgtcctcgccttcctgctgcaatcgccccaccatggactccccgatccagatcttccgcggggagccgggccctacctgcgccccgagcgcctgcctgccccccaacagcagcgcctggtttcccggctgggccgagcccgacagcaacggcagcgccggctcggaggacgcgcagctggagcccgcgcacatctccccggccatcccggtcatcatcacggcggtctactccgtagtgttcgtcgtgggcttggtgggcaactcgctggtcatgttcgtgatcatccgatacacaaagatgaagacagcaaccaacatttacatatttaacctggctttggcagatgctttagttactacaaccatgccctttcagagtacggtctacttgatgaattcctggccttttggggatgtgctgtgcaagatagtaatttccattgattactacaacatgttcaccagcatcttcaccttgaccatgatgagcgtggaccgctacattgccgtgtgccaccccgtgaaggctttggacttccgcacacccttgaaggcaaagatcatcaatatctgcatctggctgctgtcgtcatctgttggcatctctgcaatagtccttggaggcaccaaagtcagggaagacgtcgatgtcattgagtgctccttgcagttcccagatgatgactactcctggtgggacctcttcatgaagatctgcgtcttcatctttgccttcgtgatccctgtcctcatcatcatcgtctgctacaccctgatgatcctgcgtctcaagagcgtccggctcctttctggctcccgagagaaagatcgcaacctgcgtaggatcaccagactggtcctggtggtggtggcagtcttcgtcgtctgctggactcccattcacatattcatcctggtggaggctctggggagcacctcccacagcacagctgctctctccagctattacttctgcatcgccttaggctataccaacagtagcctgaatcccattctctacgcctttcttgatgaaaacttcaagcggtgtttccgggacttctgctttccactgaagatgaggatggagcggcagagcactagcagagtccgaaatacagttcaggatcctgcttacctgagggacatcgatgggatgaataaaccagtatgactagtcgtggagatgtcttcgtacagttcttcgggaagagaggagttcaatgatctaggtttaactcagatcactactgcagtctgacatgaaaagatagaatttaaaataaacttttagagatctcatggtctgaagtcatcagatgcagaccacgttcgtgatcagtggaaacatcaaggacaaaaggtccacgcaacacatgcacctcttctctagggcacagaagcgaggcagagcctcagttcctctgatgaacaagggaacaggtcttttccttctggtttgctaggtaaggttcagcacccatctgctgtggccttcctatgaaacgtagtttcaaaagctcggtttaagaaaaaaggaaaagaaaaaacattgctttcagagctcaatgggcatccaatccagatgtttcacaatgacagcaacaacctccaacggaatgggaactatttccagggttcatgcccagctcactgtatgctgtgtggacatgcatttcatgtggctgtgtggtaagaattacagcttacatatggcttggacccacatctgaggaatctgatgttcacttataccagaacattatcttgctatttatgaaattatttaaacgttcaaaagattgtttttaacatggtttaatttcccaaaaactacagttttttttcttagcatgctattcaggtaaacagtcttataataaagcatgtcccattgtcaagaaacataaagtggtgtgaataccactgaaaatatatatatagtatcttctgtaaataatagtacctgtgtgaataaggaataggcttgcctcccagccaggcaatttcctgagggcacactaatgatatcccctgagttgctaagttgatgctgagacattttgctgggaattagtcatggcatgatctctttcagactccctgaataccatttagtcccgtaacagtgctcacaactcatgtgctaatgaatcacaaaggctttaactagctcccaggttgtagccttcgcaggatctagtttatttgccacatctctttatgaacatatagcgattcgcagatctctctattcacggagaggaaggtgttttgcttctgtagatctcaaggtactattttgtggctctcagcaggaagtagaattgttcctaaatgtgtgctgaatgaggacatgatgtccctcctggtgccaggacacatcctgcatggcattctgtgaagggcatacctgctgaggataatgccaggagcagcacatttagggtaattttgctaaaacttccagatgacatataaattccctctttttccccctgaaacttaccatttcagaggtaatggctttttctgtaatttgcctgagaagaaaaaagggataatttagaaataacactccaagcctatatattactagggctgcatcctctggaatttaatagaaaaattgaatatatagccctatgtaactacagacatcattacaactgttaagttctgttcaccatgcaagttctcggtggtgtatgtactctcaccttttggaaacaaaaccttgcattgaaggttttacacatggcttcagaatgttactctgaccatgtttgcctctactccagattatcatggcacctaacacagatgacatatggcagaatggaagtgatttctcctaatgaaaatgaagtgctcttttgagtatttcttgttttattgagattcctatctgcccttgtatttttataactgaatgtaaataggaattgcttaaatactggtttacactaatcccatagttaaaaatcttggctatggtacaggaaggatatctatatagaggatagttccagaaacaagccctggtgaaataggaaatataaaaacttctttatggaacaggaaaacccaagagactttctcgtcagattcctttccagtgcaaagtataacagagataggattatgagatgaaatcacagtagtgtgtttcctttaattttttctgtcttctttttttttttttttttttttgagacggagtctcgctctgttgcccaggctggagtgcggtagcacagtcttggctcactgcaacctccacctcctgggttcaagcgattctcctgcctctgcctcctaagtagctgggattacaggcgtgcaccgccaagcccggctaatttttgtatttttagtagagacggggtttcaccatgttatgcaggctggtctcaaactcctgacctcagaatattcacctgcctcggcctcccaaagtgctgggattacagatgtgaatggccacgcctggcctgtttcctttaagttagcacttcacgtgctcttacagcgttaattgccattattggtttgcctgattttcctgcatctcctcatatgtaagtctgcagcccaaggagagaatagtagctgtatgtgcccacaaggggtgtccaagcttcttgattcttgttaatatcgactccccaacattgaaaaaggagtgaagaagggaatatcattttagggtactgctttaaaggaatgataaagtaaacaacgtagcagggaaaataccacttgcacaaatgtatttctttgtcaaagtgtgtacacgctttctgtttgtcctgatgtcctgctgtgaagcagggaccacattgccatttattcattgttccaggcaatgcatttgtccaaacccctctggctctctgatatctctcatttcttgatgttcctattctctgacctcaacaaggaggacactgtctgttgtgtctctttgagactagaactccatgtgtttaaccttcagatccattctctacatgaaccctattctttccaccctggtaagaaggtctggaagacaggtcctaacgaggggtcagagaaggcacagagaaatgaaccagccatgcaggggcagcactgaggaggaaaccccccactctaactgggaggagagtggaaacactcttagtatctcagagtagttaccaatctaagagcatccttcgagtttaagtcaaaactctaggcttaataccaaaaataatacatcatttggaaaaatagcttggagaaaaaaaatcaataaagagtcacataaaatcttaagaaaatggttctattctgtgatatattactaagaaatacagttcttaaacgtgtataactattgtcagacaatttataggtgtttcatctagtcctgggatgaaatacgatgactcatgcaaattcagggagcacactggctgactttaaattggaacattgtaaagtgaaagctgtgaaaggttgtgtgtcctatcaatgagatttattttctaaccaagagctgttcggatgattcagtataaatacgaaaatcacatccaaaaacggtataacccagcttccttaaggcaattttcttctctgaaacaagaatatactcatatgttctttactataatgtatatgatttttatcttgtactttaaaagatgataattatgcattgtatatacgattgtgtgccttgcaataaaatcaaaactgtacctgctgaaaatca

SEQ ID NO: 21088 - DNA, 1395 bp, Homo sapiens
  source 1..1395: mol_type = unassigned DNA
agtgggagacgtgcgctgagaggcgggggctgcgctcggcggaacagcagccctcgggcggagagcggggccggggtccgagagcaggtgatgccaagagctgagcgggactcgtgagcgcgcggttcagcacctaccagggcgtcccgtaaaaaacctcgccttcgcctgtctctgggaaccatagcgccgcaggtgccgcctgtcctcgccttcctgctgcaatcgccccaccatggactccccgatccagatcttccgcggggagccgggccctacctgcgccccgagcgcctgcctgccccccaacagcagcgccggctcggaggacgcgcagctggagcccgcgcacatctccccggccatcccggtcatcatcacggcggtctactccgtagtgttcgtcgtgggcttggtgggcaactcgctggtcatgttcgtgatcatccgatacacaaagatgaagacagcaaccaacatttacatatttaacctggctttggcagatgctttagttactacaaccatgccctttcagagtacggtctacttgatgaattcctggccttttggggatgtgctgtgcaagatagtaatttccattgattactacaacatgttcaccagcatcttcaccttgaccatgatgagcgtggaccgctacattgccgtgtgccaccccgtgaaggctttggacttccgcacacccttgaaggcaaagatcatcaatatctgcatctggctgctgtcgtcatctgttggcatctctgcaatagtccttggaggcaccaaagtcagggaagacgtcgatgtcattgagtgctccttgcagttcccagatgatgactactcctggtgggacctcttcatgaagatctgcgtcttcatctttgccttcgtgatccctgtcctcatcatcatcgtctgctacaccctgatgatcctgcgtctcaagagcgtccggctcctttctggctcccgagagaaagatcgcaacctgcgtaggatcaccagactggtcctggtggtggtggcagtcttcgtcgtctgctggactcccattcacatattcatcctggtggaggctctggggagcacctcccacagcacagctgctctctccagctattacttctgcatcgccttaggctataccaacagtagcctgaatcccattctctacgcctttcttgatgaaaacttcaagcggtgtttccgggacttctgctttccactgaagatgaggatggagcggcagagcactagcagagtccgaaatacagttcaggatcctgcttacctgagggacatcgatgggatgaataaaccagtatgactagtcgtggagatgtcttcgtacagttcttcgggaagagaggagttcaatgatctagg

SEQ ID NO: 21089 - DNA, 1602 bp, Homo sapiens
  source 1..1602: mol_type = unassigned DNA
gagctccgtgctgggaggtgggaagggggcttgaccctggggactcaggcagtctggggacagttccaccaggggccggtgcctagaattggtgagggaggcacctcaggggctgggggagaaggagcgagcgctcttcgcccctctctggcacccagcggcgcgcctgctggccggaaaggcagcgagaagtccgttctccctgtcctgcccccggcgacttgcggcccgggtgggagtccgcaggctccgggtccccagcgccgctggccagggcgcgggcaaagtttgcctctccgcgtccagccggttctttcgctcccgcagcgccgcaggtgccgcctgtcctcgccttcctgctgcaatcgccccaccatggactccccgatccagatcttccgcggggagccgggccctacctgcgccccgagcgcctgcctgccccccaacagcagcgcctggtttcccggctgggccgagcccgacagcaacggcagcgccggctcggaggacgcgcagctggagcccgcgcacatctccccggccatcccggtcatcatcacggcggtctactccgtagtgttcgtcgtgggcttggtgggcaactcgctggtcatgttcgtgatcatccgatacacaaagatgaagacagcaaccaacatttacatatttaacctggctttggcagatgctttagttactacaaccatgccctttcagagtacggtctacttgatgaattcctggccttttggggatgtgctgtgcaagatagtaatttccattgattactacaacatgttcaccagcatcttcaccttgaccatgatgagcgtggaccgctacattgccgtgtgccaccccgtgaaggctttggacttccgcacacccttgaaggcaaagatcatcaatatctgcatctggctgctgtcgtcatctgttggcatctctgcaatagtccttggaggcaccaaagtcagggaagacgtcgatgtcattgagtgctccttgcagttcccagatgatgactactcctggtgggacctcttcatgaagatctgcgtcttcatctttgccttcgtgatccctgtcctcatcatcatcgtctgctacaccctgatgatcctgcgtctcaagagcgtccggctcctttctggctcccgagagaaagatcgcaacctgcgtaggatcaccagactggtcctggtggtggtggcagtcttcgtcgtctgctggactcccattcacatattcatcctggtggaggctctggggagcacctcccacagcacagctgctctctccagctattacttctgcatcgccttaggctataccaacagtagcctgaatcccattctctacgcctttcttgatgaaaacttcaagcggtgtttccgggacttctgctttccactgaagatgaggatggagcggcagagcactagcagagtccgaaatacagttcaggatcctgcttacctgagggacatcgatgggatgaataaaccagtatgactagtcgtggagatgtcttcgtacagttcttcgggaagagaggagttcaatgatctaggtttaactcagatcactactgcagtc

SEQ ID NO: 21090 - DNA, 1465 bp, Homo sapiens
  source 1..1465: mol_type = unassigned DNA
cggtgctcctggctacctcgcacagcggtgcccgcccggccgtcagtaccatggacagcagcgctgcccccacgaacgccagcaattgcactgatgccttggcgtactcaagttgctccccagcacccagccccggttcctgggtcaacttgtcccacttagatggcaacctgtccgacccatgcggtccgaaccgcaccgacctgggcgggagagacagcctgtgccctccgaccggcagtccctccatgatcacggccatcacgatcatggccctctactccatcgtgtgcgtggtggggctcttcggaaacttcctggtcatgtatgtgattgtcagatacaccaagatgaagactgccaccaacatctacattttcaaccttgctctggcagatgccttagccaccagtaccctgcccttccagagtgtgaattacctaatgggaacatggccatttggaaccatcctttgcaagatagtgatctccatagattactataacatgttcaccagcatattcaccctctgcaccatgagtgttgatcgatacattgcagtctgccaccctgtcaaggccttagatttccgtactccccgaaatgccaaaattatcaatgtctgcaactggatcctctcttcagccattggtcttcctgtaatgttcatggctacaacaaaatacaggcaaggttccatagattgtacactaacattctctcatccaacctggtactgggaaaacctgctgaagatctgtgttttcatcttcgccttcattatgccagtgctcatcattaccgtgtgctatggactgatgatcttgcgcctcaagagtgtccgcatgctctctggctccaaagaaaaggacaggaatcttcgaaggatcaccaggatggtgctggtggtggtggctgtgttcatcgtctgctggactcccattcacatttacgtcatcattaaagccttggttacaatcccagaaactacgttccagactgtttcttggcacttctgcattgctctaggttacacaaacagctgcctcaacccagtcctttatgcatttctggatgaaaacttcaaacgatgcttcagagagttctgtatcccaacctcttccaacattgagcaacaaaactccactcgaattcgtcagaacactagagaccacccctccacggccaatacagtggatagaactaatcatcagtgcctacctataccttccctgtcttgctgggctctagagcaaggctgcttggttgtgtaccctggaccactgcaaggacctcttgtcagatatgacctcccagctatccttcactcgtcctgccttcgtggaaatactgctcccagcccgtctggtggagcatttctcctgagttaagcatgattattcttcagttgcccgacactgcccttgactcccttccaaattcggcattttcacatcagtatggc

SEQ ID NO: 21091 - DNA, 2178 bp, Homo sapiens
  source 1..2178: mol_type = unassigned DNA
gatgagcctctgtgaactactaaggtgggagggggctatacgcagaggagaatgtcagatgctcagctcggtcccctccgcctgacgctcctctctgtctcagccaggactggtttctgtaagaaacagcaggagctgtggcagcggcgaaaggaagcggctgaggcgcttggaacccgaaaagtctcggtgctcctggctacctcgcacagcggtgcccgcccggccgtcagtaccatggacagcagcgctgcccccacgaacgccagcaattgcactgatgccttggcgtactcaagttgctccccagcacccagccccggttcctgggtcaacttgtcccacttagatggcaacctgtccgacccatgcggtccgaaccgcaccgacctgggcgggagagacagcctgtgccctccgaccggcagtccctccatgatcacggccatcacgatcatggccctctactccatcgtgtgcgtggtggggctcttcggaaacttcctggtcatgtatgtgattgtcagatacaccaagatgaagactgccaccaacatctacattttcaaccttgctctggcagatgccttagccaccagtaccctgcccttccagagtgtgaattacctaatgggaacatggccatttggaaccatcctttgcaagatagtgatctccatagattactataacatgttcaccagcatattcaccctctgcaccatgagtgttgatcgatacattgcagtctgccaccctgtcaaggccttagatttccgtactccccgaaatgccaaaattatcaatgtctgcaactggatcctctcttcagccattggtcttcctgtaatgttcatggctacaacaaaatacaggcaaggttccatagattgtacactaacattctctcatccaacctggtactgggaaaacctgctgaagatctgtgttttcatcttcgccttcattatgccagtgctcatcattaccgtgtgctatggactgatgatcttgcgcctcaagagtgtccgcatgctctctggctccaaagaaaaggacaggaatcttcgaaggatcaccaggatggtgctggtggtggtggctgtgttcatcgtctgctggactcccattcacatttacgtcatcattaaagccttggttacaatcccagaaactacgttccagactgtttcttggcacttctgcattgctctaggttacacaaacagctgcctcaacccagtcctttatgcatttctggatgaaaacttcaaacgatgcttcagagagttctgtatcccaacctcttccaacattgagcaacaaaactccactcgaattcgtcagaacactagagaccacccctccacggccaatacagtggatagaactaatcatcagctagaaaatctggaagcagaaactgctccgttgccctaacagggtctcatgccattccgaccttcaccaagcttagaagccaccatgtatgtggaagcaggttgcttcaagaatgtgtaggaggctctaattctctaggaaagtgcctgcttttaggtcatccaacctctttcctctctggccactctgctctgcacattagagggacagccaaaagtaagtggagcatttggaaggaaaggaatataccacaccgaggagtccagtttgtgcaagacacccagtggaaccaaaacccatcgtggtatgtgaattgaagtcatcataaaaggtgacccttctgtctgtaagattttattttcaagcaaatatttatgacctcaacaaagaagaaccatcttttgttaagttcaccgtagtaacacataaagtaaatgctacctctgatcaaagcaccttgaatggaaggtccgagtctttttagtgttttgcaagggaatgaatccattattctattttagacttttaacttcaccttaaaattagcatctggctaaggcatcattttcacctccatttcttggttttgtattgtttaaaaaaataacatctctttcatctagctccataattgcaagggaagagattagcatgaaaggtaatctgaaacacagtcatgtgtcagctgtagaaaggttgattctcatgcactgcaaatacttccaaagagtcatcatgggggatttttcattcttaggctttcagtggtttgttcct

SEQ ID NO: 21092 - DNA, 1389 bp, Homo sapiens
  source 1..1389: mol_type = unassigned DNA
cggtgctcctggctacctcgcacagcggtgcccgcccggccgtcagtaccatggacagcagcgctgcccccacgaacgccagcaattgcactgatgccttggcgtactcaagttgctccccagcacccagccccggttcctgggtcaacttgtcccacttagatggcaacctgtccgacccatgcggtccgaaccgcaccgacctgggcgggagagacagcctgtgccctccgaccggcagtccctccatgatcacggccatcacgatcatggccctctactccatcgtgtgcgtggtggggctcttcggaaacttcctggtcatgtatgtgattgtcagatacaccaagatgaagactgccaccaacatctacattttcaaccttgctctggcagatgccttagccaccagtaccctgcccttccagagtgtgaattacctaatgggaacatggccatttggaaccatcctttgcaagatagtgatctccatagattactataacatgttcaccagcatattcaccctctgcaccatgagtgttgatcgatacattgcagtctgccaccctgtcaaggccttagatttccgtactccccgaaatgccaaaattatcaatgtctgcaactggatcctctcttcagccattggtcttcctgtaatgttcatggctacaacaaaatacaggcaaggttccatagattgtacactaacattctctcatccaacctggtactgggaaaacctgctgaagatctgtgttttcatcttcgccttcattatgccagtgctcatcattaccgtgtgctatggactgatgatcttgcgcctcaagagtgtccgcatgctctctggctccaaagaaaaggacaggaatcttcgaaggatcaccaggatggtgctggtggtggtggctgtgttcatcgtctgctggactcccattcacatttacgtcatcattaaagccttggttacaatcccagaaactacgttccagactgtttcttggcacttctgcattgctctaggttacacaaacagctgcctcaacccagtcctttatgcatttctggatgaaaacttcaaacgatgcttcagagagttctgtatcccaacctcttccaacattgagcaacaaaactccactcgaattcgtcagaacactagagaccacccctccacggccaatacagtggatagaactaatcatcagccacccttggcagtcagcatggcccagatctttacacgatatcctcctccgactcatcgtgagaaaacctgcaatgattacatgaagaggtagataatgtattaccctgatttggtaggtaaagtattatcctgatttatgtgacagagtgaaaggcaacttttaattgttaacc

SEQ ID NO: 21093 - DNA, 1446 bp, Homo sapiens
  source 1..1446: mol_type = unassigned DNA
gatgagcctctgtgaactactaaggtgggagggggctatacgcagaggagaatgtcagatgctcagctcggtcccctccgcctgacgctcctctctgtctcagccaggactggtttctgtaagaaacagcaggagctgtggcagcggcgaaaggaagcggctgaggcgcttggaacccgaaaagtctcggtgctcctggctacctcgcacagcggtgcccgcccggccgtcagtaccatggacagcagcgctgcccccacgaacgccagcaattgcactgatgccttggcgtactcaagttgctccccagcacccagccccggttcctgggtcaacttgtcccacttagatggcaacctgtccgacccatgcggtccgaaccgcaccgacctgggcgggagagacagcctgtgccctccgaccggcagtccctccatgatcacggccatcacgatcatggccctctactccatcgtgtgcgtggtggggctcttcggaaacttcctggtcatgtatgtgattgtcagatacaccaagatgaagactgccaccaacatctacattttcaaccttgctctggcagatgccttagccaccagtaccctgcccttccagagtgtgaattacctaatgggaacatggccatttggaaccatcctttgcaagatagtgatctccatagattactataacatgttcaccagcatattcaccctctgcaccatgagtgttgatcgatacattgcagtctgccaccctgtcaaggccttagatttccgtactccccgaaatgccaaaattatcaatgtctgcaactggatcctctcttcagccattggtcttcctgtaatgttcatggctacaacaaaatacaggcaaggttccatagattgtacactaacattctctcatccaacctggtactgggaaaacctgctgaagatctgtgttttcatcttcgccttcattatgccagtgctcatcattaccgtgtgctatggactgatgatcttgcgcctcaagagtgtccgcatgctctctggctccaaagaaaaggacaggaatcttcgaaggatcaccaggatggtgctggtggtggtggctgtgttcatcgtctgctggactcccattcacatttacgtcatcattaaagccttggttacaatcccagaaactacgttccagactgtttcttggcacttctgcattgctctaggttacacaaacagctgcctcaacccagtcctttatgcatttctggatgaaaacttcaaacgatgcttcagagagttctgtatcccaacctcttccaacattgagcaacaaaactccactcgaattcgtcagaacactagagaccacccctccacggccaatacagtggatagaactaatcatcagatcagagatccaatatcaaaccttcccagggtgtctgtattctga

SEQ ID NO: 21094 - DNA, 2485 bp, Homo sapiens
  source 1..2485: mol_type = unassigned DNA
cggtgctcctggctacctcgcacagcggtgcccgcccggccgtcagtaccatggacagcagcgctgcccccacgaacgccagcaattgcactgatgccttggcgtactcaagttgctccccagcacccagccccggttcctgggtcaacttgtcccacttagatggcaacctgtccgacccatgcggtccgaaccgcaccgacctgggcgggagagacagcctgtgccctccgaccggcagtccctccatgatcacggccatcacgatcatggccctctactccatcgtgtgcgtggtggggctcttcggaaacttcctggtcatgtatgtgattgtcagatacaccaagatgaagactgccaccaacatctacattttcaaccttgctctggcagatgccttagccaccagtaccctgcccttccagagtgtgaattacctaatgggaacatggccatttggaaccatcctttgcaagatagtgatctccatagattactataacatgttcaccagcatattcaccctctgcaccatgagtgttgatcgatacattgcagtctgccaccctgtcaaggccttagatttccgtactccccgaaatgccaaaattatcaatgtctgcaactggatcctctcttcagccattggtcttcctgtaatgttcatggctacaacaaaatacaggcaaggttccatagattgtacactaacattctctcatccaacctggtactgggaaaacctgctgaagatctgtgttttcatcttcgccttcattatgccagtgctcatcattaccgtgtgctatggactgatgatcttgcgcctcaagagtgtccgcatgctctctggctccaaagaaaaggacaggaatcttcgaaggatcaccaggatggtgctggtggtggtggctgtgttcatcgtctgctggactcccattcacatttacgtcatcattaaagccttggttacaatcccagaaactacgttccagactgtttcttggcacttctgcattgctctaggttacacaaacagctgcctcaacccagtcctttatgcatttctggatgaaaacttcaaacgatgcttcagagagttctgtatcccaacctcttccaacattgagcaacaaaactccactcgaattcgtcagaacactagagaccacccctccacggccaatacagtggatagaactaatcatcagggacctccagccaagtttgttgctgaccaacttgccgggtcgtcttgaaaagggggcttacaggtgttccaagcccgtgttttatcctgaagtatccctcaacacagaaaaacgacctcataacacaaaatacaccagcttaaaaatagcctttgaattatttttcacattaatcaaaactttacagaggagataaacactgatttttttattttattttattttattttattttattttattgccattcattcaaccgtttgcacagagagaaagaagacagaaatctgactggtaagaaattgttacccttttgccagcatgccaggcttctgggttccctttccctgagcggccctagtgatccggcttgcggcaccatcgcctacgggccaagctgcatcataaaggaaatttttttttttcattctggccagagcaaaacacatgtgataaaacataggcattagctactctgcttagcaccaaatatcagactagcttaaatttgcccccagatgggttccatcatctttaatccgacctctgacttgcagtttcaacacgtgctctctgggcaaaacagttgccctgagtaacagaaaagataggaaaggaaaaggagagagagaaaaacgtgccagtggaagggtggggaaggtgaaatgatcaaggaggccagagaaagactcacctattgcagcaacactgtagaagttcaggcagctgcttctcggtagcaaaaggatcttttccagcaatcctattagctctcaagtttccccttttagggaggaaaaagctccccatgtcccgcgatcctgtacatgtccaaccctgccatccacagccatcagcaaagagtgcaagacagattaatccaaagagaatagcaattaatatcccatagcatcaaagctgttcttagccaagagggactttaacgagaggggtctctaacaccctaaatcttagaagagactctaaccatcctaagtagggcctctaaccccgctttataaacttttaattgactcccatcttaacagttgcaatccatggaggaatgcttgataacctcggtgataagataaaaaaccaagcatactagaagtgttctctaaaattaaaaatacagtagttactagagaaaaattttagtccaaaaatccaactatagaaacatagaatgtgagaggtagcacataagaaataagtcatggggattttatttcatggaccagcaatatgatgataaaagccatctaacc

SEQ ID NO: 21095 - DNA, 1402 bp, Homo sapiens
  source 1..1402: mol_type = unassigned DNA
cggtgctcctggctacctcgcacagcggtgcccgcccggccgtcagtaccatggacagcagcgctgcccccacgaacgccagcaattgcactgatgccttggcgtactcaagttgctccccagcacccagccccggttcctgggtcaacttgtcccacttagatggcaacctgtccgacccatgcggtccgaaccgcaccgacctgggcgggagagacagcctgtgccctccgaccggcagtccctccatgatcacggccatcacgatcatggccctctactccatcgtgtgcgtggtggggctcttcggaaacttcctggtcatgtatgtgattgtcagatacaccaagatgaagactgccaccaacatctacattttcaaccttgctctggcagatgccttagccaccagtaccctgcccttccagagtgtgaattacctaatgggaacatggccatttggaaccatcctttgcaagatagtgatctccatagattactataacatgttcaccagcatattcaccctctgcaccatgagtgttgatcgatacattgcagtctgccaccctgtcaaggccttagatttccgtactccccgaaatgccaaaattatcaatgtctgcaactggatcctctcttcagccattggtcttcctgtaatgttcatggctacaacaaaatacaggcaaggttccatagattgtacactaacattctctcatccaacctggtactgggaaaacctgctgaagatctgtgttttcatcttcgccttcattatgccagtgctcatcattaccgtgtgctatggactgatgatcttgcgcctcaagagtgtccgcatgctctctggctccaaagaaaaggacaggaatcttcgaaggatcaccaggatggtgctggtggtggtggctgtgttcatcgtctgctggactcccattcacatttacgtcatcattaaagccttggttacaatcccagaaactacgttccagactgtttcttggcacttctgcattgctctaggttacacaaacagctgcctcaacccagtcctttatgcatttctggatgaaaacttcaaacgatgcttcagagagttctgtatcccaacctcttccaacattgagcaacaaaactccactcgaattcgtcagaacactagagaccacccctccacggccaatacagtggatagaactaatcatcaggtggaattgaacctggactgtcactgtgaaaatgcaaagccttggccactgagctacaatgcagggcagtctccatttcccttcccaggaagagtctagagcattaattttgagtttgcaaaggcttgtaactatttcatatgatttttagagctgactatgacatgaaccctaaaattcctgttccc

SEQ ID NO: 21096 - DNA, 1481 bp, Homo sapiens
  source 1..1481: mol_type = unassigned DNA
gcagaggagaatgtcagatgctcagctcggtcccctccgcctgacgctcctctctgtctcagccaggactggtttctgtaagaaacagcaggagctgtggcagcggcgaaaggaagcggctgaggcgcttggaacccgaaaagtctcggtgctcctggctacctcgcacagcggtgcccgcccggccgtcagtaccatggacagcagcgctgcccccacgaacgccagcaattgcactgatgccttggcgtactcaagttgctccccagcacccagccccggttcctgggtcaacttgtcccacttagatggcaacctgtccgacccatgcggtccgaaccgcaccgacctgggcgggagagacagcctgtgccctccgaccggcagtccctccatgatcacggccatcacgatcatggccctctactccatcgtgtgcgtggtggggctcttcggaaacttcctggtcatgtatgtgattgtcagatacaccaagatgaagactgccaccaacatctacattttcaaccttgctctggcagatgccttagccaccagtaccctgcccttccagagtgtgaattacctaatgggaacatggccatttggaaccatcctttgcaagatagtgatctccatagattactataacatgttcaccagcatattcaccctctgcaccatgagtgttgatcgatacattgcagtctgccaccctgtcaaggccttagatttccgtactccccgaaatgccaaaattatcaatgtctgcaactggatcctctcttcagccattggtcttcctgtaatgttcatggctacaacaaaatacaggcaaggttccatagattgtacactaacattctctcatccaacctggtactgggaaaacctgctgaagatctgtgttttcatcttcgccttcattatgccagtgctcatcattaccgtgtgctatggactgatgatcttgcgcctcaagagtgtccgcatgctctctggctccaaagaaaaggacaggaatcttcgaaggatcaccaggatggtgctggtggtggtggctgtgttcatcgtctgctggactcccattcacatttacgtcatcattaaagccttggttacaatcccagaaactacgttccagactgtttcttggcacttctgcattgctctaggttacacaaacagctgcctcaacccagtcctttatgcatttctggatgaaaacttcaaacgatgcttcagagagttctgtatcccaacctcttccaacattgagcaacaaaactccactcgaattcgtcagaacactagagaccacccctccacggccaatacagtggatagaactaatcatcaggtacgcagtctctagaattaggtatatctactggggatgacataaaaattataaggctttgtgctaaactaggagtttaatccattatagaggatgagaatggagggaagaggggaagcaa

SEQ ID NO: 21097 - DNA, 2033 bp, Homo sapiens
  source 1..2033: mol_type = unassigned DNA
cctgtaaagaaaatgatgagggctaaatccatcagcaccaaagctgggaagccctccaggttcatttggaagaaaatactcctctgagctcaaaggaagtgtgatctgtcacaatattgtatgcctgcactaagtttgcatcctgaaaactcactggaagataggaaagcaagcatgaaaaagcagccgggtcagacaggcttctggattcagtgtgtggacatgactttgcctgcatgaattgcccctttctcctacaaacaagagaattcggtcaagtggatgtggcagaactgggctgctctgagatgatagaaaagggctcctgcttttcctgtaattgcagccccttgttcttgtggttgctacatgcaataaatgtaattctatgagaaggaccagcccttacatcccatcaaaatgtttcctggaaacctggagcacagaactctgatatcctctcacactgtggcaggagaagcagcacaaggcacaatgctgaaatagcatggtccaggatgtgtttgcacagaagagtgcccagtgaagagacctactccttggatcgctttgcgcaaaatccaccccttttccctcctccctcccttccagcctccgaatcccgcatggcccacgctcccctcctgcagcggtgcggggcagccaggactggtttctgtaagaaacagcaggagctgtggcagcggcgaaaggaagcggctgaggcgcttggaacccgaaaagtctcggtgctcctggctacctcgcacagcggtgcccgcccggccgtcagtaccatggacagcagcgctgcccccacgaacgccagcaattgcactgatgccttggcgtactcaagttgctccccagcacccagccccggttcctgggtcaacttgtcccacttagatggcaacctgtccgacccatgcggtccgaaccgcaccgacctgggcgggagagacagcctgtgccctccgaccggcagtccctccatgatcacggccatcacgatcatggccctctactccatcgtgtgcgtggtggggctcttcggaaacttcctggtcatgtatgtgattgtcagatacaccaagatgaagactgccaccaacatctacattttcaaccttgctctggcagatgccttagccaccagtaccctgcccttccagagtgtgaattacctaatgggaacatggccatttggaaccatcctttgcaagatagtgatctccatagattactataacatgttcaccagcatattcaccctctgcaccatgagtgttgatcgatacattgcagtctgccaccctgtcaaggccttagatttccgtactccccgaaatgccaaaattatcaatgtctgcaactggatcctctcttcagccattggtcttcctgtaatgttcatggctacaacaaaatacaggcaaggttccatagattgtacactaacattctctcatccaacctggtactgggaaaacctgctgaagatctgtgttttcatcttcgccttcattatgccagtgctcatcattaccgtgtgctatggactgatgatcttgcgcctcaagagtgtccgcatgctctctggctccaaagaaaaggacaggaatcttcgaaggatcaccaggatggtgctggtggtggtggctgtgttcatcgtctgctggactcccattcacatttacgtcatcattaaagccttggttacaatcccagaaactacgttccagactgtttcttggcacttctgcattgctctaggttacacaaacagctgcctcaacccagtcctttatgcatttctggatgaaaacttcaaacgatgcttcagagagttctgtatcccaacctcttccaacattgagcaacaaaactccactcgaattcgtcagaacactagagaccacccctccacggccaatacagtggatagaactaatcatcagctagaaaatctggaagcagaaactgctccgttgccctaacagggtctcatgccattccgaccttcaccaagc

SEQ ID NO: 21098 - DNA, 2217 bp, Homo sapiens
  source 1..2217: mol_type = unassigned DNA
cggtgctcctggctacctcgcacagcggtgcccgcccggccgtcagtaccatggacagcagcgctgcccccacgaacgccagcaattgcactgatgccttggcgtactcaagttgctccccagcacccagccccggttcctgggtcaacttgtcccacttagatggcaacctgtccgacccatgcggtccgaaccgcaccgacctgggcgggagagacagcctgtgccctccgaccggcagtccctccatgatcacggccatcacgatcatggccctctactccatcgtgtgcgtggtggggctcttcggaaacttcctggtcatgtatgtgattgtcagatacaccaagatgaagactgccaccaacatctacattttcaaccttgctctggcagatgccttagccaccagtaccctgcccttccagagtgtgaattacctaatgggaacatggccatttggaaccatcctttgcaagatagtgatctccatagattactataacatgttcaccagcatattcaccctctgcaccatgagtgttgatcgatacattgcagtctgccaccctgtcaaggccttagatttccgtactccccgaaatgccaaaattatcaatgtctgcaactggatcctctcttcagccattggtcttcctgtaatgttcatggctacaacaaaatacaggcaaggttccatagattgtacactaacattctctcatccaacctggtactgggaaaacctgctgaagatctgtgttttcatcttcgccttcattatgccagtgctcatcattaccgtgtgctatggactgatgatcttgcgcctcaagagtgtccgcatgctctctggctccaaagaaaaggacaggaatcttcgaaggatcaccaggatggtgctggtggtggtggctgtgttcatcgtctgctggactcccattcacatttacgtcatcattaaagccttggttacaatcccagaaactacgttccagactgtttcttggcacttctgcattgctctaggttacacaaacagctgcctcaacccagtcctttatgcatttctggatgaaaacttcaaacgatgcttcagagagttctgtatcccaacctcttccaacattgagcaacaaaactccactcgaattcgtcagaacactagagaccacccctccacggccaatacagtggatagaactaatcatcagagagaaagaagacagaaatctgactggtaagaaattgttacccttttgccagcatgccaggcttctgggttccctttccctgagcggccctagtgatccggcttgcggcaccatcgcctacgggccaagctgcatcataaaggaaatttttttttttcattctggccagagcaaaacacatgtgataaaacataggcattagctactctgcttagcaccaaatatcagactagcttaaatttgcccccagatgggttccatcatctttaatccgacctctgacttgcagtttcaacacgtgctctctgggcaaaacagttgccctgagtaacagaaaagataggaaaggaaaaggagagagagaaaaacgtgccagtggaagggtggggaaggtgaaatgatcaaggaggccagagaaagactcacctattgcagcaacactgtagaagttcaggcagctgcttctcggtagcaaaaggatcttttccagcaatcctattagctctcaagtttccccttttagggaggaaaaagctccccatgtcccgcgatcctgtacatgtccaaccctgccatccacagccatcagcaaagagtgcaagacagattaatccaaagagaatagcaattaatatcccatagcatcaaagctgttcttagccaagagggactttaacgagaggggtctctaacaccctaaatcttagaagagactctaaccatcctaagtagggcctctaaccccgctttataaacttttaattgactcccatcttaacagttgcaatccatggaggaatgcttgataacctcggtgataagataaaaaaccaagcatactagaagtgttctctaaaattaaaaatacagtagttactagagaaaaattttagtccaaaaatccaactatagaaacatagaatgtgagaggtagcacataagaaataagtcatggggattttatttcatggaccagcaatatgatgataaaagccatctaacc

SEQ ID NO: 21099 - DNA, 1352 bp, Homo sapiens
  source 1..1352: mol_type = unassigned DNA
gaaaggaagcggctgaggcgcttggaacccgaaaagtctcggtgctcctggctacctcgcacagcggtgcccgcccggccgtcagtaccatggacagcagcgctgcccccacgaacgccagcaattgcactgatgccttggcgtactcaagttgctccccagcacccagccccggttcctgggtcaacttgtcccacttagatggcaacctgtccgacccatgcggtccgaaccgcaccgacctgggcgggagagacagcctgtgccctccgaccggcagtccctccatgatcacggccatcacgatcatggccctctactccatcgtgtgcgtggtggggctcttcggaaacttcctggtcatgtatgtgattgtcagatacaccaagatgaagactgccaccaacatctacattttcaaccttgctctggcagatgccttagccaccagtaccctgcccttccagagtgtgaattacctaatgggaacatggccatttggaaccatcctttgcaagatagtgatctccatagattactataacatgttcaccagcatattcaccctctgcaccatgagtgttgatcgatacattgcagtctgccaccctgtcaaggccttagatttccgtactccccgaaatgccaaaattatcaatgtctgcaactggatcctctcttcagccattggtcttcctgtaatgttcatggctacaacaaaatacaggcaaggttccatagattgtacactaacattctctcatccaacctggtactgggaaaacctgctgaagatctgtgttttcatcttcgccttcattatgccagtgctcatcattaccgtgtgctatggactgatgatcttgcgcctcaagagtgtccgcatgctctctggctccaaagaaaaggacaggaatcttcgaaggatcaccaggatggtgctggtggtggtggctgtgttcatcgtctgctggactcccattcacatttacgtcatcattaaagccttggttacaatcccagaaactacgttccagactgtttcttggcacttctgcattgctctaggttacacaaacagctgcctcaacccagtcctttatgcatttctggatgaaaacttcaaacgatgcttcagagagttctgtatcccaacctcttccaacattgagcaacaaaactccactcgaattcgtcagaacactagagaccacccctccacggccaatacagtggatagaactaatcatcagaaaatagatttatttcaaaagtcatctttactcaactgtgagcataccaagggctaataattacaatattttcccgtgaaagaatataagattggaagc

SEQ ID NO: 21100 - DNA, 1060 bp, Homo sapiens
  source 1..1060: mol_type = unassigned DNA
cctgtaaagaaaatgatgagggctaaatccatcagcaccaaagctgggaagccctccagatacaccaagatgaagactgccaccaacatctacattttcaaccttgctctggcagatgccttagccaccagtaccctgcccttccagagtgtgaattacctaatgggaacatggccatttggaaccatcctttgcaagatagtgatctccatagattactataacatgttcaccagcatattcaccctctgcaccatgagtgttgatcgatacattgcagtctgccaccctgtcaaggccttagatttccgtactccccgaaatgccaaaattatcaatgtctgcaactggatcctctcttcagccattggtcttcctgtaatgttcatggctacaacaaaatacaggcaaggttccatagattgtacactaacattctctcatccaacctggtactgggaaaacctgctgaagatctgtgttttcatcttcgccttcattatgccagtgctcatcattaccgtgtgctatggactgatgatcttgcgcctcaagagtgtccgcatgctctctggctccaaagaaaaggacaggaatcttcgaaggatcaccaggatggtgctggtggtggtggctgtgttcatcgtctgctggactcccattcacatttacgtcatcattaaagccttggttacaatcccagaaactacgttccagactgtttcttggcacttctgcattgctctaggttacacaaacagctgcctcaacccagtcctttatgcatttctggatgaaaacttcaaacgatgcttcagagagttctgtatcccaacctcttccaacattgagcaacaaaactccactcgaattcgtcagaacactagagaccacccctccacggccaatacagtggatagaactaatcatcagctagaaaatctggaagcagaaactgctccgttgccctaacagggtctcatgccattccgaccttcaccaagcttagaagccaccatgtatgtggaagcaggttgcttcaagaatgtgtaggaggctc

SEQ ID NO: 21101 - DNA, 2594 bp, Homo sapiens
  source 1..2594: mol_type = unassigned DNA
cggtgctcctggctacctcgcacagcggtgcccgcccggccgtcagtaccatggacagcagcgctgcccccacgaacgccagcaattgcactgatgccttggcgtactcaagttgctccccagcacccagccccggttcctgggtcaacttgtcccacttagatggcaacctgtccgacccatgcggtccgaaccgcaccgacctgggcgggagagacagcctgtgccctccgaccggcagtccctccatgatcacggccatcacgatcatggccctctactccatcgtgtgcgtggtggggctcttcggaaacttcctggtcatgtatgtgattgtcagatacaccaagatgaagactgccaccaacatctacattttcaaccttgctctggcagatgccttagccaccagtaccctgcccttccagagtgtgaattacctaatgggaacatggccatttggaaccatcctttgcaagatagtgatctccatagattactataacatgttcaccagcatattcaccctctgcaccatgagtgttgatcgatacattgcagtctgccaccctgtcaaggccttagatttccgtactccccgaaatgccaaaattatcaatgtctgcaactggatcctctcttcagccattggtcttcctgtaatgttcatggctacaacaaaatacaggcaaggttccatagattgtacactaacattctctcatccaacctggtactgggaaaacctgctgaagatctgtgttttcatcttcgccttcattatgccagtgctcatcattaccgtgtgctatggactgatgatcttgcgcctcaagagtgtccgcatgctctctggctccaaagaaaaggacaggaatcttcgaaggatcaccaggatggtgctggtggtggtggctgtgttcatcgtctgctggactcccattcacatttacgtcatcattaaagccttggttacaatcccagaaactacgttccagactgtttcttggcacttctgcattgctctaggttacacaaacagctgcctcaacccagtcctttatgcatttctggatgaaaacttcaaacgatgcttcagagagttctgtatcccaacctcttccaacattgagcaacaaaactccactcgaattcgtcagaacactagagaccacccctccacggccaatacagtggatagaactaatcatcagatcagagatccaatatcaaaccttcccagggtgtctgtattctgacaactgtccactgaggcaatttccatacagcgcaaagtggagtggcgatttggcagttatcaagggacctccagccaagtttgttgctgaccaacttgccgggtcgtcttgaaaagggggcttacaggtgttccaagcccgtgttttatcctgaagtatccctcaacacagaaaaacgacctcataacacaaaatacaccagcttaaaaatagcctttgaattatttttcacattaatcaaaactttacagaggagataaacactgatttttttattttattttattttattttattttattttattgccattcattcaaccgtttgcacagagagaaagaagacagaaatctgactggtaagaaattgttacccttttgccagcatgccaggcttctgggttccctttccctgagcggccctagtgatccggcttgcggcaccatcgcctacgggccaagctgcatcataaaggaaatttttttttttcattctggccagagcaaaacacatgtgataaaacataggcattagctactctgcttagcaccaaatatcagactagcttaaatttgcccccagatgggttccatcatctttaatccgacctctgacttgcagtttcaacacgtgctctctgggcaaaacagttgccctgagtaacagaaaagataggaaaggaaaaggagagagagaaaaacgtgccagtggaagggtggggaaggtgaaatgatcaaggaggccagagaaagactcacctattgcagcaacactgtagaagttcaggcagctgcttctcggtagcaaaaggatcttttccagcaatcctattagctctcaagtttccccttttagggaggaaaaagctccccatgtcccgcgatcctgtacatgtccaaccctgccatccacagccatcagcaaagagtgcaagacagattaatccaaagagaatagcaattaatatcccatagcatcaaagctgttcttagccaagagggactttaacgagaggggtctctaacaccctaaatcttagaagagactctaaccatcctaagtagggcctctaaccccgctttataaacttttaattgactcccatcttaacagttgcaatccatggaggaatgcttgataacctcggtgataagataaaaaaccaagcatactagaagtgttctctaaaattaaaaatacagtagttactagagaaaaattttagtccaaaaatccaactatagaaacatagaatgtgagaggtagcacataagaaataagtcatggggattttatttcatggaccagcaatatgatgataaaagccatctaacc

SEQ ID NO: 21102 - DNA, 1001 bp, Homo sapiens
  source 1..1001: mol_type = unassigned DNA
gtcttcctgtaaagaaaatgatgagggctaaatccatcagcaccaaagctgggaagccctccaggttcatttggaagaaaatactcctctgagctcaaaggaagtgtgatctgtcacaatattgtatgcctgcactaagtttgcatcctgaaaactcactggaagataggaaagcaagcatgaaaaagcagccgggtcagacaggcttctggattcagtgtgtggacatgactttgcctgcatgaattgcccctttctcctacaaacaagagaattcggtcaagtggatgtggcagaactgggctgctctgagatgatagaaaagggctcctgcttttcctgtaattgcagccccttgttcttgtggttgctacatgcaataaatgtaattctatgagaaggaccagcccttacatcccatcaaaatgtttcctggaaacctggagcacagaactctgatatcctctcacactgtggcaggagaagcagcacaaggcacaatgctgaaatagcatggtccaggccaggactggtttctgtaagaaacagcaggagctgtggcagcggcgaaaggaagcggctgaggcgcttggaacccgaaaagtctcggtgctcctggctacctcgcacagcggtgcccgcccggccgtcagtaccatggacagcagcgctgcccccacgaacgccagcaattgcactgatgccttggcgtactcaagttgctccccagcacccagccccggttcctgggtcaacttgtcccacttagatggcaacctgtccgacccatgcggtccgaaccgcaccgacctgggcgggagagacagcctgtgccctccgaccggcagtccctccatgatcacggccatcacgatcatggccctctactccatcgtgtgcgtggtggggctcttcggaaacttcctggtcatgtatgtgattgtcagatacaccaagatgaagactgccaccaacatctacattttcaaccttgctctggc

SEQ ID NO: 21103 - DNA, 1519 bp, Homo sapiens
  source 1..1519: mol_type = unassigned DNA
cctgtaaagaaaatgatgagggctaaatccatcagcaccaaagctgggaagccctccaggttcatttggaagaaaatactcctctgagctcaaaggaagtgtgatctgtcacaatattgtatgcctgcactaagtttgcatcctgaaaactcactggaagataggaaagcaagcatgaaaaagcagccgggtcagacaggcttctggattcagtgtgtggacatgactttgcctgcatgaattgcccctttctcctacaaacaagagaattcggtcaagtggatgtggcagaactgggctgctctgagatgatagaaaagggctcctgcttttcctgtaattgcagccccttgttcttgtggttgctacatgcaataaatgtaattctatgagaaggaccagcccttacatcccatcaaaatgtttcctggaaacctggagcacagaactctgatatcctctcacactgtggcaggagaagcagcacaaggcacaatgctgaaatagcatggtccaggatacaccaagatgaagactgccaccaacatctacattttcaaccttgctctggcagatgccttagccaccagtaccctgcccttccagagtgtgaattacctaatgggaacatggccatttggaaccatcctttgcaagatagtgatctccatagattactataacatgttcaccagcatattcaccctctgcaccatgagtgttgatcgatacattgcagtctgccaccctgtcaaggccttagatttccgtactccccgaaatgccaaaattatcaatgtctgcaactggatcctctcttcagccattggtcttcctgtaatgttcatggctacaacaaaatacaggcaaggttccatagattgtacactaacattctctcatccaacctggtactgggaaaacctgctgaagatctgtgttttcatcttcgccttcattatgccagtgctcatcattaccgtgtgctatggactgatgatcttgcgcctcaagagtgtccgcatgctctctggctccaaagaaaaggacaggaatcttcgaaggatcaccaggatggtgctggtggtggtggctgtgttcatcgtctgctggactcccattcacatttacgtcatcattaaagccttggttacaatcccagaaactacgttccagactgtttcttggcacttctgcattgctctaggttacacaaacagctgcctcaacccagtcctttatgcatttctggatgaaaacttcaaacgatgcttcagagagttctgtatcccaacctcttccaacattgagcaacaaaactccactcgaattcgtcagaacactagagaccacccctccacggccaatacagtggatagaactaatcatcagctagaaaatctggaagcagaaactgctccgttgccctaacagggtctcatgccattccgaccttcaccaagcttagaagccaccatgtatgtggaagcaggttgcttcaagaatgtgtaggaggctc

SEQ ID NO: 21104 - DNA, 2459 bp, Homo sapiens
  source 1..2459: mol_type = unassigned DNA
ggctagcatgctaattaactatgcataaccacgtttcctttcaccatgttgaaccctgacataatttttttttccacaaacacctcactctggagaaggaaatgattttttttaattaaaataaacatacattggaaatacttagtgctaaaataagcctgaaggaaaggttggaagtatgatgagtcagaaaactgactgtaaagaaaccaattacttaacataaaacaccattaaagataagccacgaaatgtaaggtctgctgggtaggaaagtggcaaatgcaatgaagcatgtctttagatcatgcaggtctataaccaacggtgaatctagcaaaagttattttctcttttggggagaaacttcttcttattaaaaaaataaaaaatgtttcaacttcttgagcaccaaggtcaattattctaaatcttaaaaccacagttttaattttgcttttttgttggtttttgtactttggagtatttgtctacattatcctttttatatttgccatatttaaagtccaaactaaaagcaaattattttctctcctcaagttaaatggctctatctttttctttaaaatccattaagaaagtgaaactcccaaagtaagtccaaaaaaaagcccccaagtctgaaaatgtggagcttttctggcagtaatgcagcttctgcaagtattgcagaccagatcaggtatcagaattttaaagcttcagtaacaaagctgtcctattgaccctgaggagatttatgaaatcactttcctgatgttattgaaaccaaaacactttcctggacactgaattcagtcctaaacaaagggcctccaaccaacagctgtcttgggctgaatgagttagactcaacctcgtgtgacggaaaaacagtaaacacaagctaacatttaaaaggaattgatggcaccgtgtaaatcagaagcccaaggagggcctggcttcaggtgtggggttctctctcacgctctcaaatccacatcctccggattaggtccattttcagacaagctcctccagcaactacataccatgcgtcttctcaggtgtgggtcctgcaggaaaactaatacactctttgtccataagtctcaaaataaactctcactggctctggttggaacatgagagcatccttgccattcaccatggccccggtcactaaacgtcttcacgccctggactggtaatacagcctatcccaaagcacctggactgagaacgggaaatgagtggttcccagagtgaaactgaggtactattactaaattaagatacaccaagatgaagactgccaccaacatctacattttcaaccttgctctggcagatgccttagccaccagtaccctgcccttccagagtgtgaattacctaatgggaacatggccatttggaaccatcctttgcaagatagtgatctccatagattactataacatgttcaccagcatattcaccctctgcaccatgagtgttgatcgatacattgcagtctgccaccctgtcaaggccttagatttccgtactccccgaaatgccaaaattatcaatgtctgcaactggatcctctcttcagccattggtcttcctgtaatgttcatggctacaacaaaatacaggcaaggttccatagattgtacactaacattctctcatccaacctggtactgggaaaacctgctgaagatctgtgttttcatcttcgccttcattatgccagtgctcatcattaccgtgtgctatggactgatgatcttgcgcctcaagagtgtccgcatgctctctggctccaaagaaaaggacaggaatcttcgaaggatcaccaggatggtgctggtggtggtggctgtgttcatcgtctgctggactcccattcacatttacgtcatcattaaagccttggttacaatcccagaaactacgttccagactgtttcttggcacttctgcattgctctaggttacacaaacagctgcctcaacccagtcctttatgcatttctggatgaaaacttcaaacgatgcttcagagagttctgtatcccaacctcttccaacattgagcaacaaaactccactcgaattcgtcagaacactagagaccacccctccacggccaatacagtggatagaactaatcatcagctagaaaatctggaagcagaaactgctccgttgccctaacagggtctcatgccattccgaccttcaccaagcttagaagccaccatgtatgtggaagcaggttgcttcaagaatgtgtaggaggctctaattctctaggaaagtgcctgcttttaggtcatccaacctctttcctctctggccactctgctctgcacattagagggacagccaaaagtaagtggagcatttggaaggaaaggaatataccacaccgaggagtccagtttgtgcaagacacccagtgg

SEQ ID NO: 21105 - DNA, 2440 bp, Homo sapiens
  source 1..2440: mol_type = unassigned DNA
ggctagcatgctaattaactatgcataaccacgtttcctttcaccatgttgaaccctgacataatttttttttccacaaacacctcactctggagaaggaaatgattttttttaattaaaataaacatacattggaaatacttagtgctaaaataagcctgaaggaaaggttggaagtatgatgagtcagaaaactgactgtaaagaaaccaattacttaacataaaacaccattaaagataagccacgaaatgtaaggtctgctgggtaggaaagtggcaaatgcaatgaagcatgtctttagatcatgcaggtctataaccaacggtgaatctagcaaaagttattttctcttttggggagaaacttcttcttattaaaaaaataaaaaatgtttcaacttcttgagcaccaaggtcaattattctaaatcttaaaaccacagttttaattttgcttttttgttggtttttgtactttggagtatttgtctacattatcctttttatatttgccatatttaaagtccaaactaaaagcaaattattttctctcctcaagttaaatggctctatctttttctttaaaatccattaagaaagtgaaactcccaaagtaagtccaaaaaaaagcccccaagtctgaaaatgtggagcttttctggcagtaatgcagcttctgcaagtattgcagaccagatcaggtatcagaattttaaagcttcagtaacaaagctgtcctattgaccctgaggagatttatgaaatcactttcctgatgttattgaaaccaaaacactttcctggacactgaattcagtcctaaacaaagggcctccaaccaacagctgtcttgggctgaatgagttagactcaacctcgtgtgacggaaaaacagtaaacacaagctaacatttaaaaggaattgatggcaccgtgtaaatcagaagcccaaggagggcctggcttcaggtgtggggttctctctcacgctctcaaatccacatcctccggattaggtccattttcagacaagctcctccagcaactacataccatgcgtcttctcaggtgtgggtcctgcaggaaaactaatacactctttgtccataagtctcaaaataaactctcactggctctggttggaacatgagagcatccttgccattcaccatggccccggtcactaaacgtcttcacgccctggactggtaatacagcctatcccaaagcacctggactgagaacgggaaatgagtggttcccagagtgaaactgagatacaccaagatgaagactgccaccaacatctacattttcaaccttgctctggcagatgccttagccaccagtaccctgcccttccagagtgtgaattacctaatgggaacatggccatttggaaccatcctttgcaagatagtgatctccatagattactataacatgttcaccagcatattcaccctctgcaccatgagtgttgatcgatacattgcagtctgccaccctgtcaaggccttagatttccgtactccccgaaatgccaaaattatcaatgtctgcaactggatcctctcttcagccattggtcttcctgtaatgttcatggctacaacaaaatacaggcaaggttccatagattgtacactaacattctctcatccaacctggtactgggaaaacctgctgaagatctgtgttttcatcttcgccttcattatgccagtgctcatcattaccgtgtgctatggactgatgatcttgcgcctcaagagtgtccgcatgctctctggctccaaagaaaaggacaggaatcttcgaaggatcaccaggatggtgctggtggtggtggctgtgttcatcgtctgctggactcccattcacatttacgtcatcattaaagccttggttacaatcccagaaactacgttccagactgtttcttggcacttctgcattgctctaggttacacaaacagctgcctcaacccagtcctttatgcatttctggatgaaaacttcaaacgatgcttcagagagttctgtatcccaacctcttccaacattgagcaacaaaactccactcgaattcgtcagaacactagagaccacccctccacggccaatacagtggatagaactaatcatcagctagaaaatctggaagcagaaactgctccgttgccctaacagggtctcatgccattccgaccttcaccaagcttagaagccaccatgtatgtggaagcaggttgcttcaagaatgtgtaggaggctctaattctctaggaaagtgcctgcttttaggtcatccaacctctttcctctctggccactctgctctgcacattagagggacagccaaaagtaagtggagcatttggaaggaaaggaatataccacaccgaggagtccagtttgtgcaagacacccagtgg

SEQ ID NO: 21106 - DNA, 1468 bp, Homo sapiens
  source 1..1468: mol_type = unassigned DNA
gcttggaacccgaaaagtctcggtgctcctggctacctcgcacagcggtgcccgcccggccgtcagtaccatggacagcagcgctgcccccacgaacgccagcaattgcactgatgccttggcgtactcaagttgctccccagcacccagccccggttcctgggtcaacttgtcccacttagatggcaacctgtccgacccatgcggtccgaaccgcaccgacctgggcgggagagacagcctgtgccctccgaccggcagtccctccatgatcacggccatcacgatcatggccctctactccatcgtgtgcgtggtggggctcttcggaaacttcctggtcatgtatgtgattgtcagatacaccaagatgaagactgccaccaacatctacattttcaaccttgctctggcagatgccttagccaccagtaccctgcccttccagagtgtgaattacctaatgggaacatggccatttggaaccatcctttgcaagatagtgatctccatagattactataacatgttcaccagcatattcaccctctgcaccatgagtgttgatcgatacattgcagtctgccaccctgtcaaggccttagatttccgtactccccgaaatgccaaaattatcaatgtctgcaactggatcctctcttcagccattggtcttcctgtaatgttcatggctacaacaaaatacaggcaaggttccatagattgtacactaacattctctcatccaacctggtactgggaaaacctgctgaagatctgtgttttcatcttcgccttcattatgccagtgctcatcattaccgtgtgctatggactgatgatcttgcgcctcaagagtgtccgcatgctctctggctccaaagaaaaggacaggaatcttcgaaggatcaccaggatggtgctggtggtggtggctgtgttcatcgtctgctggactcccattcacatttacgtcatcattaaagccttggttacaatcccagaaactacgttccagactgtttcttggcacttctgcattgctctaggttacacaaacagctgcctcaacccagtcctttatgcatttctggatgaaaacttcaaacgatgcttcagagagttctgtatcccaacctcttccaacattgagcaacaaaactccactcgaattcgtcagaacactagagaccacccctccacggccaatacagtggatagaactaatcatcagatcagagatccaatatcaaaccttcccagggtgtctgtattctgacaactgtccactgaggcaatttccatacagcgcaaagtggagtggcgatttggcagttatcaagctagaaaatctggaagcagaaactgctccgttgccctaacagggtctcatgccattccgaccttcaccaagcttagaagccaccatgtatgtggaagcaggttgcttcaagaatgtgtaggaggc

SEQ ID NO: 21107 - DNA, 1017 bp, Homo sapiens
  source 1..1017: mol_type = unassigned DNA
ggaacccgaaaagtctcggtgctcctggctacctcgcacagcggtgcccgcccggccgtcagtaccatggacagcagcgctgcccccacgaacgccagcaattgcactgatgccttggcgtactcaagttgctccccagcacccagccccggttcctgggtcaacttgtcccacttagatggcaacctgtccgacccatgcggtccgaaccgcaccgacctgggcgggagagacagcctgtgccctccgaccggcagtccctccatgatcacggccatcacgatcatggccctctactccatcgtgtgcgtggtggggctcttcggaaacttcctggtcatgtatgtgattgtcaggttccatagattgtacactaacattctctcatccaacctggtactgggaaaacctgctgaagatctgtgttttcatcttcgccttcattatgccagtgctcatcattaccgtgtgctatggactgatgatcttgcgcctcaagagtgtccgcatgctctctggctccaaagaaaaggacaggaatcttcgaaggatcaccaggatggtgctggtggtggtggctgtgttcatcgtctgctggactcccattcacatttacgtcatcattaaagccttggttacaatcccagaaactacgttccagactgtttcttggcacttctgcattgctctaggttacacaaacagctgcctcaacccagtcctttatgcatttctggatgaaaacttcaaacgatgcttcagagagttctgtatcccaacctcttccaacattgagcaacaaaactccactcgaattcgtcagaacactagagaccacccctccacggccaatacagtggatagaactaatcatcagccacccttggcagtcagcatggcccagatctttacacgatatcctcctccgactcatcgtgagaaaacctgcaatgattacatgaagagggtaaagtattatcctgatttatgtgacagagtgaaaggcaacttttaatt

SEQ ID NO: 21108 - DNA, 1251 bp, Homo sapiens
  source 1..1251: mol_type = unassigned DNA
cggtgctcctggctacctcgcacagcggtgcccgcccggccgtcagtaccatggacagcagcgctgcccccacgaacgccagcaattgcactgatgccttggcgtactcaagttgctccccagcacccagccccggttcctgggtcaacttgtcccacttagatggcaacctgtccgacccatgcggtccgaaccgcaccgacctgggcgggagagacagcctgtgccctccgaccggcagtccctccatgatcacggccatcacgatcatggccctctactccatcgtgtgcgtggtggggctcttcggaaacttcctggtcatgtatgtgattgtcagatacaccaagatgaagactgccaccaacatctacattttcaaccttgctctggcagatgccttagccaccagtaccctgcccttccagagtgtgaattacctaatgggaacatggccatttggaaccatcctttgcaagatagtgatctccatagattactataacatgttcaccagcatattcaccctctgcaccatgagtgttgatcgatacattgcagtctgccaccctgtcaaggccttagatttccgtactccccgaaatgccaaaattatcaatgtctgcaactggatcctctcttcagccattggtcttcctgtaatgttcatggctacaacaaaatacaggcaaggttccatagattgtacactaacattctctcatccaacctggtactgggaaaacctgctgaagatctgtgttttcatcttcgccttcattatgccagtgctcatcattaccgtgtgctatggactgatgatcttgcgcctcaagagtgtccgcatgctctctggctccaaagaaaaggacaggaatcttcgaaggatcaccaggatggtgctggtggtggtggctgtgttcatcgtctgctggactcccattcacatttacgtcatcattaaagccttggttacaatcccagaaactacgttccagactgtttcttggcacttctgcattgctctaggttacacaaacagctgcctcaacccagtcctttatgcatttctggatgaaaacttcaaacgatgcttcagagagttctgtatcccaacctcttccaacattgagcaacaaaactccactcgaattcgtcagaacactagagaccacccctccacggccaatacagtggatagaactaatcatcagagctgactatgacatgaaccctaaaattcctgttccc

SEQ ID NO: 21109 - DNA, 1261 bp, Homo sapiens
  source 1..1261: mol_type = unassigned DNA
cgtgaccctcaggtgatgcgccagggccggctgccgtcggggacagggctttccatagccatggcccagcagtggagcctccaaaggctcgcaggccgccatccgcaggacagctatgaggacagcacccagtccagcatcttcacctacaccaacagcaactccaccagaggccccttcgaaggcccgaattaccacatcgctcccagatgggtgtaccacctcaccagtgtctggatgatctttgtggtcactgcatccgtcttcacaaatgggcttgtgctggcggccaccatgaagttcaagaagctgcgccacccgctgaactggatcctggtgaacctggcggtcgctgacctagcagagaccgtcatcgccagcactatcagcattgtgaaccaggtctctggctacttcgtgctgggccaccctatgtgtgtcctggagggctacaccgtctccctgtgtgggatcacaggtctctggtctctggccatcatttcctgggagaggtggctggtggtgtgcaagccctttggcaatgtgagatttgatgccaagctggccatcgtgggcattgccttctcctggatctggtctgctgtgtggacagccccgcccatctttggttggagcaggtactggccccacggcctgaagacttcatgcggcccagacgtgttcagcggcagctcgtaccccggggtgcagtcttacatgattgtcctcatggtcacctgctgcatcatcccactcgctatcatcatgctctgctacctccaagtgtggctggccatccgagcggtggcaaagcagcagaaagagtctgaatccacccagaaggcagagaaggaagtgacgcgcatggtggtggtgatgatctttgcgtactgcgtctgctggggaccctacaccttcttcgcatgctttgctgctgccaaccctggttacgccttccaccctttgatggctgccctgccggcctactttgccaaaagtgccactatctacaaccccgttatctatgtctttatgaaccggcagtttcgaaactgcatcttgcagcttttcgggaagaaggttgacgatggctctgaactctccagcgcctccaaaacggaggtctcatctgtgtcctcggtatcgcctgcatgaggtctgcctcctacccatcccgcccaccggggctttggccacctctcctttccccctccttctccatccctgtaaaataaatgtaatttatctttgccaaaaccaa

SEQ ID NO: 21110 - DNA, 1257 bp, Homo sapiens
  source 1..1257: mol_type = unassigned DNA
cgtgaccctcaggtgacgcaccagggccggctgccgtcggggacagggctttccatagccatggcccagcagtggagcctccaaaggctcgcaggccgccatccgcaggacagctatgaggacagcacccagtccagcatcttcacctacaccaacagcaactccaccagaggccccttcgaaggcccgaattaccacatcgctcccagatgggtgtaccacctcaccagtgtctggatgatctttgtggtcattgcatccgtcttcacaaatgggcttgtgctggcggccaccatgaagttcaagaagctgcgccacccgctgaactggatcctggtgaacctggcggtcgctgacctggcagagaccgtcatcgccagcactatcagcgttgtgaaccaggtctatggctacttcgtgctgggccaccctatgtgtgtcctggagggctacaccgtctccctgtgtgggatcacaggtctctggtctctggccatcatttcctgggagagatggatggtggtctgcaagccctttggcaatgtgagatttgatgccaagctggccatcgtgggcattgccttctcctggatctgggctgctgtgtggacagccccgcccatctttggttggagcaggtactggccccacggcctgaagacttcatgcggcccagacgtgttcagcggcagctcgtaccccggggtgcagtcttacatgattgtcctcatggtcacctgctgcatcaccccactcagcatcatcgtgctctgctacctccaagtgtggctggccatccgagcggtggcaaagcagcagaaagagtctgaatccacccagaaggcagagaaggaagtgacgcgcatggtggtggtgatggtcctggcattctgcttctgctggggaccatacgccttcttcgcatgctttgctgctgccaaccctggctaccccttccaccctttgatggctgccctgccggccttctttgccaaaagtgccactatctacaaccccgttatctatgtctttatgaaccggcagtttcgaaactgcatcttgcagcttttcgggaagaaggttgacgatggctctgaactctccagcgcctccaaaacggaggtctcatctgtgtcctcggtatcgcctgcatgaggtctgcctcctacccatcccgcccaccggggctttggccacctctcctttccccctccttctccatccctgtaaaataaatgtaatttatctttgccaaaa

SEQ ID NO: 21111 - DNA, 1096 bp, Homo sapiens
  source 1..1096: mol_type = unassigned DNA
atgagaaaaatgtcggaggaagagttttatctgttcaaaaatatctcttcagtggggccgtgggatgggcctcagtaccacattgcccctgtctgggccttctacctccaggcagctttcatgggcactgtcttccttatagggttcccactcaatgccatggtgctggtggccacactgcgctacaaaaagttgcggcagcccctcaactacattctggtcaacgtgtccttcggaggcttcctcctctgcatcttctctgtcttccctgtcttcgtcgccagctgtaacggatacttcgtcttcggtcgccatgtttgtgctttggagggcttcctgggcactgtagcaggtctggttacaggatggtcactggccttcctggcctttgagcgctacattgtcatctgtaagcccttcggcaacttccgcttcagctccaagcatgcactgacggtggtcctggctacctggaccattggtattggcgtctccatcccacccttctttggctggagccggttcatccctgagggcctgcagtgttcctgtggccctgactggtacaccgtgggcaccaaataccgcagcgagtcctatacgtggttcctcttcatcttctgcttcattgtgcctctctccctcatctgcttctcctacactcagctgctgagggccctgaaagctgttgcagctcagcagcaggagtcagctacgacccagaaggctgaacgggaggtgagccgcatggtggttgtgatggtaggatccttctgtgtctgctacgtgccctacgcggccttcgccatgtacatggtcaacaaccgtaaccatgggctggacttacggcttgtcaccattccttcattcttctccaagagtgcttgcatctacaatcccatcatctactgcttcatgaataagcagttccaagcttgcatcatgaagatggtgtgtgggaaggccatgacagatgaatccgacacatgcagctcccagaaaacagaagtttctactgtctcgtctacccaagttggccccaactgaggacccaatattggcctgtttgcaacagctagaattaaattttactttt

SEQ ID NO: 21112 - DNA, 2395 bp, Homo sapiens
  source 1..2395: mol_type = unassigned DNA
gggcccggcgcgcggtagcgcgggcccctcagtgcacaatggctagagcaggcggcggagccccaaccccacccagtgcggagcgcgccgcgagccccgccgcaagctgagcgcctccgcccgccaggcgcgccggcgccgggccatgtactcggggaaccgcagcggcggccacggctactgggacggcggcggggccgcgggcgctgaggggccggcgccggcggggacactgagccccgcgcccctcttcagccccggcacctacgagcgcctggcgctgctgctgggctccattgggctgctgggcgtcggcaacaacctgctggtgctcgtcctctactacaagttccagcggctccgcactcccactcacctcctcctggtcaacatcagcctcagcgacctgctggtgtccctcttcggggtcacctttaccttcgtgtcctgcctgaggaacggctgggtgtgggacaccgtgggctgcgtgtgggacgggtttagcggcagcctcttcggttggatcagccagcttcaggcagccactagggaagccagagcctccatgggtccagtgcagcaaggcactatctgcatgcagcttcgttgtgtggaagatcttcagacaattcaagtgatcaagattttaaaatatgaaaagaaactggccaaaatgtgctttttaatgatattcaccttcctggtctgttggatgccttatatcgtgatctgcttcttggtggttaatggtcatggtcacctggtcactccaacaatatctattgtttcgtacctctttgctaaatcgaacactgtatacaatccagtgatttatgtcttcatgatcagaaagtttcgaagatcccttttgcagcttctgtgcctccgactgctgaggtgccagaggcctgctaaagacctaccagcagctggaagtgaaatgcagatcagacccattgtgatgtcacagaaagatggggacaggccaaagaaaaaagtgactttcaactcttcttccatcatttttatcatcaccagtgatgaatcactgtcagttgacgacagcgacaaaaccaatgggtccaaagttgatgtaatccaagttcgtcctttgtaggaatgaagaatggcaacgaaagatggggccttaaattggatgccacttttggactttcatcataagaagtgtctggaatacccgttctatgtaatatcaacagaaccttgtggtccagcaggaaatccgaattgcccatatgctcttgggcctcaggaagaggttgaacaaaaacaaattcttttaattcaacgggtgctttacataatgaaaaaaccacttgtggcacacgatgggcatctaacatcatcatcttctaatgtgttggagattttcatttcaaatatattttttaaattactctattttccaaaacacgtaatgcatttttctcgaaaataccttactgtaaaaataactgtcgcgtacacatgtgtgaagtagctagaacatactgaattttttttgtactgttggactctattcagtgtcatgtcctatatctgatcaagttatcaaggagataattctagaatgaaaaagaaaatcctcttgttggaaacaaaagacgttttatatgtgcagtatgacaaagaggagtttcagagacaactttgaatccttgtcagcctggagaccagcaccagaggaatctacaaggcaaactcccatatatttgcttcccccaaattgctgcccctacagactcaaagctctttttctttgttttgttgtttctctaaaaatttactgttctttgtcgatgctatataagccagggagttctaagacgccagctctttgagatttgctcattcccctgtatttcccacatatatattacatatacccgctaataaatttatgtttgtttttctcttgtcaatctgtcttttgttataggggccccagccaaggaacctaaagtgggtagaaggaaaaattattttttctttccctacaaactgaacatggattattagaactcaaggttttcattgacaatatagaaaagaaacactgaatcattttattttattgcccaatttttatttcttatatgactctagtgtttcatcttcataattaatcatgtttgaaggatttctgagtgactcagcagcctgttaaagaaggatgaaccaaagaaaacatttcactaaatgtgcttttaaaaatcaagtgtattgctggttctgctgcagtatgtagtcgaagaataaattagtaaattgcttctgagggtctgaaattgaataaagtaatggctttgtatttctataaaagttgtctccccttgtttcctttccattctggcacatgtagacatttaattta

SEQ ID NO: 21113 - DNA, 2620 bp, Homo sapiens
  source 1..2620: mol_type = unassigned DNA
atggctagagcaggcggcggagccccaaccccacccagtgcggagcgcgccgcgagccccgccgcaagctgagcgcctccgcccgccaggcgcgccggcgccgggccatgtactcggggaaccgcagcggcggccacggctactgggacggcggcggggccgcgggcgctgaggggccggcgccggcggggacactgagccccgcgcccctcttcagccccggcacctacgagcgcctggcgctgctgctgggctccattgggctgctgggcgtcggcaacaacctgctggtgctcgtcctctactacaagttccagcggctccgcactcccactcacctcctcctggtcaacatcagcctcagcgacctgctggtgtccctcttcggggtcacctttaccttcgtgtcctgcctgaggaacggctgggtgtgggacaccgtgggctgcgtgtgggacgggtttagcggcagcctcttcgggattgtttccattgccaccctaaccgtgctggcctatgaacgttacattcgcgtggtccatgccagagtgatcaatttttcctgggcctggagggccattacctacatctggctctactcactggcgtgggcaggagcacctctcctgggatggaacaggtacatcctggacgtacacggactaggctgcactgtggactggaaatccaaggatgccaacgattcctcctttgtgcttttcttatttcttggctgcctggtggtgcccctgggtgtcatagcccattgctatggccatattctatattccattcgaatgcttcgttgtgtggaagatcttcagacaattcaagtgatcaagattttaaaatatgaaaagaaactggccaaaatgtgctttttaatgatattcaccttcctggtctgttggatgccttatatcgtgatctgcttcttggtggttaatggtcatggtcacctggtcactccaacaatatctattgtttcgtacctctttgctaaatcgaacactgtatacaatccagtgatttatgtcttcatgatcagaaagtttcgaagatcccttttgcagcttctgtgcctccgactgctgaggtgccagaggcctgctaaagacctaccagcagctggaagtgaaatgcagatcagacccattgtgatgtcacagaaagatggggacaggccaaagaaaaaagtgactttcaactcttcttccatcatttttatcatcaccagtgatgaatcactgtcagttgacgacagcgacaaaaccaatgggtccaaagttgatgtaatccaagttcgtcctttgtaggaatgaagaatggcaacgaaagatggggccttaaattggatgccacttttggactttcatcataagaagtgtctggaatacccgttctatgtaatatcaacagaaccttgtggtccagcaggaaatccgaattgcccatatgctcttgggcctcaggaagaggttgaacaaaaacaaattcttttaattcaacgggtgctttacataatgaaaaaaccacttgtggcacacgatgggcatctaacatcatcatcttctaatgtgttggagattttcatttcaaatatattttttaaattactctattttccaaaacacgtaatgcatttttctcgaaaataccttactgtaaaaataactgtcgcgtacacatgtgtgaagtagctagaacatactgaattttttttgtactgttggactctattcagtgtcatgtcctatatctgatcaagttatcaaggagataattctagaatgaaaaagaaaatcctcttgttggaaacaaaagacgttttatatgtgcagtatgacaaagaggagtttcagagacaactttgaatccttgtcagcctggagaccagcaccagaggaatctacaaggcaaactcccatatatttgcttcccccaaattgctgcccctacagactcaaagctctttttctttgttttgttgtttctctaaaaatttactgttctttgtcgatgctatataagccagggagttctaagacgccagctctttgagatttgctcattcccctgtatttcccacatatatattacatatacccgctaataaatttatgtttgtttttctcttgtcaatctgtcttttgttataggggccccagccaaggaacctaaagtgggtagaaggaaaaattattttttctttccctacaaactgaacatggattattagaactcaaggttttcattgacaatatagaaaagaaacactgaatcattttattttattgcccaatttttatttcttatatgactctagtgtttcatcttcataattaatcatgtttgaaggatttctgagtgactcagcagcctgttaaagaaggatgaaccaaagaaaacatttcactaaatgtgcttttaaaaatcaagtgtattgctggttctgctgcagtatgtagtcgaagaataaattagtaaattgcttctgagggtctgaaattgaataaagtaatggctttgtatttctataaaagttgtctccccttgtttcctttccattctggcacatgtagacatttaatttatgaataaaaccctttcctgtccttca

SEQ ID NO: 21114 - DNA, 6330 bp, Homo sapiens
  source 1..6330: mol_type = unassigned DNA
gtgctgcccgcctagaaagggtgaagtggttgtttccgtgacggactgagtacgggtgcctgtcaggctcttgcggaagtccatgcgccattgggagggcctcggccgcggctctgtgcccttgctgctgagggccacttcctgggtcattcctggaccgggagccgggctggggctcacacgggggctcccgcgtggccgtctcggcgcctgcgtgacctccccgccggcgggatgtggcgactacgtcgggccgctgtggcctgtgaggtctgccagtctttagtgaaacacagctctggaataaaaggaagtttaccactacaaaaactacatctggtttcacgaagcatttatcattcacatcatcctaccttaaagcttcaacgaccccaattaaggacatcctttcagcagttctcttctctgacaaaccttcctttacgtaaactgaaattctctccaattaaatatggctaccagcctcgcaggaatttttggccagcaagattagctacgagactcttaaaacttcgctatctcatactaggatcggctgttgggggtggctacacagccaaaaagacttttgatcagtggaaagatatgataccggaccttagtgaatataaatggattgtgcctgacattgtgtgggaaattgatgagtatatcgattttggttctccggaagaaacggcgtttagagcaacagatcgtggatctgaaagtgacaagcattttagaaagggtctgcttggtgagctcattctcttacaacaacaaattcaagagcatgaagaggaagcgcgcagagccgctggccaatatagcacgagctatgcccaacagaagcgcaaggtgtcagacaaagagaaaattgaccaacttcaggaagaacttctgcacactcagttgaagtatcagagaatcttggaacgattagaaaaggagaacaaagaattgagaaaattagtattgcagaaagatgacaaaggcattcatcatagaaagcttaagaaatctttgattgacatgtattctgaagttcttgatgttctctctgattatgatgccagttataatacgcaagatcatctgccacgggttgttgtggttggagatcagagtgctggaaagactagtgtgttggaaatgattgcccaagctcgaatattcccaagaggatctggggagatgatgacacgttctccagttaaggtgactctgagtgaaggtcctcaccatgtggccctatttaaagatagttctcgggagtttgatcttaccaaagaagaagatcttgcagcattaagacatgaaatagaacttcgaatgaggaaaaatgtgaaagaaggctgtaccgttagccctgagaccatatccttaaatgtaaaaggccctggactacagaggatggtgcttgttgacttaccaggtgtgattaatactgtgacatcaggcatggctcctgacacaaaggaaactattttcagtatcagcaaagcttacatgcagaatcctaatgccatcatactgtgtattcaagatggatctgtggatgctgaacgcagtattgttacagacttggtcagtcaaatggaccctcatggaaggagaaccatattcgttttgaccaaagtagacctggcagagaaaaatgtagccagtccaagcaggattcagcagataattgaaggaaagctcttcccaatgaaagctttaggttattttgctgttgtaacaggaaaagggaacagctctgaaagcattgaagctataagagaatatgaagaagagttttttcagaattcaaagctcctaaagacaagcatgctaaaggcacaccaagtgactacaagaaatttaagccttgcagtatcagactgcttttggaaaatggtacgagagtctgttgaacaacaggctgatagtttcaaagcaacacgttttaaccttgaaactgaatggaagaataactatcctcgcctgcgggaacttgaccggaatgaactatttgaaaaagctaaaaatgaaatccttgatgaagttatcagtctgagccaggttacaccaaaacattgggaggaaatccttcaacaatctttgtgggaaagagtatcaactcatgtgattgaaaacatctaccttccagctgcgcagaccatgaattcaggaacttttaacaccacagtggatatcaagcttaaacagtggactgataaacaacttcctaataaagcagtagaggttgcttgggagaccctacaagaagaattttcccgctttatgacagaaccgaaagggaaagagcatgatgacatatttgataaacttaaagaggctgttaaggaagaaagtattaaacgacacaagtggaatgactttgcggaggacagcttgagggttattcaacacaatgctttggaagaccgatccatatctgataaacagcaatgggatgcagctatttattttatggaagaggctctgcaggctcgtctcaaggatactgaaaatgcaattgaaaacatggtgggtccagactggaaaaagaggtggttatactggaagaatcggacccaagaacagtgtgttcacaatgaaaccaagaatgaattggagaagatgttgaaatgtaatgaggagcacccagcttatcttgcaagtgatgaaataaccacagtccggaagaaccttgaatcccgaggagtagaagtagatccaagcttgattaaggatacttggcatcaagtttatagaagacattttttaaaaacagctctaaaccattgtaacctttgtcgaagaggtttttattactaccaaaggcattttgtagattctgagttggaatgcaatgatgtggtcttgttttggcgtatacagcgcatgcttgctatcaccgcaaatactttaaggcaacaacttacaaatactgaagttaggcgattagagaaaaatgttaaagaggtattggaagattttgctgaagatggtgagaagaagattaaattgcttactggtaaacgcgttcaactggcggaagacctcaagaaagttagagaaattcaagaaaaacttgatgctttcattgaagctcttcatcaggagaaataaattaaaatcgtactcataatcagctctgcatacatctgaagaacaaaaacatcaacgtcttttgtccagcctctttttcttctgctgttccacctttctaaacatacaataaagtcatgggataaaaataatcgatgtatgttacgggcgctttaaccatcagctgcctctcgaatggaagaacagtggtaatggattaacatcctattttgttgtactaaagtgacaaatcggaataatataattggtatggccattaggttcagtccttgaagataagaaacttgttctctgtttgttgtcttatttgtggtggcactcgtttaatggattaactgaggttgctcaatgttcagtttcttttccagaaatacaatgctaggtgttttgaaataaaacttatatagcaattgtttaaagttatcaattgtatataaaatcacagtagcctgctaaatcattgtatgtgtctgtagtattctattcccagaaactatttgaccatgataattcagtttatattcaccacatgaaagaaaaatgggtaacagaagaacccttaaaacaggttaatttggattgtaacgttcagtgaaagaaatttcaacccttcatagccagcgaagaaatttgccttggaagccaagtcagtaccagcttacctatttgattcagttgctgttttctcactctctatatccatttgaaattgatttattttagatgttgtatacttacgttaggctttctgttaatagtggtttttctcctgttgacagagccaccggattatgacacaggatgaggaagattaaggataatcaattgactaatttcatttagaatattatcaaacatttcaactaggtatcagaaaaaggctttctttcataagactattttaaatagaaattatttcaacaattaaagtaatgttgaccatccccctctcagctgaataaagaaaaatttagttcaatttattgcaatttaattacaatactaccttcacaacattttcatgtgttttaaataaatattttttaattggctaaaggacattcaagcaaagaaatgctttctttacttaaaatgtctatctcatttgctgccttttcactaagcctttactttgttaataaaagtgtccattgtgtgatgtttttgattttacagtttgctaaatcttattttcttggagttgctttttggtaacagccccattgctactccccattttattgttttacatcaatgcatgcttcgttgtgatccctcaagatgtaacacttggtatgctcggttgaggatatgaaaaaatacttccgaaaccaggaattcaatgtatgtttgttttatactgtttgataagaaaagtaggtccagccttaagcagcacagatgcgctggtagatgcatagtcaggaactttttttatttcttttaggtctagggacaggagtgaatagaaagggaggagagctctattatgttctatacacagattaggagatgaccttactgggtacacccctctaaccagtgcttacaggttaatgcatgttaatgaatatttttgcagttgtaaagcataacaattacaactacacatctatttctaaagaataaaacaggaccatatttatttacttctgtcaactatagaaagaaagaccttcagctgtatttccacagatttctcccaaggaaaaggctaatattagtcactactgttatcacatccctttgtataagttttaaaaagagatggagggagatcttcatttctttgaggagatcagtattgtaacgtatgtgaatagatgataacaattaatattactaaaagtcccacatgagagtcctgacgccctctccatgccccacagtaatgtggcttctttcatgggtttttttttcttctttttagctgatctcatcctaagcatgctttatttttccttgaaagctaggtatttatcaactgcagatgttattgaaagaaaataaaattcagtctcaagagtaaaccctgtgtcttgtgtctgtagttcaaaagtcagaaatgattctaatttaaacaaaaagatactaaatatacagaagttaaattcgaactagccacagaatcatttgtttttatgtcagaatttgcaaagagtggagtggacaaagctctgtatggaagactgaacaactgtaaatagatgatatccaaacttaatttggctaggacttcaattttaaaaatcagtgtacctaggcagtgcacagcacgaaataagtggcccttgcagcttccccgtttaacccactgtgctatagttgcgggtggaacagtcaacctttctagtagtttatgatattgccctctttgtattcccattttctacagttttttccgcagacttctttctgcaaattattcagcctccaaatgcaaatgaatgatataaaaataagtagggaacatggcagagagtggtgcttcccagcctcacaatgtgggaatttgacataggatgagagtcagagtataggtttaaaagataaaatctttagttaataattttgtatttatttattctagatgtatgtatctgaggaaagaaatctggtatttttgctttccaataaaggggatcaaagtaatggtttttctctcagttctctaagctggtctatgttatagctctagcagtatggaaatgtgctttaaaatatgcttaccttttgaatgatcatggctatatgttgttgagatatttgaaacttaccttgttttcacttgtgcactgtgaatgaactttgtattatttttttaaaaccttcacattacgtgtagatattattgcaacttatattttgcctgagcttgatcaaaggtcatttgtgtagatgagtaattaaaaaatatttaaatcacattataattctattattggagagcatcttttaaatttttttctgttttaacgagggaaagagaaacctgtatacctagggtcattatttgaccccatagtataaccagattcatggtctaacaagctctcagtgtggcttttctctgaatgcttgaatttcacatgccttgcatttcacagttgtactccatggtcaaccggtgctttttttcacatcgtggtacttgtcaaaacattttgttattttccttggtaaaatatataaaaaaggttttctaatttc

SEQ ID NO: 21115 - DNA, 6492 bp, Homo sapiens
  source 1..6492: mol_type = unassigned DNA
gtgctgcccgcctagaaagggtgaagtggttgtttccgtgacggactgagtacgggtgcctgtcaggctcttgcggaagtccatgcgccattgggagggcctcggccgcggctctgtgcccttgctgctgagggccacttcctgggtcattcctggaccgggagccgggctggggctcacacgggggctcccgcgtggccgtctcggcgcctgcgtgacctccccgccggcgggatgtggcgactacgtcgggccgctgtggcctgtgaggtctgccagtctttagtgaaacacagctctggaataaaaggaagtttaccactacaaaaactacatctggtttcacgaagcatttatcattcacatcatcctaccttaaagcttcaacgaccccaattaaggacatcctttcagcagttctcttctctgacaaaccttcctttacgtaaactgaaattctctccaattaaatatggctaccagcctcgcaggaatttttggccagcaagattagctacgagactcttaaaacttcgctatctcatactaggatcggctgttgggggtggctacacagccaaaaagacttttgatcagtggaaagatatgataccggaccttagtgaatataaatggattgtgcctgacattgtgtgggaaattgatgagtatatcgattttgagaaaattagaaaagcccttcctagttcagaagaccttgtaaagttagcaccagactttgacaagattgttgaaagccttagcttattgaaggacttttttacctcaggtcacaaattggttagtgaagtcataggagcttctgacctacttctcttgttaggttctccggaagaaacggcgtttagagcaacagatcgtggatctgaaagtgacaagcattttagaaagggtctgcttggtgagctcattctcttacaacaacaaattcaagagcatgaagaggaagcgcgcagagccgctggccaatatagcacgagctatgcccaacagaagcgcaaggtgtcagacaaagagaaaattgaccaacttcaggaagaacttctgcacactcagttgaagtatcagagaatcttggaacgattagaaaaggagaacaaagaattgagaaaattagtattgcagaaagatgacaaaggcattcatcatagaaagcttaagaaatctttgattgacatgtattctgaagttcttgatgttctctctgattatgatgccagttataatacgcaagatcatctgccacgggttgttgtggttggagatcagagtgctggaaagactagtgtgttggaaatgattgcccaagctcgaatattcccaagaggatctggggagatgatgacacgttctccagttaaggtgactctgagtgaaggtcctcaccatgtggccctatttaaagatagttctcgggagtttgatcttaccaaagaagaagatcttgcagcattaagacatgaaatagaacttcgaatgaggaaaaatgtgaaagaaggctgtaccgttagccctgagaccatatccttaaatgtaaaaggccctggactacagaggatggtgcttgttgacttaccaggtgtgattaatactgtgacatcaggcatggctcctgacacaaaggaaactattttcagtatcagcaaagcttacatgcagaatcctaatgccatcatactgtgtattcaagatggatctgtggatgctgaacgcagtattgttacagacttggtcagtcaaatggaccctcatggaaggagaaccatattcgttttgaccaaagtagacctggcagagaaaaatgtagccagtccaagcaggattcagcagataattgaaggaaagctcttcccaatgaaagctttaggttattttgctgttgtaacaggaaaagggaacagctctgaaagcattgaagctataagagaatatgaagaagagttttttcagaattcaaagctcctaaagacaagcatgctaaaggcacaccaagtgactacaagaaatttaagccttgcagtatcagactgcttttggaaaatggtacgagagtctgttgaacaacaggctgatagtttcaaagcaacacgttttaaccttgaaactgaatggaagaataactatcctcgcctgcgggaacttgaccggaatgaactatttgaaaaagctaaaaatgaaatccttgatgaagttatcagtctgagccaggttacaccaaaacattgggaggaaatccttcaacaatctttgtgggaaagagtatcaactcatgtgattgaaaacatctaccttccagctgcgcagaccatgaattcaggaacttttaacaccacagtggatatcaagcttaaacagtggactgataaacaacttcctaataaagcagtagaggttgcttgggagaccctacaagaagaattttcccgctttatgacagaaccgaaagggaaagagcatgatgacatatttgataaacttaaagaggctgttaaggaagaaagtattaaacgacacaagtggaatgactttgcggaggacagcttgagggttattcaacacaatgctttggaagaccgatccatatctgataaacagcaatgggatgcagctatttattttatggaagaggctctgcaggctcgtctcaaggatactgaaaatgcaattgaaaacatggtgggtccagactggaaaaagaggtggttatactggaagaatcggacccaagaacagtgtgttcacaatgaaaccaagaatgaattggagaagatgttgaaatgtaatgaggagcacccagcttatcttgcaagtgatgaaataaccacagtccggaagaaccttgaatcccgaggagtagaagtagatccaagcttgattaaggatacttggcatcaagtttatagaagacattttttaaaaacagctctaaaccattgtaacctttgtcgaagaggtttttattactaccaaaggcattttgtagattctgagttggaatgcaatgatgtggtcttgttttggcgtatacagcgcatgcttgctatcaccgcaaatactttaaggcaacaacttacaaatactgaagttaggcgattagagaaaaatgttaaagaggtattggaagattttgctgaagatggtgagaagaagattaaattgcttactggtaaacgcgttcaactggcggaagacctcaagaaagttagagaaattcaagaaaaacttgatgctttcattgaagctcttcatcaggagaaataaattaaaatcgtactcataatcagctctgcatacatctgaagaacaaaaacatcaacgtcttttgtccagcctctttttcttctgctgttccacctttctaaacatacaataaagtcatgggataaaaataatcgatgtatgttacgggcgctttaaccatcagctgcctctcgaatggaagaacagtggtaatggattaacatcctattttgttgtactaaagtgacaaatcggaataatataattggtatggccattaggttcagtccttgaagataagaaacttgttctctgtttgttgtcttatttgtggtggcactcgtttaatggattaactgaggttgctcaatgttcagtttcttttccagaaatacaatgctaggtgttttgaaataaaacttatatagcaattgtttaaagttatcaattgtatataaaatcacagtagcctgctaaatcattgtatgtgtctgtagtattctattcccagaaactatttgaccatgataattcagtttatattcaccacatgaaagaaaaatgggtaacagaagaacccttaaaacaggttaatttggattgtaacgttcagtgaaagaaatttcaacccttcatagccagcgaagaaatttgccttggaagccaagtcagtaccagcttacctatttgattcagttgctgttttctcactctctatatccatttgaaattgatttattttagatgttgtatacttacgttaggctttctgttaatagtggtttttctcctgttgacagagccaccggattatgacacaggatgaggaagattaaggataatcaattgactaatttcatttagaatattatcaaacatttcaactaggtatcagaaaaaggctttctttcataagactattttaaatagaaattatttcaacaattaaagtaatgttgaccatccccctctcagctgaataaagaaaaatttagttcaatttattgcaatttaattacaatactaccttcacaacattttcatgtgttttaaataaatattttttaattggctaaaggacattcaagcaaagaaatgctttctttacttaaaatgtctatctcatttgctgccttttcactaagcctttactttgttaataaaagtgtccattgtgtgatgtttttgattttacagtttgctaaatcttattttcttggagttgctttttggtaacagccccattgctactccccattttattgttttacatcaatgcatgcttcgttgtgatccctcaagatgtaacacttggtatgctcggttgaggatatgaaaaaatacttccgaaaccaggaattcaatgtatgtttgttttatactgtttgataagaaaagtaggtccagccttaagcagcacagatgcgctggtagatgcatagtcaggaactttttttatttcttttaggtctagggacaggagtgaatagaaagggaggagagctctattatgttctatacacagattaggagatgaccttactgggtacacccctctaaccagtgcttacaggttaatgcatgttaatgaatatttttgcagttgtaaagcataacaattacaactacacatctatttctaaagaataaaacaggaccatatttatttacttctgtcaactatagaaagaaagaccttcagctgtatttccacagatttctcccaaggaaaaggctaatattagtcactactgttatcacatccctttgtataagttttaaaaagagatggagggagatcttcatttctttgaggagatcagtattgtaacgtatgtgaatagatgataacaattaatattactaaaagtcccacatgagagtcctgacgccctctccatgccccacagtaatgtggcttctttcatgggtttttttttcttctttttagctgatctcatcctaagcatgctttatttttccttgaaagctaggtatttatcaactgcagatgttattgaaagaaaataaaattcagtctcaagagtaaaccctgtgtcttgtgtctgtagttcaaaagtcagaaatgattctaatttaaacaaaaagatactaaatatacagaagttaaattcgaactagccacagaatcatttgtttttatgtcagaatttgcaaagagtggagtggacaaagctctgtatggaagactgaacaactgtaaatagatgatatccaaacttaatttggctaggacttcaattttaaaaatcagtgtacctaggcagtgcacagcacgaaataagtggcccttgcagcttccccgtttaacccactgtgctatagttgcgggtggaacagtcaacctttctagtagtttatgatattgccctctttgtattcccattttctacagttttttccgcagacttctttctgcaaattattcagcctccaaatgcaaatgaatgatataaaaataagtagggaacatggcagagagtggtgcttcccagcctcacaatgtgggaatttgacataggatgagagtcagagtataggtttaaaagataaaatctttagttaataattttgtatttatttattctagatgtatgtatctgaggaaagaaatctggtatttttgctttccaataaaggggatcaaagtaatggtttttctctcagttctctaagctggtctatgttatagctctagcagtatggaaatgtgctttaaaatatgcttaccttttgaatgatcatggctatatgttgttgagatatttgaaacttaccttgttttcacttgtgcactgtgaatgaactttgtattatttttttaaaaccttcacattacgtgtagatattattgcaacttatattttgcctgagcttgatcaaaggtcatttgtgtagatgagtaattaaaaaatatttaaatcacattataattctattattggagagcatcttttaaatttttttctgttttaacgagggaaagagaaacctgtatacctagggtcattatttgaccccatagtataaccagattcatggtctaacaagctctcagtgtggcttttctctgaatgcttgaatttcacatgccttgcatttcacagttgtactccatggtcaaccggtgctttttttcacatcgtggtacttgtcaaaacattttgttattttccttggtaaaatatataaaaaaggttttctaatttc

SEQ ID NO: 21116 - DNA, 6384 bp, Homo sapiens
  source 1..6384: mol_type = unassigned DNA
gtgctgcccgcctagaaagggtgaagtggttgtttccgtgacggactgagtacgggtgcctgtcaggctcttgcggaagtccatgcgccattgggagggcctcggccgcggctctgtgcccttgctgctgagggccacttcctgggtcattcctggaccgggagccgggctggggctcacacgggggctcccgcgtggccgtctcggcgcctgcgtgacctccccgccggcgggatgtggcgactacgtcgggccgctgtggcctgtgaggtctgccagtctttagtgaaacacagctctggaataaaaggaagtttaccactacaaaaactacatctggtttcacgaagcatttatcattcacatcatcctaccttaaagcttcaacgaccccaattaaggacatcctttcagcagttctcttctctgacaaaccttcctttacgtaaactgaaattctctccaattaaatatggctaccagcctcgcaggaatttttggccagcaagattagctacgagactcttaaaacttcgctatctcatactaggatcggctgttgggggtggctacacagccaaaaagacttttgatcagtggaaagatatgataccggaccttagtgaatataaatggattgtgcctgacattgtgtgggaaattgatgagtatatcgattttggtcacaaattggttagtgaagtcataggagcttctgacctacttctcttgttaggttctccggaagaaacggcgtttagagcaacagatcgtggatctgaaagtgacaagcattttagaaagggtctgcttggtgagctcattctcttacaacaacaaattcaagagcatgaagaggaagcgcgcagagccgctggccaatatagcacgagctatgcccaacagaagcgcaaggtgtcagacaaagagaaaattgaccaacttcaggaagaacttctgcacactcagttgaagtatcagagaatcttggaacgattagaaaaggagaacaaagaattgagaaaattagtattgcagaaagatgacaaaggcattcatcatagaaagcttaagaaatctttgattgacatgtattctgaagttcttgatgttctctctgattatgatgccagttataatacgcaagatcatctgccacgggttgttgtggttggagatcagagtgctggaaagactagtgtgttggaaatgattgcccaagctcgaatattcccaagaggatctggggagatgatgacacgttctccagttaaggtgactctgagtgaaggtcctcaccatgtggccctatttaaagatagttctcgggagtttgatcttaccaaagaagaagatcttgcagcattaagacatgaaatagaacttcgaatgaggaaaaatgtgaaagaaggctgtaccgttagccctgagaccatatccttaaatgtaaaaggccctggactacagaggatggtgcttgttgacttaccaggtgtgattaatactgtgacatcaggcatggctcctgacacaaaggaaactattttcagtatcagcaaagcttacatgcagaatcctaatgccatcatactgtgtattcaagatggatctgtggatgctgaacgcagtattgttacagacttggtcagtcaaatggaccctcatggaaggagaaccatattcgttttgaccaaagtagacctggcagagaaaaatgtagccagtccaagcaggattcagcagataattgaaggaaagctcttcccaatgaaagctttaggttattttgctgttgtaacaggaaaagggaacagctctgaaagcattgaagctataagagaatatgaagaagagttttttcagaattcaaagctcctaaagacaagcatgctaaaggcacaccaagtgactacaagaaatttaagccttgcagtatcagactgcttttggaaaatggtacgagagtctgttgaacaacaggctgatagtttcaaagcaacacgttttaaccttgaaactgaatggaagaataactatcctcgcctgcgggaacttgaccggaatgaactatttgaaaaagctaaaaatgaaatccttgatgaagttatcagtctgagccaggttacaccaaaacattgggaggaaatccttcaacaatctttgtgggaaagagtatcaactcatgtgattgaaaacatctaccttccagctgcgcagaccatgaattcaggaacttttaacaccacagtggatatcaagcttaaacagtggactgataaacaacttcctaataaagcagtagaggttgcttgggagaccctacaagaagaattttcccgctttatgacagaaccgaaagggaaagagcatgatgacatatttgataaacttaaagaggctgttaaggaagaaagtattaaacgacacaagtggaatgactttgcggaggacagcttgagggttattcaacacaatgctttggaagaccgatccatatctgataaacagcaatgggatgcagctatttattttatggaagaggctctgcaggctcgtctcaaggatactgaaaatgcaattgaaaacatggtgggtccagactggaaaaagaggtggttatactggaagaatcggacccaagaacagtgtgttcacaatgaaaccaagaatgaattggagaagatgttgaaatgtaatgaggagcacccagcttatcttgcaagtgatgaaataaccacagtccggaagaaccttgaatcccgaggagtagaagtagatccaagcttgattaaggatacttggcatcaagtttatagaagacattttttaaaaacagctctaaaccattgtaacctttgtcgaagaggtttttattactaccaaaggcattttgtagattctgagttggaatgcaatgatgtggtcttgttttggcgtatacagcgcatgcttgctatcaccgcaaatactttaaggcaacaacttacaaatactgaagttaggcgattagagaaaaatgttaaagaggtattggaagattttgctgaagatggtgagaagaagattaaattgcttactggtaaacgcgttcaactggcggaagacctcaagaaagttagagaaattcaagaaaaacttgatgctttcattgaagctcttcatcaggagaaataaattaaaatcgtactcataatcagctctgcatacatctgaagaacaaaaacatcaacgtcttttgtccagcctctttttcttctgctgttccacctttctaaacatacaataaagtcatgggataaaaataatcgatgtatgttacgggcgctttaaccatcagctgcctctcgaatggaagaacagtggtaatggattaacatcctattttgttgtactaaagtgacaaatcggaataatataattggtatggccattaggttcagtccttgaagataagaaacttgttctctgtttgttgtcttatttgtggtggcactcgtttaatggattaactgaggttgctcaatgttcagtttcttttccagaaatacaatgctaggtgttttgaaataaaacttatatagcaattgtttaaagttatcaattgtatataaaatcacagtagcctgctaaatcattgtatgtgtctgtagtattctattcccagaaactatttgaccatgataattcagtttatattcaccacatgaaagaaaaatgggtaacagaagaacccttaaaacaggttaatttggattgtaacgttcagtgaaagaaatttcaacccttcatagccagcgaagaaatttgccttggaagccaagtcagtaccagcttacctatttgattcagttgctgttttctcactctctatatccatttgaaattgatttattttagatgttgtatacttacgttaggctttctgttaatagtggtttttctcctgttgacagagccaccggattatgacacaggatgaggaagattaaggataatcaattgactaatttcatttagaatattatcaaacatttcaactaggtatcagaaaaaggctttctttcataagactattttaaatagaaattatttcaacaattaaagtaatgttgaccatccccctctcagctgaataaagaaaaatttagttcaatttattgcaatttaattacaatactaccttcacaacattttcatgtgttttaaataaatattttttaattggctaaaggacattcaagcaaagaaatgctttctttacttaaaatgtctatctcatttgctgccttttcactaagcctttactttgttaataaaagtgtccattgtgtgatgtttttgattttacagtttgctaaatcttattttcttggagttgctttttggtaacagccccattgctactccccattttattgttttacatcaatgcatgcttcgttgtgatccctcaagatgtaacacttggtatgctcggttgaggatatgaaaaaatacttccgaaaccaggaattcaatgtatgtttgttttatactgtttgataagaaaagtaggtccagccttaagcagcacagatgcgctggtagatgcatagtcaggaactttttttatttcttttaggtctagggacaggagtgaatagaaagggaggagagctctattatgttctatacacagattaggagatgaccttactgggtacacccctctaaccagtgcttacaggttaatgcatgttaatgaatatttttgcagttgtaaagcataacaattacaactacacatctatttctaaagaataaaacaggaccatatttatttacttctgtcaactatagaaagaaagaccttcagctgtatttccacagatttctcccaaggaaaaggctaatattagtcactactgttatcacatccctttgtataagttttaaaaagagatggagggagatcttcatttctttgaggagatcagtattgtaacgtatgtgaatagatgataacaattaatattactaaaagtcccacatgagagtcctgacgccctctccatgccccacagtaatgtggcttctttcatgggtttttttttcttctttttagctgatctcatcctaagcatgctttatttttccttgaaagctaggtatttatcaactgcagatgttattgaaagaaaataaaattcagtctcaagagtaaaccctgtgtcttgtgtctgtagttcaaaagtcagaaatgattctaatttaaacaaaaagatactaaatatacagaagttaaattcgaactagccacagaatcatttgtttttatgtcagaatttgcaaagagtggagtggacaaagctctgtatggaagactgaacaactgtaaatagatgatatccaaacttaatttggctaggacttcaattttaaaaatcagtgtacctaggcagtgcacagcacgaaataagtggcccttgcagcttccccgtttaacccactgtgctatagttgcgggtggaacagtcaacctttctagtagtttatgatattgccctctttgtattcccattttctacagttttttccgcagacttctttctgcaaattattcagcctccaaatgcaaatgaatgatataaaaataagtagggaacatggcagagagtggtgcttcccagcctcacaatgtgggaatttgacataggatgagagtcagagtataggtttaaaagataaaatctttagttaataattttgtatttatttattctagatgtatgtatctgaggaaagaaatctggtatttttgctttccaataaaggggatcaaagtaatggtttttctctcagttctctaagctggtctatgttatagctctagcagtatggaaatgtgctttaaaatatgcttaccttttgaatgatcatggctatatgttgttgagatatttgaaacttaccttgttttcacttgtgcactgtgaatgaactttgtattatttttttaaaaccttcacattacgtgtagatattattgcaacttatattttgcctgagcttgatcaaaggtcatttgtgtagatgagtaattaaaaaatatttaaatcacattataattctattattggagagcatcttttaaatttttttctgttttaacgagggaaagagaaacctgtatacctagggtcattatttgaccccatagtataaccagattcatggtctaacaagctctcagtgtggcttttctctgaatgcttgaatttcacatgccttgcatttcacagttgtactccatggtcaaccggtgctttttttcacatcgtggtacttgtcaaaacattttgttattttccttggtaaaatatataaaaaaggttttctaatttc

SEQ ID NO: 21117 - DNA, 6381 bp, Homo sapiens
  source 1..6381: mol_type = unassigned DNA
gtgctgcccgcctagaaagggtgaagtggttgtttccgtgacggactgagtacgggtgcctgtcaggctcttgcggaagtccatgcgccattgggagggcctcggccgcggctctgtgcccttgctgctgagggccacttcctgggtcattcctggaccgggagccgggctggggctcacacgggggctcccgcgtggccgtctcggcgcctgcgtgacctccccgccggcgggatgtggcgactacgtcgggccgctgtggcctgtgaggtctgccagtctttagtgaaacacagctctggaataaaaggaagtttaccactacaaaaactacatctggtttcacgaagcatttatcattcacatcatcctaccttaaagcttcaacgaccccaattaaggacatcctttcagcagttctcttctctgacaaaccttcctttacgtaaactgaaattctctccaattaaatatggctaccagcctcgcaggaatttttggccagcaagattagctacgagactcttaaaacttcgctatctcatactaggatcggctgttgggggtggctacacagccaaaaagacttttgatcagtggaaagatatgataccggaccttagtgaatataaatggattgtgcctgacattgtgtgggaaattgatgagtatatcgattttgagaaaattagaaaagcccttcctagttcagaagaccttgtaaagttagcaccagactttgacaagattgttgaaagccttagcttattgaaggacttttttacctcaggtcacaaattggttagtgaagtcataggagcttctgacctacttctcttgttaggttctccggaagaaacggcgtttagagcaacagatcgtggatctgaaagtgacaagcattttagaaaggtgtcagacaaagagaaaattgaccaacttcaggaagaacttctgcacactcagttgaagtatcagagaatcttggaacgattagaaaaggagaacaaagaattgagaaaattagtattgcagaaagatgacaaaggcattcatcatagaaagcttaagaaatctttgattgacatgtattctgaagttcttgatgttctctctgattatgatgccagttataatacgcaagatcatctgccacgggttgttgtggttggagatcagagtgctggaaagactagtgtgttggaaatgattgcccaagctcgaatattcccaagaggatctggggagatgatgacacgttctccagttaaggtgactctgagtgaaggtcctcaccatgtggccctatttaaagatagttctcgggagtttgatcttaccaaagaagaagatcttgcagcattaagacatgaaatagaacttcgaatgaggaaaaatgtgaaagaaggctgtaccgttagccctgagaccatatccttaaatgtaaaaggccctggactacagaggatggtgcttgttgacttaccaggtgtgattaatactgtgacatcaggcatggctcctgacacaaaggaaactattttcagtatcagcaaagcttacatgcagaatcctaatgccatcatactgtgtattcaagatggatctgtggatgctgaacgcagtattgttacagacttggtcagtcaaatggaccctcatggaaggagaaccatattcgttttgaccaaagtagacctggcagagaaaaatgtagccagtccaagcaggattcagcagataattgaaggaaagctcttcccaatgaaagctttaggttattttgctgttgtaacaggaaaagggaacagctctgaaagcattgaagctataagagaatatgaagaagagttttttcagaattcaaagctcctaaagacaagcatgctaaaggcacaccaagtgactacaagaaatttaagccttgcagtatcagactgcttttggaaaatggtacgagagtctgttgaacaacaggctgatagtttcaaagcaacacgttttaaccttgaaactgaatggaagaataactatcctcgcctgcgggaacttgaccggaatgaactatttgaaaaagctaaaaatgaaatccttgatgaagttatcagtctgagccaggttacaccaaaacattgggaggaaatccttcaacaatctttgtgggaaagagtatcaactcatgtgattgaaaacatctaccttccagctgcgcagaccatgaattcaggaacttttaacaccacagtggatatcaagcttaaacagtggactgataaacaacttcctaataaagcagtagaggttgcttgggagaccctacaagaagaattttcccgctttatgacagaaccgaaagggaaagagcatgatgacatatttgataaacttaaagaggctgttaaggaagaaagtattaaacgacacaagtggaatgactttgcggaggacagcttgagggttattcaacacaatgctttggaagaccgatccatatctgataaacagcaatgggatgcagctatttattttatggaagaggctctgcaggctcgtctcaaggatactgaaaatgcaattgaaaacatggtgggtccagactggaaaaagaggtggttatactggaagaatcggacccaagaacagtgtgttcacaatgaaaccaagaatgaattggagaagatgttgaaatgtaatgaggagcacccagcttatcttgcaagtgatgaaataaccacagtccggaagaaccttgaatcccgaggagtagaagtagatccaagcttgattaaggatacttggcatcaagtttatagaagacattttttaaaaacagctctaaaccattgtaacctttgtcgaagaggtttttattactaccaaaggcattttgtagattctgagttggaatgcaatgatgtggtcttgttttggcgtatacagcgcatgcttgctatcaccgcaaatactttaaggcaacaacttacaaatactgaagttaggcgattagagaaaaatgttaaagaggtattggaagattttgctgaagatggtgagaagaagattaaattgcttactggtaaacgcgttcaactggcggaagacctcaagaaagttagagaaattcaagaaaaacttgatgctttcattgaagctcttcatcaggagaaataaattaaaatcgtactcataatcagctctgcatacatctgaagaacaaaaacatcaacgtcttttgtccagcctctttttcttctgctgttccacctttctaaacatacaataaagtcatgggataaaaataatcgatgtatgttacgggcgctttaaccatcagctgcctctcgaatggaagaacagtggtaatggattaacatcctattttgttgtactaaagtgacaaatcggaataatataattggtatggccattaggttcagtccttgaagataagaaacttgttctctgtttgttgtcttatttgtggtggcactcgtttaatggattaactgaggttgctcaatgttcagtttcttttccagaaatacaatgctaggtgttttgaaataaaacttatatagcaattgtttaaagttatcaattgtatataaaatcacagtagcctgctaaatcattgtatgtgtctgtagtattctattcccagaaactatttgaccatgataattcagtttatattcaccacatgaaagaaaaatgggtaacagaagaacccttaaaacaggttaatttggattgtaacgttcagtgaaagaaatttcaacccttcatagccagcgaagaaatttgccttggaagccaagtcagtaccagcttacctatttgattcagttgctgttttctcactctctatatccatttgaaattgatttattttagatgttgtatacttacgttaggctttctgttaatagtggtttttctcctgttgacagagccaccggattatgacacaggatgaggaagattaaggataatcaattgactaatttcatttagaatattatcaaacatttcaactaggtatcagaaaaaggctttctttcataagactattttaaatagaaattatttcaacaattaaagtaatgttgaccatccccctctcagctgaataaagaaaaatttagttcaatttattgcaatttaattacaatactaccttcacaacattttcatgtgttttaaataaatattttttaattggctaaaggacattcaagcaaagaaatgctttctttacttaaaatgtctatctcatttgctgccttttcactaagcctttactttgttaataaaagtgtccattgtgtgatgtttttgattttacagtttgctaaatcttattttcttggagttgctttttggtaacagccccattgctactccccattttattgttttacatcaatgcatgcttcgttgtgatccctcaagatgtaacacttggtatgctcggttgaggatatgaaaaaatacttccgaaaccaggaattcaatgtatgtttgttttatactgtttgataagaaaagtaggtccagccttaagcagcacagatgcgctggtagatgcatagtcaggaactttttttatttcttttaggtctagggacaggagtgaatagaaagggaggagagctctattatgttctatacacagattaggagatgaccttactgggtacacccctctaaccagtgcttacaggttaatgcatgttaatgaatatttttgcagttgtaaagcataacaattacaactacacatctatttctaaagaataaaacaggaccatatttatttacttctgtcaactatagaaagaaagaccttcagctgtatttccacagatttctcccaaggaaaaggctaatattagtcactactgttatcacatccctttgtataagttttaaaaagagatggagggagatcttcatttctttgaggagatcagtattgtaacgtatgtgaatagatgataacaattaatattactaaaagtcccacatgagagtcctgacgccctctccatgccccacagtaatgtggcttctttcatgggtttttttttcttctttttagctgatctcatcctaagcatgctttatttttccttgaaagctaggtatttatcaactgcagatgttattgaaagaaaataaaattcagtctcaagagtaaaccctgtgtcttgtgtctgtagttcaaaagtcagaaatgattctaatttaaacaaaaagatactaaatatacagaagttaaattcgaactagccacagaatcatttgtttttatgtcagaatttgcaaagagtggagtggacaaagctctgtatggaagactgaacaactgtaaatagatgatatccaaacttaatttggctaggacttcaattttaaaaatcagtgtacctaggcagtgcacagcacgaaataagtggcccttgcagcttccccgtttaacccactgtgctatagttgcgggtggaacagtcaacctttctagtagtttatgatattgccctctttgtattcccattttctacagttttttccgcagacttctttctgcaaattattcagcctccaaatgcaaatgaatgatataaaaataagtagggaacatggcagagagtggtgcttcccagcctcacaatgtgggaatttgacataggatgagagtcagagtataggtttaaaagataaaatctttagttaataattttgtatttatttattctagatgtatgtatctgaggaaagaaatctggtatttttgctttccaataaaggggatcaaagtaatggtttttctctcagttctctaagctggtctatgttatagctctagcagtatggaaatgtgctttaaaatatgcttaccttttgaatgatcatggctatatgttgttgagatatttgaaacttaccttgttttcacttgtgcactgtgaatgaactttgtattatttttttaaaaccttcacattacgtgtagatattattgcaacttatattttgcctgagcttgatcaaaggtcatttgtgtagatgagtaattaaaaaatatttaaatcacattataattctattattggagagcatcttttaaatttttttctgttttaacgagggaaagagaaacctgtatacctagggtcattatttgaccccatagtataaccagattcatggtctaacaagctctcagtgtggcttttctctgaatgcttgaatttcacatgccttgcatttcacagttgtactccatggtcaaccggtgctttttttcacatcgtggtacttgtcaaaacattttgttattttccttggtaaaatatataaaaaaggttttctaatttc

SEQ ID NO: 21118 - DNA, 6439 bp, Homo sapiens
  source 1..6439: mol_type = unassigned DNA
gtgctgcccgcctagaaagggtgaagtggttgtttccgtgacggactgagtacgggtgcctgtcaggctcttgcggaagtccatgcgccattgggagggcctcggccgcggctctgtgcccttgctgctgagggccacttcctgggtcattcctggaccgggagccgggctggggctcacacgggggctcccgcgtggccgtctcggcgcctgcgtgacctccccgccggcgggatgtggcgactacgtcgggccgctgtggcctgtgaggtctgccagtctttagtgaaacacagctctggaataaaaggaagtttaccactacaaaaactacatctggtttcacgaagcatttatcattcacatcatcctaccttaaagcttcaacgaccccaattaaggacatcctttcagcagttctcttctctgacaaaccttcctttacgtaaactgaaattctctccaattaaatatggctaccagcctcgcaggaatttttggccagcaagattagctacgagactcttaaaacttcgctatctcatactaggatcggctgttgggggtggctacacagccaaaaagacttttgatcagtggaaagatatgataccggaccttagtgaatataaatggattgtgcctgacattgtgtgggaaattgatgagtatatcgattttgagaaaattagaaaagcccttcctagttcagaagaccttgtaaagttagcaccagactttgacaagattgttgaaagccttagcttattgaaggacttttttacctcaggttctccggaagaaacggcgtttagagcaacagatcgtggatctgaaagtgacaagcattttagaaagggtctgcttggtgagctcattctcttacaacaacaaattcaagagcatgaagaggaagcgcgcagagccgctggccaatatagcacgagctatgcccaacagaagcgcaaggtgtcagacaaagagaaaattgaccaacttcaggaagaacttctgcacactcagttgaagtatcagagaatcttggaacgattagaaaaggagaacaaagaattgagaaaattagtattgcagaaagatgacaaaggcattcatcatagaaagcttaagaaatctttgattgacatgtattctgaagttcttgatgttctctctgattatgatgccagttataatacgcaagatcatctgccacgggttgttgtggttggagatcagagtgctggaaagactagtgtgttggaaatgattgcccaagctcgaatattcccaagaggatctggggagatgatgacacgttctccagttaaggtgactctgagtgaaggtcctcaccatgtggccctatttaaagatagttctcgggagtttgatcttaccaaagaagaagatcttgcagcattaagacatgaaatagaacttcgaatgaggaaaaatgtgaaagaaggctgtaccgttagccctgagaccatatccttaaatgtaaaaggccctggactacagaggatggtgcttgttgacttaccaggtgtgattaatactgtgacatcaggcatggctcctgacacaaaggaaactattttcagtatcagcaaagcttacatgcagaatcctaatgccatcatactgtgtattcaagatggatctgtggatgctgaacgcagtattgttacagacttggtcagtcaaatggaccctcatggaaggagaaccatattcgttttgaccaaagtagacctggcagagaaaaatgtagccagtccaagcaggattcagcagataattgaaggaaagctcttcccaatgaaagctttaggttattttgctgttgtaacaggaaaagggaacagctctgaaagcattgaagctataagagaatatgaagaagagttttttcagaattcaaagctcctaaagacaagcatgctaaaggcacaccaagtgactacaagaaatttaagccttgcagtatcagactgcttttggaaaatggtacgagagtctgttgaacaacaggctgatagtttcaaagcaacacgttttaaccttgaaactgaatggaagaataactatcctcgcctgcgggaacttgaccggaatgaactatttgaaaaagctaaaaatgaaatccttgatgaagttatcagtctgagccaggttacaccaaaacattgggaggaaatccttcaacaatctttgtgggaaagagtatcaactcatgtgattgaaaacatctaccttccagctgcgcagaccatgaattcaggaacttttaacaccacagtggatatcaagcttaaacagtggactgataaacaacttcctaataaagcagtagaggttgcttgggagaccctacaagaagaattttcccgctttatgacagaaccgaaagggaaagagcatgatgacatatttgataaacttaaagaggctgttaaggaagaaagtattaaacgacacaagtggaatgactttgcggaggacagcttgagggttattcaacacaatgctttggaagaccgatccatatctgataaacagcaatgggatgcagctatttattttatggaagaggctctgcaggctcgtctcaaggatactgaaaatgcaattgaaaacatggtgggtccagactggaaaaagaggtggttatactggaagaatcggacccaagaacagtgtgttcacaatgaaaccaagaatgaattggagaagatgttgaaatgtaatgaggagcacccagcttatcttgcaagtgatgaaataaccacagtccggaagaaccttgaatcccgaggagtagaagtagatccaagcttgattaaggatacttggcatcaagtttatagaagacattttttaaaaacagctctaaaccattgtaacctttgtcgaagaggtttttattactaccaaaggcattttgtagattctgagttggaatgcaatgatgtggtcttgttttggcgtatacagcgcatgcttgctatcaccgcaaatactttaaggcaacaacttacaaatactgaagttaggcgattagagaaaaatgttaaagaggtattggaagattttgctgaagatggtgagaagaagattaaattgcttactggtaaacgcgttcaactggcggaagacctcaagaaagttagagaaattcaagaaaaacttgatgctttcattgaagctcttcatcaggagaaataaattaaaatcgtactcataatcagctctgcatacatctgaagaacaaaaacatcaacgtcttttgtccagcctctttttcttctgctgttccacctttctaaacatacaataaagtcatgggataaaaataatcgatgtatgttacgggcgctttaaccatcagctgcctctcgaatggaagaacagtggtaatggattaacatcctattttgttgtactaaagtgacaaatcggaataatataattggtatggccattaggttcagtccttgaagataagaaacttgttctctgtttgttgtcttatttgtggtggcactcgtttaatggattaactgaggttgctcaatgttcagtttcttttccagaaatacaatgctaggtgttttgaaataaaacttatatagcaattgtttaaagttatcaattgtatataaaatcacagtagcctgctaaatcattgtatgtgtctgtagtattctattcccagaaactatttgaccatgataattcagtttatattcaccacatgaaagaaaaatgggtaacagaagaacccttaaaacaggttaatttggattgtaacgttcagtgaaagaaatttcaacccttcatagccagcgaagaaatttgccttggaagccaagtcagtaccagcttacctatttgattcagttgctgttttctcactctctatatccatttgaaattgatttattttagatgttgtatacttacgttaggctttctgttaatagtggtttttctcctgttgacagagccaccggattatgacacaggatgaggaagattaaggataatcaattgactaatttcatttagaatattatcaaacatttcaactaggtatcagaaaaaggctttctttcataagactattttaaatagaaattatttcaacaattaaagtaatgttgaccatccccctctcagctgaataaagaaaaatttagttcaatttattgcaatttaattacaatactaccttcacaacattttcatgtgttttaaataaatattttttaattggctaaaggacattcaagcaaagaaatgctttctttacttaaaatgtctatctcatttgctgccttttcactaagcctttactttgttaataaaagtgtccattgtgtgatgtttttgattttacagtttgctaaatcttattttcttggagttgctttttggtaacagccccattgctactccccattttattgttttacatcaatgcatgcttcgttgtgatccctcaagatgtaacacttggtatgctcggttgaggatatgaaaaaatacttccgaaaccaggaattcaatgtatgtttgttttatactgtttgataagaaaagtaggtccagccttaagcagcacagatgcgctggtagatgcatagtcaggaactttttttatttcttttaggtctagggacaggagtgaatagaaagggaggagagctctattatgttctatacacagattaggagatgaccttactgggtacacccctctaaccagtgcttacaggttaatgcatgttaatgaatatttttgcagttgtaaagcataacaattacaactacacatctatttctaaagaataaaacaggaccatatttatttacttctgtcaactatagaaagaaagaccttcagctgtatttccacagatttctcccaaggaaaaggctaatattagtcactactgttatcacatccctttgtataagttttaaaaagagatggagggagatcttcatttctttgaggagatcagtattgtaacgtatgtgaatagatgataacaattaatattactaaaagtcccacatgagagtcctgacgccctctccatgccccacagtaatgtggcttctttcatgggtttttttttcttctttttagctgatctcatcctaagcatgctttatttttccttgaaagctaggtatttatcaactgcagatgttattgaaagaaaataaaattcagtctcaagagtaaaccctgtgtcttgtgtctgtagttcaaaagtcagaaatgattctaatttaaacaaaaagatactaaatatacagaagttaaattcgaactagccacagaatcatttgtttttatgtcagaatttgcaaagagtggagtggacaaagctctgtatggaagactgaacaactgtaaatagatgatatccaaacttaatttggctaggacttcaattttaaaaatcagtgtacctaggcagtgcacagcacgaaataagtggcccttgcagcttccccgtttaacccactgtgctatagttgcgggtggaacagtcaacctttctagtagtttatgatattgccctctttgtattcccattttctacagttttttccgcagacttctttctgcaaattattcagcctccaaatgcaaatgaatgatataaaaataagtagggaacatggcagagagtggtgcttcccagcctcacaatgtgggaatttgacataggatgagagtcagagtataggtttaaaagataaaatctttagttaataattttgtatttatttattctagatgtatgtatctgaggaaagaaatctggtatttttgctttccaataaaggggatcaaagtaatggtttttctctcagttctctaagctggtctatgttatagctctagcagtatggaaatgtgctttaaaatatgcttaccttttgaatgatcatggctatatgttgttgagatatttgaaacttaccttgttttcacttgtgcactgtgaatgaactttgtattatttttttaaaaccttcacattacgtgtagatattattgcaacttatattttgcctgagcttgatcaaaggtcatttgtgtagatgagtaattaaaaaatatttaaatcacattataattctattattggagagcatcttttaaatttttttctgttttaacgagggaaagagaaacctgtatacctagggtcattatttgaccccatagtataaccagattcatggtctaacaagctctcagtgtggcttttctctgaatgcttgaatttcacatgccttgcatttcacagttgtactccatggtcaaccggtgctttttttcacatcgtggtacttgtcaaaacattttgttattttccttggtaaaatatataaaaaaggttttctaatttca

SEQ ID NO: 21119 - DNA, 631 bp, Homo sapiens
  source 1..631: mol_type = unassigned DNA
ggccgcggctctgtgcccttgctgctgagggccacttcctgggtcattcctggaccgggagccgggctggggctcacacgggggctcccgcgtggccgtctcggcgcctgcgtgacctccccgccggcgggatgtggcgactacgtcgggccgctgtggcctgtgaggtctgccagtctttagtgaaacacagctctggaataaaaggaagtttaccactacaaaaactacatctggtttcacgaagcatttatcattcacatcatcctaccttaaagcttcaacgaccccaattaaggacatcctttcagcagttctcttctctgacaaaccttcctttacgtaaactgaaattctctccaattaaatatggctaccagcctcgcaggaatttttggccagcaagattagctacgagactcttaaaacttcgctatctcatactaggatcggctgttgggggtggctacacagccaaaaagacttttgatcagtggaaagatatgataccggaccttagtgaatataaatggattgtgcctgacattgtgtgggaaattgatgagtatatcgattttggttctccggaagaaacggcgtttagagcaacagatcgtggatctgaaagtga

SEQ ID NO: 21120 - DNA, 6340 bp, Homo sapiens
  source 1..6340: mol_type = unassigned DNA
gtgctgcccgcctagaaagggtgaagtggttgtttccgtgacggactgagtacgggtgcctgtcaggctcttgcggaagtccatgcgccattgggagggcctcggccgcggctctgtgcccttgctgctgagggccacttcctgggtcattcctggaccgggagccgggctggggctcacacgggggctcccgcgtggccgtctcggcgcctgcgtgacctccccgccggcgggatgtggcgactacgtcgggccgctgtggcctgtgaggtctgccagtctttagtgaaacacagctctggaataaaaggaagtttaccactacaaaaactacatctggtttcacgaagcatttatcattcacatcatcctaccttaaagcttcaacgaccccaattaaggacatcctttcagcagttctcttctctgacaaaccttcctttacgtaaactgaaattctctccaattaaatatggctaccagcctcgcaggaatttttggccagcaagattagctacgagactcttaaaacttcgctatctcatactaggatcggctgttgggggtggctacacagccaaaaagacttttgatcagtggaaagatatgataccggaccttagtgaatataaatggattgtgcctgacattgtgtgggaaattgatgagtatatcgattttgagaaaattagaaaagcccttcctagttcagaagaccttgtaaagttagcaccagactttgacaagattgttgaaagccttagcttattgaaggacttttttacctcaggttctccggaagaaacggcgtttagagcaacagatcgtggatctgaaagtgacaagcattttagaaaggtgtcagacaaagagaaaattgaccaacttcaggaagaacttctgcacactcagttgaagtatcagagaatcttggaacgattagaaaaggagaacaaagaattgagaaaattagtattgcagaaagatgacaaaggcattcatcatagaaagcttaagaaatctttgattgacatgtattctgaagttcttgatgttctctctgattatgatgccagttataatacgcaagatcatctgccacgggttgttgtggttggagatcagagtgctggaaagactagtgtgttggaaatgattgcccaagctcgaatattcccaagaggatctggggagatgatgacacgttctccagttaaggtgactctgagtgaaggtcctcaccatgtggccctatttaaagatagttctcgggagtttgatcttaccaaagaagaagatcttgcagcattaagacatgaaatagaacttcgaatgaggaaaaatgtgaaagaaggctgtaccgttagccctgagaccatatccttaaatgtaaaaggccctggactacagaggatggtgcttgttgacttaccaggtgtgattaatactgtgacatcaggcatggctcctgacacaaaggaaactattttcagtatcagcaaagcttacatgcagaatcctaatgccatcatactgtgtattcaagatggatctgtggatgctgaacgcagtattgttacagacttggtcagtcaaatggaccctcatggaaggagaaccatattcgttttgaccaaagtagacctggcagagaaaaatgtagccagtccaagcaggattcagcagataattgaaggaaagctcttcccaatgaaagctttaggttattttgctgttgtaacaggaaaagggaacagctctgaaagcattgaagctataagagaatatgaagaagagttttttcagaattcaaagctcctaaagacaagcatgctaaaggcacaccaagtgactacaagaaatttaagccttgcagtatcagactgcttttggaaaatggtacgagagtctgttgaacaacaggctgatagtttcaaagcaacacgttttaaccttgaaactgaatggaagaataactatcctcgcctgcgggaacttgaccggaatgaactatttgaaaaagctaaaaatgaaatccttgatgaagttatcagtctgagccaggttacaccaaaacattgggaggaaatccttcaacaatctttgtgggaaagagtatcaactcatgtgattgaaaacatctaccttccagctgcgcagaccatgaattcaggaacttttaacaccacagtggatatcaagcttaaacagtggactgataaacaacttcctaataaagcagtagaggttgcttgggagaccctacaagaagaattttcccgctttatgacagaaccgaaagggaaagagcatgatgacatatttgataaacttaaagaggctgttaaggaagaaagtattaaacgacacaagtggaatgactttgcggaggacagcttgagggttattcaacacaatgctttggaagaccgatccatatctgataaacagcaatgggatgcagctatttattttatggaagaggctctgcaggctcgtctcaaggatactgaaaatgcaattgaaaacatggtgggtccagactggaaaaagaggtggttatactggaagaatcggacccaagaacagtgtgttcacaatgaaaccaagaatgaattggagaagatgttgaaatgtaatgaggagcacccagcttatcttgcaagtgatgaaataaccacagtccggaagaaccttgaatcccgaggagtagaagtagatccaagcttgattaaggatacttggcatcaagtttatagaagacattttttaaaaacagctctaaaccattgtaacctttgtcgaagaggtttttattactaccaaaggcattttgtagattctgagttggaatgcaatgatgtggtcttgttttggcgtatacagcgcatgcttgctatcaccgcaaatactttaaggcaacaacttacaaatactgaagttaggcgattagagaaaaatgttaaagaggtattggaagattttgctgaagatggtgagaagaagattaaattgcttactggtaaacgcgttcaactggcggaagacctcaagaaagttagagaaattcaagaaaaacttgatgctttcattgaagctcttcatcaggagaaataaattaaaatcgtactcataatcagctctgcatacatctgaagaacaaaaacatcaacgtcttttgtccagcctctttttcttctgctgttccacctttctaaacatacaataaagtcatgggataaaaataatcgatgtatgttacgggcgctttaaccatcagctgcctctcgaatggaagaacagtggtaatggattaacatcctattttgttgtactaaagtgacaaatcggaataatataattggtatggccattaggttcagtccttgaagataagaaacttgttctctgtttgttgtcttatttgtggtggcactcgtttaatggattaactgaggttgctcaatgttcagtttcttttccagaaatacaatgctaggtgttttgaaataaaacttatatagcaattgtttaaagttatcaattgtatataaaatcacagtagcctgctaaatcattgtatgtgtctgtagtattctattcccagaaactatttgaccatgataattcagtttatattcaccacatgaaagaaaaatgggtaacagaagaacccttaaaacaggttaatttggattgtaacgttcagtgaaagaaatttcaacccttcatagccagcgaagaaatttgccttggaagccaagtcagtaccagcttacctatttgattcagttgctgttttctcactctctatatccatttgaaattgatttattttagatgttgtatacttacgttaggctttctgttaatagtggtttttctcctgttgacagagccaccggattatgacacaggatgaggaagattaaggataatcaattgactaatttcatttagaatattatcaaacatttcaactaggtatcagaaaaaggctttctttcataagactattttaaatagaaattatttcaacaattaaagtaatgttgaccatccccctctcagctgaataaagaaaaatttagttcaatttattgcaatttaattacaatactaccttcacaacattttcatgtgttttaaataaatattttttaattggctaaaggacattcaagcaaagaaatgctttctttacttaaaatgtctatctcatttgctgccttttcactaagcctttactttgttaataaaagtgtccattgtgtgatgtttttgattttacagtttgctaaatcttattttcttggagttgctttttggtaacagccccattgctactccccattttattgttttacatcaatgcatgcttcgttgtgatccctcaagatgtaacacttggtatgctcggttgaggatatgaaaaaatacttccgaaaccaggaattcaatgtatgtttgttttatactgtttgataagaaaagtaggtccagccttaagcagcacagatgcgctggtagatgcatagtcaggaactttttttatttcttttaggtctagggacaggagtgaatagaaagggaggagagctctattatgttctatacacagattaggagatgaccttactgggtacacccctctaaccagtgcttacaggttaatgcatgttaatgaatatttttgcagttgtaaagcataacaattacaactacacatctatttctaaagaataaaacaggaccatatttatttacttctgtcaactatagaaagaaagaccttcagctgtatttccacagatttctcccaaggaaaaggctaatattagtcactactgttatcacatccctttgtataagttttaaaaagagatggagggagatcttcatttctttgaggagatcagtattgtaacgtatgtgaatagatgataacaattaatattactaaaagtcccacatgagagtcctgacgccctctccatgccccacagtaatgtggcttctttcatgggtttttttttcttctttttagctgatctcatcctaagcatgctttatttttccttgaaagctaggtatttatcaactgcagatgttattgaaagaaaataaaattcagtctcaagagtaaaccctgtgtcttgtgtctgtagttcaaaagtcagaaatgattctaatttaaacaaaaagatactaaatatacagaagttaaattcgaactagccacagaatcatttgtttttatgtcagaatttgcaaagagtggagtggacaaagctctgtatggaagactgaacaactgtaaatagatgatatccaaacttaatttggctaggacttcaattttaaaaatcagtgtacctaggcagtgcacagcacgaaataagtggcccttgcagcttccccgtttaacccactgtgctatagttgcgggtggaacagtcaacctttctagtagtttatgatattgccctctttgtattcccattttctacagttttttccgcagacttctttctgcaaattattcagcctccaaatgcaaatgaatgatataaaaataagtagggaacatggcagagagtggtgcttcccagcctcacaatgtgggaatttgacataggatgagagtcagagtataggtttaaaagataaaatctttagttaataattttgtatttatttattctagatgtatgtatctgaggaaagaaatctggtatttttgctttccaataaaggggatcaaagtaatggtttttctctcagttctctaagctggtctatgttatagctctagcagtatggaaatgtgctttaaaatatgcttaccttttgaatgatcatggctatatgttgttgagatatttgaaacttaccttgttttcacttgtgcactgtgaatgaactttgtattatttttttaaaaccttcacattacgtgtagatattattgcaacttatattttgcctgagcttgatcaaaggtcatttgtgtagatgagtaattaaaaaatatttaaatcacattataattctattattggagagcatcttttaaatttttttctgttttaacgagggaaagagaaacctgtatacctagggtcattatttgaccccatagtataaccagattcatggtctaacaagctctcagtgtggcttttctctgaatgcttgaatttcacatgccttgcatttcacagttgtactccatggtcaaccggtgctttttttcacatcgtggtacttgtcaaaacattttgttattttccttggtaaaatatataaaaaaggttttctaatttcactttgctgccaa

SEQ ID NO: 21121 - DNA, 554 bp, Homo sapiens
  source 1..554: mol_type = unassigned DNA
gctatctcatactaggatcggctgttgggggtggctacacagccaaaaagacttttgatcagtggaaagatatgataccggaccttagtgaatataaatggattgtgcctgacattgtgtgggaaattgatgagtatatcgattttgagaaaattagaaaagcccttcctagttcagaagaccttgtaaagttagcaccagactttgacaagattgttgaaagccttagcttattgaaggacttttttacctcaggtcacaaattggttagtgaagtcataggagcttctgacctacttctcttgttaggttctccggaagaaacggcgtttagagcaacagatcgtggatctgaaagtgacaagcattttagaaaggtgtcagacaaagagaaaattgaccaacttcaggaagaacttctgcacactcagttgaagtatcagagaatcttggaacgattagaaaaggagaacaaagaattgagaaaattagtattgcagaaagatgacaaaggcattcatcatagaaagcttaagaaatctttgattgacatg

SEQ ID NO: 21122 - DNA, 7871 bp, Homo sapiens
  source 1..7871: mol_type = unassigned DNA
actgacgcacgcatggccacgagagggcgggggaggagtgaagaggttgaggcgccccgcccagtcagcaaggttgcgcgtgccctgtgagaccgccaagatggtggtgggcgcgttccctatggcgaagctgctatacttgggcatccggcaggtcagcaagccgcttgccaaccgtattaaggaggccgcccgccgaagcgagttcttcaagacctatatctgcctcccgccggctcaactgtatcactgggtggagatgcggaccaagatgcgcatcatgggcttccggggcacggtcatcaagccgctgaacgaggaggcggcagctgagctgggcgcagagctgctgggcgaagccaccatcttcatcgtgggcggcggctgcctagtgctggagtactggcgccaccaggcgcagcagcgccacaaggaggaggagcagcgtgctgcctggaacgcgctgcgggacgaggtgggccacctggcgctggcgctggaagcgctgcaggcgcaggtgcaggcggcgccgccacagggcgccctggaggaactgcgcacagagctgcaagaggtgcgcgcccagctctgcaatcccggccggtccgcttcccacgcagtgcctgcgtccaagaaataggagcttgctggatggaacctgaatttggacatggcctatgtacctaacgtggccttcttcccgcaccacccttgcctgcgctggcccagtggaaaccaccaggatcttgatgcaacttggcatttggttacccctgctgataagagcagccgttacctgccactgggaccagcaggtgaagcgttgcaacatagccccctccatcatccttcacctcctatcccccactccaaaccaggacgacctgcaaggtcccagccagcaggacaccgtgggcactctggcaaatgaaaaaatggaacctggtcttgagctgaatcaatgtgttattgttacccccacccccggtttacctgatcagtgttaacctttactgggacactcatctgttacactggaacaccttcttctttttgtcaatcggcacagaccactgtaaggaaatgcagtgtgttgcagtggccttttctccccctcaccttctaaggtcagctctagctgagcatcagtgctctcttaaggaggaaaaaaacggtgcggctgggagcggtggctcacgcctgtaatcctagcaccttgggaggccgaggcgggcggatcacttgaggtcaggagttccagaccagcctggccaacatggtgaaactccgtctctactaaaaatacaaaaattagccgggtgtggtggggtgcgcttgtaatcccagctactcgggaggctgaggcaggagaattgcttgaacccatgaggtggaggttgcggtgagccaagatggcaccattgcaccctagcctgggcaacagagcaagacaccgtcttaaaaccaaaagttaaccgggcgtggtggtgggtgcctgtaatcctagctacttgggaggctgaggcaggagaattgcttgaacttgggaggtggaggccaagattgtaccactgtattccagcccgggtgacagagcaagactgtgtctcaaaaaaaaaaaaaaaatcctggctgggcacggtggctcacacctgcaatcccagcactttggaaggtcgaggtgggcgggtcatttgaagtcgggaggtcgggagatcgggagctcgagaccagcctgaccaatatgatgaaaccccgtctctactaaaaatacataaattagctgggcatggtggcatgcacctgtaatcccagctacttgggaggctgagacaggagaattgcttgaacccgggaggcagaggttgcagtgagccgagattgcgcaattgcatgccagcctgggtaacgagcaaaactccatcttaaaaaaacccacaaaaggtcctggcctgcagtcaatccctggaatcattgtaccttcccttgagacccgaagtggactattccaacagaaccccctcatccttgagtctatggcacaacccactggaatggcactacaggatcttttctgtgaatgtcctccaacccccctttccgtggtgggaaatttgatcctaactagggctaatccagcctgtccttcagcctcagccccctattttcctgtcctcagagtccctggagcttgtactgtgtggcatgtcctttcttgccttccccaccttgctcagtagcatttctcagggacccagtcgaatccaagcccatggattcaattgtcacatccttcatcttccatccgtgtctcctaatctgtgtgctcttgctttctttcctcggagctctggactgacccgacagcctgtcttcatgtagcagtaccctcctgcctccatagcccccggtcccacccccatcctaccaattaggccagcagttggccttaactgcttgattaatttccttggactgccataacagatcaccattgggtggtgaacttgatggcttaagtccaacaggaatttaattcacacagttctggagtccagaagtctgaaaccaaggtgctgacagggacacgctccctcttccagctcctggtgattccaggccttccttggctctgcctgcagcttcacatggccttttccctcttctattttgtctcttacaagaacacctgtcattgcatttagggcccatcttaagttcaggatgatcccacctcaagacccttaattacatctgaaaaaacactttttccaaataaactgtcataagcacaggtcctgggggttagtatgtggacttgtctgttgggggcacaccattcaagccattcagcccactattcctcctcaccccaagagtacgctggcgtccaggtgcagtggctcacacctgtaatcccagcactttgggagaccagggcaggagggatctctttgagcccaggagctgaagaccagcctgggcaacatagtgagaccccatctctacaaaagtaaaataaaaaattagccaggtgcggtgatgcatgcctgtagtcccagctacttgggaggctgaggcaggaggatcacctgagccctggaggtcgaggctgcagcgagccgtgatcgcgccactacactccagcctggatgacagagtgagaccctttctcagaaaaaaagtaccctgggactcctgccaaccccgcgggccatttggccttcctgctagctgagaggaacagtctaggaaccacccttttctactgggtttctcttccaggatctgccactgaagcgggagggggtgggtcccagtagcctgcagtctgtccttccgactgtagctctctcattagaggagctgcaaggtgatgaaggcatcctgaggctgtacctgaaccaccatgtggatctccacaatgggtacagagcttattaaaatcaggagggaaactgggagggttctgatggggagaggcccaagagtcaccctatgagctggggaaactaaggccaggggtaagcaaagggacttgccagagatgccacagccagtgaggggctgactgcccagggtggtgaagtagtaggggcagagtgagaggcttggattaccccagctgcagagtgaggagggagaggcgatggctgagcagaggctgggagggtgacgatctctacacagaggcccagaccatcccagaggtggcgttgatagtgggagaccctctctatcccctctcagagcagccccagatcacaccagagatcatagcattgtgtaaactgggtgaccattccacctgggcccgcttttgggaagctgcaggtgaaagtgggagggccgggctttccccgacttccatcctcacctcccttctctaaagaggtaaaactggcctggaccaagatctgcccagatagaaagccaagaaacaggttctgaaacttttcttttcttcttttctcttcttttttcttttcttttctttcggagacagtctagctccgtcaccctgacggagtgcagtggtgcaatctcggctcactgcaacttctacctcccaggctcaaccaatgatcctgcctcagcttccgaagtagctgggattacatgtgcccaccacccacgcctggctaatttttgtattttagtggagacggggtttctccaagttgcccaggctgatcttgaactcctgacctcaggtaatccgcccgcctcggcctcccaaagtgctgggattacaggcgtgagccaccgcgcctggcctgaaacagcatttcagttccttctggaagagggggagaagctggagcagagggaactgaccgagtgggtcctgagtgggctgtgtttaaaactgggagtgacccaggccagctcacgcctgtcatcccagcactttgagaggccaaggtggactgatcacatgatgttaggagatcgagaccagcctggccaacatggcaaaaccccgtctctactaaaaatacaaaaattagccgggcatgttggcacattcctgaatcccagctactcgggaggctgaggcacgagaattgcttgaacccaggaggtggaggttgcagtgagctgagatcgcgccactgcactccagcctgggtgacagagtgagactcaactcaaaaaaaaaaaacagaggtgggagtgtgaacacaggcaggagctccaattcctgaccccagcgctgtcctgacccagatggagtgctgctctcacatctcagagacttcgcactcagccctgccctgccctgccctgacaggcagccagtcatcgtgggcagcagggccatctacttcccccactgcggcgtcaggggtggccagagtgtgtggaagtggaaagaacgtcctctcaaaatgcaagaggccagaggatggttcactgctcgtgtgttctgctagctagaattctgtgtaccttgtaatttggggagaggggttagaataaatttgtaaatgaagctgattatcttcaagttgatgcattcttttttcatatttaaaaagtccttgggactgggcgcagtggctcacacctgtaatcctagcactttgggaggccagggtgggtggatcacctgaggtcaggagttcaagaccaacctgatcaacatggtgaaacctcgtctctactaaaaatacaaaaattagctgggcatggtggttgtgcacctgtaatcccacctactcgggaggctgaggcaggagaatctcttggacccgggaggcggaggttgcagtgagccgagatcatgccattatactccagcctgggtgacagagcgagacttcatctctaaataaataaataaataaataaataaataaggtccatgtcaaccttaggaaaaatatcctttatttattctttcactcaaaaaactcactgaggtggtcccgcaccgggacatggacccagtgtccttggtagggcgtctcccgcaaaaaaaaaaaaaataaaaaaaataaaacacaaaactcactgagttacccactctctgccccaccctatgctggggtcacagtggtgacagagacagccccagccctgccgtcaccgggtcttacagatgctcacacgtacatttcttttccagtgttccctgccccaccccatagttgtttaggaagcaggggctgggctgaatccggaatcctccctctggagtgactcaggactataaacccattcatcccagctcacaaaaccctgggaggtgccctgagggctgtgcccctcccatctcctggcaggccctgctgtccctcttgttggtttctctgtagggcaggccattgcctggagggaggcaaaatggctgagagccaccccaggagaaaatgggctttacataagccccaacctgatctattggctcacggagctactcctgggctggtcgctgtgttgctgagtggcaggcttgggtcccccagtggcaatggcttgtagctggagtcggtgtggacagagagaggagaagcatggcaactctgagtgtactgaggatcaactgcaccaggctccattctagtagctgggagccagttgggagcaagcagaggccctcactggagctgacattctagtgccagagaccggcaataaagaaggaaagagtggccaggcgtggtggctcacacctgtaatctcagcactttgggaggccgaggcgggccaatcccctgaggtcgggagttcgagaccagcctgaccgacatggagaaaccccatctctactaaaaatacaaaattagcagggcatggtggtgcatgcctgtaatcccagccactcaggaggctgtggcaggagaatcgcttgaacccgggaggcggaggttgcggtgagccaatattgcaccattgcactccagcctgggcaacaagaacgagactccatctcaaaaaaaaaaggaaaaagctaatccagcatagggtgatgaggactgagaggaatggaggcagggtaggagttccggacttacgggcaccgctgatctagacaggtgggcagggaggaggcagcgcttcagatggagggagataggaagagggctgtgagtatctgtgaaagtcctaggacagatgtggccttggcctgttcctggaacagcaagagtttctggctgtcagaatagagcagaggctcgctgaccaaggcctttgggccaaatcaaggggacccttgcttcctgtctttgtaaataaagacttattggaacccaggcgctcattcgtttgcatattttccacagttgcttttgcagtacagtgacagagctgagtatttgcacagagatcctagggctctcgtactctctggccctttacagaaaaagtttaccatcccctggaatagagtaagcgaggggagaagttaggtgagggggccaggcaagcaaaggctgccccttgccttgattggcacaactgtggaggtcatcccagctctggagccccaacaggatcactcaggcctctgcttccaccacatctggcttcagcttccccctctgtggagtcctccctccctccctccttccccataggaaatgaccccagtgctcagcagtaacccccactgcgcgcagatctcagaacctccacctcaatctacagccacgtgccacaataagaagcagagttttaggccaggcgcggtggctcacgcctgtaatctcagtactttggaagaccaaggtgggaggatcacttgaagtcaggagttcgagaccagcctgcccaacatggtgaagccccgtctctaataaaaagaatacaaaaattagccgggtgtggtggtgcacatctgtaatcccagctacatgagaggctgacataggagaattgcttgagcccaggaggtggacgttgcagtgagccaagattgcactactgcattccagcctaggtgccagagtgagacttggtctcaaaacaaaacaaaacaaaaaattagccaggcatggtggcacacacctgtagtcccagctacttggggggctgaggcaggaggatcgcttgaacccgggtgtttaaggctgcagtgaactgagatcaggccacagcacctcaacctgggagacaaagtgagaccctgtctcaaaaaaaaaaaaaagcagagtttatgtaatccatcgtgtgcatatttatacaataatttacaattctatgtattttaaaagtgtataattcatatattatgtgacacaatatataatggaatataaaatatatattttatgtcatgtgtaacataacatcatctattatatgtagtgtatgtgcttatgtacatatcattggaatgaaagtttcattaaataattaccctt

SEQ ID NO: 21123 - DNA, 2250 bp, Homo sapiens
  source 1..2250: mol_type = unassigned DNA
gagggcgggggaggagtgaagaggttgaggcgccccgcccagtcagcaaggttgcgcgtgccctgtgagaccgccaagatggtggtgggcgcgttccctatggcgaagctgctatacttgggcatccggcaggtcagcaagccgcttgccaaccgtattaaggaggccgcccgccgaagcgagttcttcaagacctatatctgcctcccgccggctcaactgtaccactggctggagatgcggaccaaaatgcgcatcatgggtttcaatgccgctgccatcaagccgctgaacgagggtgcagccgccgagctgggcgcggagctgctgggcgagggcatcatcttcatcaccgcctgcagctgcctgatgctggagtattggcgccaccagttgcagcagcgccgcaaggaaaaggagcgacgtgttgccagggaggcgctgcggggcgaggtgggccacttggggctggcgctcgaggagttgcaggcgcaggtgcaggcgacgtcgacgcagctcgccctggaggagctgcgcgctcagctgcaggaggtgcgagcccacctctgcctccgagacccgccgcctgcacccccagttgcgccggcgtccgagaaataggaggtctcggggccctggtcttggaggtgactgctgtctggactgcgaagtctctgtcttggcctattctccgcactgtcccatcctggaccggcccagctgacaccacccagtccttcgggggcgccggagagatcctgggctggagctgatcgaacctccctactaacctgcccagtggtaccttccactgggactctccgcctcctgcaggtggaacgttccaagaaggaccccgccctatcccaccccgcccctgccagcgcatttgttgagcactttggaaagacagcgtcttttatcagaccccacctccctaccgctaggtaggccagcaggacgtccacctcttttggcaaaacaaaattctgcacccggatttagccacctctcattctgtcacccgcaccctcactcacctgagtggacccttcccctaggacgctcatcctttgcaccgaacaccacctacctcctcctcattggtacagaccattgtaaagatgcacaaagttcctacggacttcccgacccgcccccttccatctacctcagtcttagggggaaaggtgggggtgaatcctggactgcgttagctccaatgagtcaccaccctgcggctcctgaccttaatccatcttagtacctgtcattgacatcctcccctccctgagtggatcgatccaacataacccccctcttcttccacctatggcgcaccccactggcatggctatgctgggtcttccagggaaacgcctcccagcccggcattctgtggtctgttccagcaggacgtggccttttgggaggaaaaaccggtcttgaccagggctagtccattctggctttcaggctcagtcacttggtcaccagtccccagtcctggacctactgctactgtccttttatccggtcctccctcgctgtcctcttcagttgcctttgctagggaccggcctgtccctttactacctaagtcatcgtcagttcgcccaacttccctccaaatctgcccctcacggtacgcagggatcgcccttccttcctgcctttggactggtccaggtcctcctccgccctccttcacgcaaaggcctcctccagggggactacctgtccctcagcccagaggtccccctgtccaagcggggtattccaccaggccatatgacctacccacccgacaactgaagggggcgtggatgagctctgtgactctgaatgctactttataaatcgactgtcagcgttttctaattaaaggagctctggggtaaagatcttaagaacgtgtctgagaaccataatgtgcgtctgcaaaatgtcattgaaattaggaaagaaggccggacacagtggctcacgcctgtaattccagcactttaagaggccaaagcaggaggactgctggaggccaggagttagagaccaacctaggcaacacagcaagaccgcatctctacgaaaaatgaaaatattagctaggcgtcataccaaacgcctgtagttccagctacttgggaggctgaggcaggaggatcccttgagcccaggagttcaaggctgcagtgagctgtgatcctgccactacactccagactgggtgaaagagcaagactccaactc

SEQ ID NO: 21124 - DNA, 1146 bp, Homo sapiens
  source 1..1146: mol_type = unassigned DNA
agccgctgttctgccccgcgggggcatccgctgggtccccgcgccgttgtcaagaccggggacctggacgcagcggagagaggtgccgccgcccgccccgtccagtcgccgcgcgcagtgtatcactgggtggagatgcggaccaagatgcgcatcatgggcttccggggcacggtcatcaagccgctgaacgaggaggcggcagctgagctgggcgcagagctgctgggcgaagccaccatcttcatcgtgggcggcggctgcctagtgctggagtactggcgccaccaggcgcagcagcgccacaaggaggaggagcagcgtgctgcctggaacgcgctgcgggacgaggtgggccacctggcgctggcgctggaagcgctgcaggcgcaggtgcaggcggcgccgccacagggcgccctggaggaactgcgcacagagctgcaagaggtgcgcgcccagctctgcaatcccggccggtccgcttcccacgcagtgcctgcgtccaagaaataggagcttgctggatggaacctgaatttggacatggcctatgtacctaacgtggccttcttcccgcaccacccttgcctgcgctggcccagtggaaaccaccaggatcttgatgcaacttggcatttggttacccctgctgataagagcagccgttacctgccactgggaccagcaggtgaagcgttgcaacatagccccctccatcatccttcacctcctatcccccactccaaaccaggacgacctgcaaggtcccagccagcaggacaccgtgggcactctggcaaatgaaaaaatggaacctggtcttgagctgaatcaatgtgttattgttacccccacccccggtttacctgatcagtgttaacctttactgggacactcatctgttacactggaacaccttcttctttttgtcaatcggcacagaccactgtaaggaaatgcagtgtgttgcagtggccttttctccccctcaccttctaaggtcagctctagctgagcatcagtgctctcttaaggaggaaaaaaacggtgcggctgggagcggtggctcacgcctgtaatcctagcaccttgggaggccgaggcgggcggatcacttgaggtcaggagttccagaccagcctg

SEQ ID NO: 21125 - DNA, 3832 bp, Homo sapiens
  source 1..3832: mol_type = unassigned DNA
atccctgcagcgctacccgggtactctggatgcacatagggcggctctcgctcctaccttgtcatcctgctgtctaatccgggggcagcttccctcctccacaccagcagaggctattcttcagcaacaagaatagccgagcctattcgtccgcaacaagagcccaagaagcatcctgcaggctttctgctttttgagtgtattttaaagcaaaaacgagtggaaagctatgtatgctcagttaactatgtctagatgttaaccttttttcaaaaaacacagatggaggcctccctccgaggatgcctggcattctcctctttctgtgggcggcagcgaccccctgcggctccagcctccactacgggatctgcgggaagacacggggaagacgaactccgcacactgcatttgattaatgatttattttgattaacgccgtcacagtgacgccttagagcagtccctgttcacccgggtcccagcctcgaccccgcacggacagcgagggtgtggctttgatagctggtggtgccacttcctggccttggatgagccgtacgcctctgtaaacccaacttcctcacctttgaaacagctgcctggttcagcattaatgaagattagtcagtgacaggcctggtgtgctgagtccgcacatagaacttctgcaatgtcccatcaacctctcagctgcctcactgaaaaggaggacagccccagtgaaagcacaggaaatggacccccccacctggcccacccaaacctggacacgtttaccccggaggagctgctgcagcagatgaaagagctcctgaccgagaaccaccagctgaaagaagccatgaagctaaataatcaagccatgaaagggagatttgaggagctttcggcctggacagagaaacagaaggaagaacgccagttttttgagatacagagcaaagaagcaaaagagcgtctaatggccttgagtcatgagaatgagaaattgaaggaagagcttggaaaactaaaagggaaatcagaaaggtcatctgaggaccccactgatgactccaggcttcccagggccgaagcggagcaggaaaaggaccagctcaggacccaggtggtgaggctacaagcagagaaggcagacctgttgggcatcgtgtctgaactgcagctcaagctgaactccagcggctcctcagaagattcctttgttgaaattaggatggctgaaggagaagcagaagggtcagtaaaagaaatcaagcatagtcctgggcccacgagaacagtctccactggcacggcattgtctaaatataggagcagatctgcagatggggccaagaattacttcgaacatgaggagttaactgtgagccagctcctgctgtgcctaagggaagggaatcagaaggtggagagacttgaagttgcactcaaggaggccaaagaaagagtttcagattttgaaaagaaaacaagtaatcgttctgagattgaaacccagacagaggggagcacagagaaagagaatgatgaagagaaaggcccggagactgttggaagcgaagtggaagcactgaacctccaggtgacatctctgtttaaggagcttcaagaggctcatacaaaactcagcaaagctgagctaatgaagaagagacttcaagaaaagtgtcaggcccttgaaaggaaaaattctgcaattccatcagagttgaatgaaaagcaagagcttgtttatactaacaaaaagttagagctacaagtggaaagcatgctatcagaaatcaaaatggaacaggctaaaacagaggatgaaaagtccaaattaactgtgctacagatgacacacaacaagcttcttcaagaacataataatgcattgaaaacaattgaggaactaacaagaaaagagtcagaaaaagtggacagggcagtgctgaaggaactgagtgaaaaactggaactggcagagaaggctctggcttccaaacagctgcaaatggatgaaatgaagcaaaccattgccaagcaggaagaggacctggaaaccatgaccatcctcagggctcagatggaagtttactgttctgattttcatgctgaaagagcagcgagagagaaaattcatgaggaaaaggagcaactggcattgcagctggcagttctgctgaaagagaatgatgctttcgaagacggaggcaggcagtccttgatggagatgcagagtcgtcatggggcgagaacaagtgactctgaccagcaggcttaccttgttcaaagaggagctgaggacagggactggcggcaacagcggaatattccgattcattcctgccccaagtgtggagaggttctgcctgacatagacacgttacagattcacgtgatggattgcatcatttaagtgttgatgtatcacctccccaaaactgttggtaaatgtcagattttttcctccaagagttgtgcttttgtgttatttgttttcactcaaatattttgcctcattattcttgttttaaaagaaagaaaacaggccgggcacagtggctcatgcctgtaatcccagcactttgggaggtcgaggtgggtggatcacttggggtcagggtttgagaccagcctggccaacatggcggaaccctgtctctaccaaaattacaaaaattagccgagcatggtggcgcatgcctgtagtcgcagctactcgcgaggttgaggcaggagaattgcttgaacccaggaagtggcagttgcagtgagccgagacgacaccactgcactccagcctgggtgacagagggagactctgtctcgaaagaaagaaagaaaaaaaggaaggaaggagaaggaaggaaggagaagaaaaggtacctgttctacgtagaacacctttggtggagttccatcaactcgcaaagtagaatccttacctactactcttctgataataattttaatattttttatgtttggttgatgcgagcagctgcactgctcatgcagttagctagcatgtgacatcatgtgacaaagttcatgtaattagatggaagaaacctcactgattaattttaagaaccttttagggatgcaggaacaatgaagtggccacagtatgtgctgtttttgaagcatttttaaaaacgaattgtagttgtttttcttcatttaaaatggatctgttggaggttatgtgtgtatgttgtagttttattgcagccacaataattttaccaaagttttcacataggcagttagcctttacttaatatcaagacaagtgaaaaaatattggcatcgatgaaaccgataacattggcctcattggatttctttacccattcacagtgtaaagaagttaccttcatgctttcattgtacctgcaggcctgtgggcttgtacagtagataattaatttctaaaaagaacagctgcctattttcttcctaggttaggttatatcttcataatcacaagaattagtgatggcaaaataaaattttgcttatgaatcttttacattgtttatatatgattaatatcatcatatatattttctgtattaagctcatttggcttcatttaagctgtatacttagtcatatatctttcattagttctatggatatgagcagatccctttactggagcccagtatgtgctgtgtgagttagaagtcattcttgctgagaaggtgaataggtagggatttgccttgttttgtaagtctacaatttgccaagagtaaataacactggaccagctgtaaaagtaaacagtgtgtttatgcattgagatactaaagcatttaagaaaaaattaaaa

SEQ ID NO: 21126 - DNA, 3400 bp, Homo sapiens
  source 1..3400: mol_type = unassigned DNA
atcccggtcgggagttctctccaggcggcacgatgccgaggaaacagtgaccctgagcgaagccaagccgggcggcaggtgtggctttgatagctggtggtgccacttcctggccttggatgagccgtacgcctctgtaaacccaacttcctcacctttgaaacagctgcctggttcagcattaatgaagattagtcagtgacaggcctggtgtgctgagtccgcacatagaacttctgcaatgtcccatcaacctctcagctgcctcactgaaaaggaggacagccccagtgaaagcacaggaaatggacccccccacctggcccacccaaacctggacacgtttaccccggaggagctgctgcagcagatgaaagagctcctgaccgagaaccaccagctgaaagaagccatgaagctaaataatcaagccatgaaagggagatttgaggagctttcggcctggacagagaaacagaaggaagaacgccagttttttgagatacagagcaaagaagcaaaagagcgtctaatggccttgagtcatgagaatgagaaattgaaggaagagcttggaaaactaaaagggaaatcagaaaggtcatctgaggaccccactgatgactccaggcttcccagggccgaagcggagcaggaaaaggaccagctcaggacccaggtggtgaggctacaagcagagaaggcagacctgttgggcatcgtgtctgaactgcagctcaagctgaactccagcggctcctcagaagattcctttgttgaaattaggatggctgaaggagaagcagaagggtcagtaaaagaaatcaagcatagtcctgggcccacgagaacagtctccactggcacggcattgtctaaatataggagcagatctgcagatggggccaagaattacttcgaacatgaggagttaactgtgagccagctcctgctgtgcctaagggaagggaatcagaaggtggagagacttgaagttgcactcaaggaggccaaagaaagagtttcagattttgaaaagaaaacaagtaatcgttctgagattgaaacccagacagaggggagcacagagaaagagaatgatgaagagaaaggcccggagactgttggaagcgaagtggaagcactgaacctccaggtgacatctctgtttaaggagcttcaagaggctcatacaaaactcagcaaagctgagctaatgaagaagagacttcaagaaaagtgtcaggcccttgaaaggaaaaattctgcaattccatcagagttgaatgaaaagcaagagcttgtttatactaacaaaaagttagagctacaagtggaaagcatgctatcagaaatcaaaatggaacaggctaaaacagaggatgaaaagtccaaattaactgtgctacagatgacacacaacaagcttcttcaagaacataataatgcattgaaaacaattgaggaactaacaagaaaagagtcagaaaaagtggacagggcagtgctgaaggaactgagtgaaaaactggaactggcagagaaggctctggcttccaaacagctgcaaatggatgaaatgaagcaaaccattgccaagcaggaagaggacctggaaaccatgaccatcctcagggctcagatggaagtttactgttctgattttcatgctgaaagagcagcgagagagaaaattcatgaggaaaaggagcaactggcattgcagctggcagttctgctgaaagagaatgatgctttcgaagacggaggcaggcagtccttgatggagatgcagagtcgtcatggggcgagaacaagtgactctgaccagcaggcttaccttgttcaaagaggagctgaggacagggactggcggcaacagcggaatattccgattcattcctgccccaagtgtggagaggttctgcctgacatagacacgttacagattcacgtgatggattgcatcatttaagtgttgatgtatcacctccccaaaactgttggtaaatgtcagattttttcctccaagagttgtgcttttgtgttatttgttttcactcaaatattttgcctcattattcttgttttaaaagaaagaaaacaggccgggcacagtggctcatgcctgtaatcccagcactttgggaggtcgaggtgggtggatcacttggggtcagggtttgagaccagcctggccaacatggcggaaccctgtctctaccaaaattacaaaaattagccgagcatggtggcgcatgcctgtagtcgcagctactcgcgaggttgaggcaggagaattgcttgaacccaggaagtggcagttgcagtgagccgagacgacaccactgcactccagcctgggtgacagagggagactctgtctcgaaagaaagaaagaaaaaaaggaaggaaggagaaggaaggaaggagaagaaaaggtacctgttctacgtagaacacctttggtggagttccatcaactcgcaaagtagaatccttacctactactcttctgataataattttaatattttttatgtttggttgatgcgagcagctgcactgctcatgcagttagctagcatgtgacatcatgtgacaaagttcatgtaattagatggaagaaacctcactgattaattttaagaaccttttagggatgcaggaacaatgaagtggccacagtatgtgctgtttttgaagcatttttaaaaacgaattgtagttgtttttcttcatttaaaatggatctgttggaggttatgtgtgtatgttgtagttttattgcagccacaataattttaccaaagttttcacataggcagttagcctttacttaatatcaagacaagtgaaaaaatattggcatcgatgaaaccgataacattggcctcattggatttctttacccattcacagtgtaaagaagttaccttcatgctttcattgtacctgcaggcctgtgggcttgtacagtagataattaatttctaaaaagaacagctgcctattttcttcctaggttaggttatatcttcataatcacaagaattagtgatggcaaaataaaattttgcttatgaatcttttacattgtttatatatgattaatatcatcatatatattttctgtattaagctcatttggcttcatttaagctgtatacttagtcatatatctttcattagttctatggatatgagcagatccctttactggagcccagtatgtgctgtgtgagttagaagtcattcttgctgagaaggtgaataggtagggatttgccttgttttgtaagtctacaatttgccaagagtaaataacactggaccagctgtaaaagtaaacagtgtgtttatgcattgagatactaaagcatttaagaaaaaattaaaa

SEQ ID NO: 21127 - DNA, 3521 bp, Homo sapiens
  source 1..3521: mol_type = unassigned DNA
gccccctccgccaccgccgccgcccgccggcaggttccctggtcagcgtcccatcccggtcgggagttctctccaggcggcacgatgccgaggaaacagtgaccctgagcgaagccaagccgggcggcaggtgtggctttgatagctggtggtgccacttcctggccttggatgagccgtacgcctctgtaaacccaacttcctcacctttgaaacagctgcctggttcagcattaatgaagattagtcagtgacaggcctggtgtgctgagtccgcacatagaagaatcaaaaatgtccaaaatgtaactggagagaaagtgggcaacttttggagtgacttttccacaggaacttctgcaatgtcccatcaacctctcagctgcctcactgaaaaggaggacagccccagtgaaagcacaggaaatggacccccccacctggcccacccaaacctggacacgtttaccccggaggagctgctgcagcagatgaaagagctcctgaccgagaaccaccagctgaaagaagccatgaagctaaataatcaagccatgaaagggagatttgaggagctttcggcctggacagagaaacagaaggaagaacgccagttttttgagatacagagcaaagaagcaaaagagcgtctaatggccttgagtcatgagaatgagaaattgaaggaagagcttggaaaactaaaagggaaatcagaaaggtcatctgaggaccccactgatgactccaggcttcccagggccgaagcggagcaggaaaaggaccagctcaggacccaggtggtgaggctacaagcagagaaggcagacctgttgggcatcgtgtctgaactgcagctcaagctgaactccagcggctcctcagaagattcctttgttgaaattaggatggctgaaggagaagcagaagggtcagtaaaagaaatcaagcatagtcctgggcccacgagaacagtctccactggcacggcattgtctaaatataggagcagatctgcagatggggccaagaattacttcgaacatgaggagttaactgtgagccagctcctgctgtgcctaagggaagggaatcagaaggtggagagacttgaagttgcactcaaggaggccaaagaaagagtttcagattttgaaaagaaaacaagtaatcgttctgagattgaaacccagacagaggggagcacagagaaagagaatgatgaagagaaaggcccggagactgttggaagcgaagtggaagcactgaacctccaggtgacatctctgtttaaggagcttcaagaggctcatacaaaactcagcaaagctgagctaatgaagaagagacttcaagaaaagtgtcaggcccttgaaaggaaaaattctgcaattccatcagagttgaatgaaaagcaagagcttgtttatactaacaaaaagttagagctacaagtggaaagcatgctatcagaaatcaaaatggaacaggctaaaacagaggatgaaaagtccaaattaactgtgctacagatgacacacaacaagcttcttcaagaacataataatgcattgaaaacaattgaggaactaacaagaaaagagtcagaaaaagtggacagggcagtgctgaaggaactgagtgaaaaactggaactggcagagaaggctctggcttccaaacagctgcaaatggatgaaatgaagcaaaccattgccaagcaggaagaggacctggaaaccatgaccatcctcagggctcagatggaagtttactgttctgattttcatgctgaaagagcagcgagagagaaaattcatgaggaaaaggagcaactggcattgcagctggcagttctgctgaaagagaatgatgctttcgaagacggaggcaggcagtccttgatggagatgcagagtcgtcatggggcgagaacaagtgactctgaccagcaggcttaccttgttcaaagaggagctgaggacagggactggcggcaacagcggaatattccgattcattcctgccccaagtgtggagaggttctgcctgacatagacacgttacagattcacgtgatggattgcatcatttaagtgttgatgtatcacctccccaaaactgttggtaaatgtcagattttttcctccaagagttgtgcttttgtgttatttgttttcactcaaatattttgcctcattattcttgttttaaaagaaagaaaacaggccgggcacagtggctcatgcctgtaatcccagcactttgggaggtcgaggtgggtggatcacttggggtcagggtttgagaccagcctggccaacatggcggaaccctgtctctaccaaaattacaaaaattagccgagcatggtggcgcatgcctgtagtcgcagctactcgcgaggttgaggcaggagaattgcttgaacccaggaagtggcagttgcagtgagccgagacgacaccactgcactccagcctgggtgacagagggagactctgtctcgaaagaaagaaagaaaaaaaggaaggaaggagaaggaaggaaggagaagaaaaggtacctgttctacgtagaacacctttggtggagttccatcaactcgcaaagtagaatccttacctactactcttctgataataattttaatattttttatgtttggttgatgcgagcagctgcactgctcatgcagttagctagcatgtgacatcatgtgacaaagttcatgtaattagatggaagaaacctcactgattaattttaagaaccttttagggatgcaggaacaatgaagtggccacagtatgtgctgtttttgaagcatttttaaaaacgaattgtagttgtttttcttcatttaaaatggatctgttggaggttatgtgtgtatgttgtagttttattgcagccacaataattttaccaaagttttcacataggcagttagcctttacttaatatcaagacaagtgaaaaaatattggcatcgatgaaaccgataacattggcctcattggatttctttacccattcacagtgtaaagaagttaccttcatgctttcattgtacctgcaggcctgtgggcttgtacagtagataattaatttctaaaaagaacagctgcctattttcttcctaggttaggttatatcttcataatcacaagaattagtgatggcaaaataaaattttgcttatgaatcttttacattgtttatatatgattaatatcatcatatatattttctgtattaagctcatttggcttcatttaagctgtatacttagtcatatatctttcattagttctatggatatgagcagatccctttactggagcccagtatgtgctgtgtgagttagaagtcattcttgctgagaaggtgaataggtagggatttgccttgttttgtaagtctacaatttgccaagagtaaataacactggaccagctgtaaaagtaaacagtgtgtttatgcattgagatactaaagcatttaagaaaaaattaaaa

SEQ ID NO: 21128 - DNA, 3488 bp, Homo sapiens
  source 1..3488: mol_type = unassigned DNA
gccccctccgccaccgccgccgcccgccggcaggttccctggtcagcgtcccatcccggtcgggagttctctccaggcggcacgatgccgaggaaacagtgaccctgagcgaagccaagccgggcggcaggtgtggctttgatagctggtggtgccacttcctggccttggatgagccgtacgcctctgtaaacccaacttcctcacctttgaaacagctgcctggttcagcattaatgaagattagtcagtgacaggcctggtgtgctgagtccgcacatagaagaatcaaaaatgtccaaaatgtaactggagagaaagtgggcaacttttggagaacttctgcaatgtcccatcaacctctcagctgcctcactgaaaaggaggacagccccagtgaaagcacaggaaatggacccccccacctggcccacccaaacctggacacgtttaccccggaggagctgctgcagcagatgaaagagctcctgaccgagaaccaccagctgaaagaagccatgaagctaaataatcaagccatgaaagggagatttgaggagctttcggcctggacagagaaacagaaggaagaacgccagttttttgagatacagagcaaagaagcaaaagagcgtctaatggccttgagtcatgagaatgagaaattgaaggaagagcttggaaaactaaaagggaaatcagaaaggtcatctgaggaccccactgatgactccaggcttcccagggccgaagcggagcaggaaaaggaccagctcaggacccaggtggtgaggctacaagcagagaaggcagacctgttgggcatcgtgtctgaactgcagctcaagctgaactccagcggctcctcagaagattcctttgttgaaattaggatggctgaaggagaagcagaagggtcagtaaaagaaatcaagcatagtcctgggcccacgagaacagtctccactggcacgagcagatctgcagatggggccaagaattacttcgaacatgaggagttaactgtgagccagctcctgctgtgcctaagggaagggaatcagaaggtggagagacttgaagttgcactcaaggaggccaaagaaagagtttcagattttgaaaagaaaacaagtaatcgttctgagattgaaacccagacagaggggagcacagagaaagagaatgatgaagagaaaggcccggagactgttggaagcgaagtggaagcactgaacctccaggtgacatctctgtttaaggagcttcaagaggctcatacaaaactcagcaaagctgagctaatgaagaagagacttcaagaaaagtgtcaggcccttgaaaggaaaaattctgcaattccatcagagttgaatgaaaagcaagagcttgtttatactaacaaaaagttagagctacaagtggaaagcatgctatcagaaatcaaaatggaacaggctaaaacagaggatgaaaagtccaaattaactgtgctacagatgacacacaacaagcttcttcaagaacataataatgcattgaaaacaattgaggaactaacaagaaaagagtcagaaaaagtggacagggcagtgctgaaggaactgagtgaaaaactggaactggcagagaaggctctggcttccaaacagctgcaaatggatgaaatgaagcaaaccattgccaagcaggaagaggacctggaaaccatgaccatcctcagggctcagatggaagtttactgttctgattttcatgctgaaagagcagcgagagagaaaattcatgaggaaaaggagcaactggcattgcagctggcagttctgctgaaagagaatgatgctttcgaagacggaggcaggcagtccttgatggagatgcagagtcgtcatggggcgagaacaagtgactctgaccagcaggcttaccttgttcaaagaggagctgaggacagggactggcggcaacagcggaatattccgattcattcctgccccaagtgtggagaggttctgcctgacatagacacgttacagattcacgtgatggattgcatcatttaagtgttgatgtatcacctccccaaaactgttggtaaatgtcagattttttcctccaagagttgtgcttttgtgttatttgttttcactcaaatattttgcctcattattcttgttttaaaagaaagaaaacaggccgggcacagtggctcatgcctgtaatcccagcactttgggaggtcgaggtgggtggatcacttggggtcagggtttgagaccagcctggccaacatggcggaaccctgtctctaccaaaattacaaaaattagccgagcatggtggcgcatgcctgtagtcgcagctactcgcgaggttgaggcaggagaattgcttgaacccaggaagtggcagttgcagtgagccgagacgacaccactgcactccagcctgggtgacagagggagactctgtctcgaaagaaagaaagaaaaaaaggaaggaaggagaaggaaggaaggagaagaaaaggtacctgttctacgtagaacacctttggtggagttccatcaactcgcaaagtagaatccttacctactactcttctgataataattttaatattttttatgtttggttgatgcgagcagctgcactgctcatgcagttagctagcatgtgacatcatgtgacaaagttcatgtaattagatggaagaaacctcactgattaattttaagaaccttttagggatgcaggaacaatgaagtggccacagtatgtgctgtttttgaagcatttttaaaaacgaattgtagttgtttttcttcatttaaaatggatctgttggaggttatgtgtgtatgttgtagttttattgcagccacaataattttaccaaagttttcacataggcagttagcctttacttaatatcaagacaagtgaaaaaatattggcatcgatgaaaccgataacattggcctcattggatttctttacccattcacagtgtaaagaagttaccttcatgctttcattgtacctgcaggcctgtgggcttgtacagtagataattaatttctaaaaagaacagctgcctattttcttcctaggttaggttatatcttcataatcacaagaattagtgatggcaaaataaaattttgcttatgaatcttttacattgtttatatatgattaatatcatcatatatattttctgtattaagctcatttggcttcatttaagctgtatacttagtcatatatctttcattagttctatggatatgagcagatccctttactggagcccagtatgtgctgtgtgagttagaagtcattcttgctgagaaggtgaataggtagggatttgccttgttttgtaagtctacaatttgccaagagtaaataacactggaccagctgtaaaagtaaacagtgtgtttatgcattgagatactaaagcatttaagaaaaaattaaaa

SEQ ID NO: 21129 - DNA, 3304 bp, Homo sapiens
  source 1..3304: mol_type = unassigned DNA
ggctgccccctccgccaccgccgccgcccgccggcaggttccctggtcagcgtcccatcccggtcgggagttctctccaggcggcacgatgccgaggaaacagtgaccctgagcgaagccaagccgggcggcaggaacttctgcaatgtcccatcaacctctcagctgcctcactgaaaaggaggacagccccagtgaaagcacaggaaatggacccccccacctggcccacccaaacctggacacgtttaccccggaggagctgctgcagcagatgaaagagctcctgaccgagaaccaccagctgaaagaagccatgaagctaaataatcaagccatgaaagggagatttgaggagctttcggcctggacagagaaacagaaggaagaacgccagttttttgagatacagagcaaagaagcaaaagagcgtctaatggccttgagtcatgagaatgagaaattgaaggaagagcttggaaaactaaaagggaaatcagaaaggtcatctgaggaccccactgatgactccaggcttcccagggccgaagcggagcaggaaaaggaccagctcaggacccaggtggtgaggctacaagcagagaaggcagacctgttgggcatcgtgtctgaactgcagctcaagctgaactccagcggctcctcagaagattcctttgttgaaattaggatggctgaaggagaagcagaagggtcagtaaaagaaatcaagcatagtcctgggcccacgagaacagtctccactggcacggcattgtctaaatataggagcagatctgcagatggggccaagaattacttcgaacatgaggagttaactgtgagccagctcctgctgtgcctaagggaagggaatcagaaggtggagagacttgaagttgcactcaaggaggccaaagaaagagtttcagattttgaaaagaaaacaagtaatcgttctgagattgaaacccagacagaggggagcacagagaaagagaatgatgaagagaaaggcccggagactgttggaagcgaagtggaagcactgaacctccaggtgacatctctgtttaaggagcttcaagaggctcatacaaaactcagcaaagctgagctaatgaagaagagacttcaagaaaagtgtcaggcccttgaaaggaaaaattctgcaattccatcagagttgaatgaaaagcaagagcttgtttatactaacaaaaagttagagctacaagtggaaagcatgctatcagaaatcaaaatggaacaggctaaaacagaggatgaaaagtccaaattaactgtgctacagatgacacacaacaagcttcttcaagaacataataatgcattgaaaacaattgaggaactaacaagaaaagagtcagaaaaagtggacagggcagtgctgaaggaactgagtgaaaaactggaactggcagagaaggctctggcttccaaacagctgcaaatggatgaaatgaagcaaaccattgccaagcaggaagaggacctggaaaccatgaccatcctcagggctcagatggaagtttactgttctgattttcatgctgaaagagcagcgagagagaaaattcatgaggaaaaggagcaactggcattgcagctggcagttctgctgaaagagaatgatgctttcgaagacggaggcaggcagtccttgatggagatgcagagtcgtcatggggcgagaacaagtgactctgaccagcaggcttaccttgttcaaagaggagctgaggacagggactggcggcaacagcggaatattccgattcattcctgccccaagtgtggagaggttctgcctgacatagacacgttacagattcacgtgatggattgcatcatttaagtgttgatgtatcacctccccaaaactgttggtaaatgtcagattttttcctccaagagttgtgcttttgtgttatttgttttcactcaaatattttgcctcattattcttgttttaaaagaaagaaaacaggccgggcacagtggctcatgcctgtaatcccagcactttgggaggtcgaggtgggtggatcacttggggtcagggtttgagaccagcctggccaacatggcggaaccctgtctctaccaaaattacaaaaattagccgagcatggtggcgcatgcctgtagtcgcagctactcgcgaggttgaggcaggagaattgcttgaacccaggaagtggcagttgcagtgagccgagacgacaccactgcactccagcctgggtgacagagggagactctgtctcgaaagaaagaaagaaaaaaaggaaggaaggagaaggaaggaaggagaagaaaaggtacctgttctacgtagaacacctttggtggagttccatcaactcgcaaagtagaatccttacctactactcttctgataataattttaatattttttatgtttggttgatgcgagcagctgcactgctcatgcagttagctagcatgtgacatcatgtgacaaagttcatgtaattagatggaagaaacctcactgattaattttaagaaccttttagggatgcaggaacaatgaagtggccacagtatgtgctgtttttgaagcatttttaaaaacgaattgtagttgtttttcttcatttaaaatggatctgttggaggttatgtgtgtatgttgtagttttattgcagccacaataattttaccaaagttttcacataggcagttagcctttacttaatatcaagacaagtgaaaaaatattggcatcgatgaaaccgataacattggcctcattggatttctttacccattcacagtgtaaagaagttaccttcatgctttcattgtacctgcaggcctgtgggcttgtacagtagataattaatttctaaaaagaacagctgcctattttcttcctaggttaggttatatcttcataatcacaagaattagtgatggcaaaataaaattttgcttatgaatcttttacattgtttatatatgattaatatcatcatatatattttctgtattaagctcatttggcttcatttaagctgtatacttagtcatatatctttcattagttctatggatatgagcagatccctttactggagcccagtatgtgctgtgtgagttagaagtcattcttgctgagaaggtgaataggtagggatttgccttgttttgtaagtctacaatttgccaagagtaaataacactggaccagctgtaaaagtaaacagtgtgtttatgcattgagatactaaagcatttaagaaaaaattaaaa

SEQ ID NO: 21130 - DNA, 3681 bp, Homo sapiens
  source 1..3681: mol_type = unassigned DNA
tagccgagcctattcgtccgcaacaagagcccaagaagcatcctgcaggctttctgctttttgagtgtattttaaagcaaaaacgagtggaaagctatgtatgctcagttaactatgtctagatgttaaccttttttcaaaaaacacagatggaggcctccctccgaggatgcctggcattctcctctttctgtgggcggcagcgaccccctgcggctccagcctccactacgggatctgcgggaagacacggggaagacgaactccgcacactgcatttgattaatgatttattttgattaacgccgtcacagtgacgccttagagcagtccctgttcacccgggtcccagcctcgaccccgcacggacagcgagggtgtggctttgatagctggtggtgccacttcctggccttggatgagccgtacgcctctgtaaacccaacttcctcacctttgaaacagctgcctggttcagcattaatgaagattagtcagtgacaggcctggtgtgctgagtccgcacatagaacttctgcaatgtcccatcaacctctcagctgcctcactgaaaaggaggacagccccagtgaaagcacaggaaatggacccccccacctggcccacccaaacctggacacgtttaccccggaggagctgctgcagcagatgaaagagctcctgaccgagaaccaccagctgaaagaagccatgaagctaaataatcaagccatgaaagggagatttgaggagctttcggcctggacagagaaacagaaggaagaacgccagttttttgagatacagagcaaagaagcaaaagagcgtctaatggccttgagtcatgagaatgagaaattgaaggaagagcttggaaaactaaaagggaaatcagaaaggtcatctgaggaccccactgatgactccaggcttcccagggccgaagcggagcaggaaaaggaccagctcaggacccaggtggtgaggctacaagcagagaaggcagacctgttgggcatcgtgtctgaactgcagctcaagctgaactccagcggctcctcagaagattcctttgttgaaattaggatggctgaaggagaagcagaagggtcagtaaaagaaatcaagcatagtcctgggcccacgagaacagtctccactggcacgagcagatctgcagatggggccaagaattacttcgaacatgaggagttaactgtgagccagctcctgctgtgcctaagggaagggaatcagaaggtggagagacttgaagttgcactcaaggaggccaaagaaagagtttcagattttgaaaagaaaacaagtaatcgttctgagattgaaacccagacagaggggagcacagagaaagagaatgatgaagagaaaggcccggagactgttggaagcgaagtggaagcactgaacctccaggtgacatctctgtttaaggagcttcaagaggctcatacaaaactcagcaaagctgagctaatgaagaagagacttcaagaaaagtgtcaggcccttgaaaggaaaaattctgcaattccatcagagttgaatgaaaagcaagagcttgtttatactaacaaaaagttagagctacaagtggaaagcatgctatcagaaatcaaaatggaacaggctaaaacagaggatgaaaagtccaaattaactgtgctacagatgacacacaacaagcttcttcaagaacataataatgcattgaaaacaattgaggaactaacaagaaaagagtcagaaaaagtggacagggcagtgctgaaggaactgagtgaaaaactggaactggcagagaaggctctggcttccaaacagctgcaaatggatgaaatgaagcaaaccattgccaagcaggaagaggacctggaaaccatgaccatcctcagggctcagatggaagtttactgttctgattttcatgctgaaagagcagcgagagagaaaattcatgaggaaaaggagcaactggcattgcagctggcagttctgctgaaagagaatgatgctttcgaagacggaggcaggcagtccttgatggagatgcagagtcgtcatggggcgagaacaagtgactctgaccagcaggcttaccttgttcaaagaggagctgaggacagggactggcggcaacagcggaatattccgattcattcctgccccaagtgtggagaggttctgcctgacatagacacgttacagattcacgtgatggattgcatcatttaagtgttgatgtatcacctccccaaaactgttggtaaatgtcagattttttcctccaagagttgtgcttttgtgttatttgttttcactcaaatattttgcctcattattcttgttttaaaagaaagaaaacaggccgggcacagtggctcatgcctgtaatcccagcactttgggaggtcgaggtgggtggatcacttggggtcagggtttgagaccagcctggccaacatggcggaaccctgtctctaccaaaattacaaaaattagccgagcatggtggcgcatgcctgtagtcgcagctactcgcgaggttgaggcaggagaattgcttgaacccaggaagtggcagttgcagtgagccgagacgacaccactgcactccagcctgggtgacagagggagactctgtctcgaaagaaagaaagaaaaaaaggaaggaaggagaaggaaggaaggagaagaaaaggtacctgttctacgtagaacacctttggtggagttccatcaactcgcaaagtagaatccttacctactactcttctgataataattttaatattttttatgtttggttgatgcgagcagctgcactgctcatgcagttagctagcatgtgacatcatgtgacaaagttcatgtaattagatggaagaaacctcactgattaattttaagaaccttttagggatgcaggaacaatgaagtggccacagtatgtgctgtttttgaagcatttttaaaaacgaattgtagttgtttttcttcatttaaaatggatctgttggaggttatgtgtgtatgttgtagttttattgcagccacaataattttaccaaagttttcacataggcagttagcctttacttaatatcaagacaagtgaaaaaatattggcatcgatgaaaccgataacattggcctcattggatttctttacccattcacagtgtaaagaagttaccttcatgctttcattgtacctgcaggcctgtgggcttgtacagtagataattaatttctaaaaagaacagctgcctattttcttcctaggttaggttatatcttcataatcacaagaattagtgatggcaaaataaaattttgcttatgaatcttttacattgtttatatatgattaatatcatcatatatattttctgtattaagctcatttggcttcatttaagctgtatacttagtcatatatctttcattagttctatggatatgagcagatccctttactggagcccagtatgtgctgtgtgagttagaagtcattcttgctgagaaggtgaataggtagggatttgccttgttttgtaagtctacaatttgccaagagtaaataacactggaccagctgtaaaagtaaacagtgtgtttatgcattgagatactaaagcatttaagaaaaaattaaaa

SEQ ID NO: 21131 - DNA, 664 bp, Homo sapiens
  source 1..664: mol_type = unassigned DNA
aaggagaagcagaagggtcagtaaaagaaatcaagcatagtcctgggcccacgagaacagtctccactggcacggcattgtctaaatataggagcagatctgcagatggggccaagaattacttcgaacatgaggagttaactgtgagccagctcctgctgtgcctaagggaagggaatcagaaggtggagagacttgaagttgcactcaaggaggccaaagaaagagtttcagattttgaaaagaaaacaagtaatcgttctgagattgaaacccagacagaggggagcacagagaaagagaatgatgaagagaaaggcccggagactacagggtttcaccatgttggccaggatggtcttgatctcttgacctcgtgatcctcccacctcggcctcccagagtgctgggattacagatatgagccactgcgcccagctgcaagatgtatttctatcagtattctacaaaacgatttcctatgtctcttcttgactgatttcttctcctcggtccttcaatgaacaagcctactgtaggaaaaggaatgttgtccactttataatgagatcatttgaggatatgacttagaaacttgagggagaattgaaagatttgggttctatcccattactggtttgaataaagtagtttgaaaggaaaa

SEQ ID NO: 21132 - DNA, 848 bp, Homo sapiens
  source 1..848: mol_type = unassigned DNA
gccccctccgccaccgccgccgcccgccggcaggttccctggtcagcgtcccatcccggtcgggagttctctccaggcggcacgatgccgaggaaacagtgaccctgagcgaagccaagccgggcggcaggaacttctgcaatgtcccatcaacctctcagctgcctcactgaaaaggaggacagccccagtgaaagcacaggaaatggacccccccacctggcccacccaaacctggacacgtttaccccggaggagctgctgcagcagatgaaagagctcctgaccgagaaccaccagctgaaagagccatgtggtcaagtggactagagggagatttggttcatcagatcaagtccactttcctggtgtgtgactccatcactctgaacctcctgcagaagccatgaagctaaataatcaagccatgaaagggagatttgaggagctttcggcctggacagagaaacagaaggaagaacgccagttttttgagatacagagcaaagaagcaaaagagcgtctaatggccttgagtcatgagaatgagaaattgaaggaagagcttggaaaactaaaagggaaatcagaaaggtcatctgaggaccccactgatgactccaggcttcccagggccgaagcggagcaggaaaaggaccagctcaggacccaggtggtgaggctacaagcagagaaggcagacctgttgggcatcgtgtctgaactgcagctcaagctgaactccagcggctcctcagaagattcctttgttgaaattaggatggctgaaggagaagcagaagggtcagtaaaagaaatcaagcatagtcctgggcccacgagaacag

SEQ ID NO: 21133 - DNA, 2139 bp, Homo sapiens
  source 1..2139: mol_type = unassigned DNA
gccgcccgggggcttttgccagcggcgccgcgggcctgcgtgctggggcagcgggcacttcttcgacctcgtcctcctcgtcctgtgcggccggccgggtgaggccgggcccgcgtagggggcagtcggcggctgcctccggcggaggtgcctcgcggcgcccgggccggcccgcgcctcggcggcgtgctccatgcatccggagcccgccccgcccccgagccgcagcagtcccgagcttcccccaagcggcggcagcaccaccagcggcagccgccggagccgccgccgcagcggggacggggagcccccgggggccccgccaccgccaccgccgccgtccgccgtcacctacccggactggatcggccagagttactccgaggtgatgagcctcaacgagcactccatgcaggcgctgtcctggcgcaagctctacttgagccgcgccaagcttaaagcctccagccggacctcggctctgctctccggcttcgccatggtggcaatggtggaggtgcagctggacgctgaccacgactacccaccggggctgctcatcgccttcagtgcctgcaccacagtgctggtggctgtgcacctgtttgcgctcatgatcagcacctgcatcctgcccaacatcgaggcggtgagcaacgtgcacaatctcaactcggtcaaggagtccccccatgagcgcatgcaccgccacatcgagctggcctgggccttctccaccgtcatcggcacgctgctcttcctagctgaggtggtgctgctctgctgggtcaagttcttgcccctcaagaagcagccaggccagccaaggcccaccagcaagccccccgccagtggcgcagcagccaacgtcagcaccagcggcatcaccccgggccaggcagctgccatcgcctcgaccaccatcatggtgcccttcggcctgatctttatcgtcttcgccgtccacttctaccgctcactggttagccataagactgaccgacagttccaggagctcaacgagctggcggagtttgcccgcttacaggaccagctggaccacagaggggaccaccccctgacgcccggcagccactatgcctaggcccatgtggtctgggcccttccagtgctttggccttacgcccttccccttgaccttgtcctgccccagcctcacggacagcctgcgcagggggctgggcttcagcaaggggcagagcatggagggaagaggatttttataagagaaatttctgcactttgaaactgtcctctaagagaataagcatttcctgttcttccagctccaggtccacctcctgttgggaggcggtggggggccaaagtggggccacacactcgctgtgtcccctctcctcccctgtgccagtgccacctgggtgcctcctcctgtcctgtccgtctcaacctccctcccgtccagcattgagtgtgtacatgtgtgtgtgacacataaatatactcataaggacacctccttcccgtgtcttgtatttgttgggcctgggctactgctcaccctggttaggtgagcctctaggaaaacttaaaacaaattttaagccaggtatggtggcacatacctgtggtctcagctattcaggaggccaaggcaggaggatctcttgagcccaggagtttgagaccccatctcaaacaaaaaatacaaaaattagccagccacggcgcctgcacttccagctcctttgagagactgaggcaggaagattgcctaagcccaggaggccaagtctgcagtgagctatggtaacaccactgcactccaacctgggcaacagagggagactctgtctctaaaaaaatagaaaaatttgccctgcatggtggctcacgcctgtaatcctagccctttggaaggccaaggcgggcagatcacttgaggtcgggagttcgagaccagcctgaccaacatggagaaaccccatctgtactaaaaatacaaaattagctgggtttggtggcgcatgcttgtaatcccagctactcgggaggctgaggcaggagaatcgcttgaacccaggaggcggaggttgcagtgagctgagatcgcgccattgcactccagcctgggcaacaacagtgaaactccgtctc

SEQ ID NO: 21134 - DNA, 10769 bp, Homo sapiens
  source 1..10769: mol_type = unassigned DNA
gcggaaggagggagggggccgcgctcggcgccccggccgggccactgggccacaggccacgcggccacgcagtccgagcgggagccgagccgggcggggcgagggcagctccgggaaggaacgtcccagggatggaagtgcttggatgcggtgctgctggctgcggatgtgcgcaaggagatgggatggagagcctgagttggcattcgtataaatgacctgcctggctcccaccatgagtgctgagcttaacgtgcctatcgacccctctgctcctgcctgccctgagcccggccataagggcatggattaccgggactgggtccgccgcagctacctggaactggtcacctctaaccaccactcggtacaggccctgtcgtggcggaagctctacctgagcagggccaagctgaaggcctccagcaggacctccgccctcctctccggctttgccatggtggccatggtggaggtgcagctggagacgcagtaccagtacccgcggccgctgctgattgccttcagcgcctgcaccacggtgctggtggccgtgcacctgttcgccctcctcatcagcacctgcatcctgcccaatgtggaggccgtgagcaacatccacaacctgaactccatcagcgagtccccgcatgagcgcatgcacccctacatcgagctggcctggggcttctccaccgtgcttggcatcctactcttcctggccgaggtggtgctgctctgctggatcaagttcctccccgtggatgcccggcgccagcctggccccccacctggccctgggagtcacacgggctggcaggccgccctggtgtccaccatcatcatggtgcccgtgggcctcatcttcgtggtcttcaccatccacttctaccgctccctggtgcgccacaaaacggagcgccacaaccgcgagatcgaggagctccacaagctcaaggtccagctggacgggcatgagcgcagcctgcaggtcttgtgaggggccgagggccggggctgggagcggccctgtgcccgggagtccgcagaggcggggatttgtcagatgcagacattttgcaaggctgccgggtagttcaagaccaaagttttcctcttgtcttaataccataaggactggatgacttctcctgagatagaaccgtttggttcaatgagggactgtgttgctaagagcgttgggggcaaagccaggctggttccttggcctcggggtttcctgggtcggggacacggtgaagaggctccagcgggacctgcccatcagtcctgggccaggaggggctccaagcagcacccagcggtccgggggagtctcagacccggcatgcgtggctggcagacctgggagagccagggcagggttttgcgttcagagaaggattgccccagagacccgtggtggacttcatgggtgctgagtggcccgtgtgacagtgatgacacgaaggcttcggcgtttgagtgggtgcaggtgcacgccagggcttggtgcttccctgcctggccctggagggagctgggtggcctggcttcaggggaagacaggagccaggacacacgtcagcccagcaggtgtggggggtgctgcagccctcggcagtggggtcaggccctgggggatgtttccaatggtgggcagcctggccaggccggagaagacatgttcacgggcatctatcagatgcccccttgaggaggctgagttatttgagggctgctgcaaagtacgctaggctcaaattctcttttcccagccagagccctggccacacggactcagaggggccaccggggtggggaaaggacccctcccccaccccccgcagccactggcctccagctctcggccacagaatggcctctaaggctgactcagccactcccttgggctgtggcagcaggaggcgggggctctggctcaggccccggagcctgtgcagcttgcccatggccctaggcagcgaggggacagcctgggggacttcctgcctaggcaaggtcattggccgggcctggcctgtggatagtggggccaggggccggcccaggccaaatgagtgccctccttgttatgacaccaagtgactacaagggaggcaagacccctccaggcctctcagccgacactgggtcccaccacacacagtgactgtgccgtgcagtgcaggttctggccttttccttgaaggcatctggtagacccgaagccacgctctcgggccgcacatgcacgccgcagcaccagctgccctgagctgcttgtacaaccaaacacctttcccctcttctccagctgtaacctggagagtcagccatgccttgtcttttgttctcataaatagtcactggggccgggcgcagtgactcacgcctgtaatcccagcactttgggaggcctaggtgggcggatcacttgaggtcaggagttcgagaccagcctggccaacatggtgaaaccctgtctctactaaaaaaatacagaaaattagctgggcgtggtggcgggcgcctgtagccccagctacttgggaggctgaggcgggagaatggcaatggcgtgaacccgggaggcagagcttgcagtgagctgagatggcgccactgcactccagcctgggcgacagagccagactccatctcaaaaaaaaaaaaaaaattagccgggcgtgatggcgggcacctgtagtcccagctactcaggaggctgaggcaagagaatcacttgaacccaggaggcagaggttgcagtgagctgagatcacgccattgcactacagcctgggcaacaagagcgaaactttgtctaaaaaaaaaaaaaaatcactgggcttcttcatgctctgatcacatctctcgtaaaagcttaagctctctccggggtccgggttggccgtgccgtggaattctgggtggcctggctggggtctctggaaatgtggctgcagcagagaacagagaccctgacatgcagttttccgtgctgaggggccctaggggagtcacaccaagggtccccacgagaaagttgtggcatccccgggggccggagaagagccccgtgtcttctgaggggttcgtcctttgtgtcccctgcagacatttgtctgcgacctttgccctccagcatgtatgtactttcctgcagcctgtagaaacgcctcttacggtttaatatgtgttcgctttgctaaagaatatcaacatcggccaggcgaggtggggcacgcctgtcatcccagcactttgggaggctgaggtgggaggatcacttgggcccaggggtgcaagaccagcctgggcaacatagcgagaccccatgtctaaaaaaattattttaaattagccaggccgggtgcaatggctcgcgcccgtaatcttagcactctgggaggccgaggcaggcagatcacttgagatcaggactttaagaccagcctcggcaacaacatggtgaaaccatctctagcaaaaatacaaaaaattagccgggtatggtggcgggtacctgtaatcccagctactcaggaggctgaggcaagagaatcgcttgaacgcaggaggcagaggttgcagtgagctgagatcgtgccactgcactccagcctggacaacagagcaaaactctgtctcaaaaaataataaataaaaataaattagctgggcgtggtggtgcatgcctgtagttccagctacttgggaggctgaggtgggaggattgcttgagcctgggaagtagaggctgcagtgaactataactgtgctagtggccgggcgcagtggctcacgcctataatcccagcactttgggaggccaaagcaggtggatcacttgaggtcaggagttcgagaccagcctggccaacatggtgaaactctgtgtctactaaaaatacaaaaaattagctgggtgtggtggcgctcgcctgtagtcccagctacttgggaggctgaggcaggagaatcacttgaacccagaaggcagaggtagcagtgagccaagatggtgccactgcactccagcctgggcgacagagggtgactcctcaaaaaaaagaaaaatagctaaaatatgattgtaccactgcactccagcctgggtgacagagtgagaccctgtctctaaaaaaaaaaaaaagaaaataaagaaaaaagaatgtcagcatgtcagcgttcctccaaggagtggctttgggtcaagaagacaggctggctctcctaaacaaacggctccccacggctgggagaggcagcaggcccttactctggcctgagtcttttgggaggggccctgctgggccttctcctgccacctaccttcctggaccatctgtgcccctgcccacgcagtaccacactccccagactgtggaacgcatctccagtgccatctgggggccagttactgtacctggtccccaggcagagctcttggcctggcagcatccaggcaggtattaagtgcccagtgatggtggcacatgggtggggacggagccacatccaagtctagccctctgattaggaggatgacagtcttggaatttcttgttctctttctcctagggttctcgttctcccagctccagcctttctagtttcgaggcatgaggcaaaccattgctgtgggaatagcagtgaccattggtagggccatggtggccgggagaggaaacctcagggtcaccccagagcctgtggggagacggagggtgagctgttgttggagctgcagaaacgccttgaagggcagcatgggcgatgaggaatgccattgcagcctagaaattcggtttctggaggtttagcctgattttgaagagtatttaagaacagagggctccagaccaggtgtggtggctcacatctgtaatcccagcactttgggaggcagaggtgggcggatcgcctgagatcaggagttcgagaccagcctggcccacatggtgaaaccctgtctctactaaaaatacaaaaattagccgggcgtagtgacacacgcctgtaatcccagctgctcgggaggcagaggcaggagaatggcgtgaacccgggaggcggaggttgcagtgagccgagatcacgccactgcactccagcctgggtaacagagcaagactctgtctcaaaaaaaaaaaaaaaagaacaggggcctctgcctcagtttgcccgggagccagccagggcccatcctaatttggagcacagtcttcctggtgcctagacatgccaaggcccctcccacgtggtacaccctctccgtttagtacctgaccacctgtttcaaaacgcaggtgtttctggtttagaaacttggaaggcggaatgtgttttcgtgtcttctaggaagggtctgctgaggaccagaccacgtaagcctgagtggatcctgactcagctgcagcccttacctgcctcgtgctgatgatctatgcatggcgttatgtagatcacgtgcggcagagacagccactgtcctgtgtgcgggtttttaaaacagctgccctggatgaaacggaataaaccagtgatgctattcaaagtctttctgttcttgggggatgctgtgggcagaggggataaattgcagcccctggccctcccgtggcatctgctgactgggggacccacatcgtggcctgaaaaactcctggagcgccctctggcctcctgtcgctggtcactggccagtgtcctcccaggctgccccggcaagggggcgtggacatctctagaatggaggcagggtactcatgtccagacacgccgccatggggctccgccccgagagcgcagggtgcctctgcctggcgcttcccctcccagacagggccctctctttccagaaacaaaagaaggggcagccccagagggtggctgagcgacaacagagcccacctggacagggtcagcttggcgttccccccagtcccttgaggagaggagctaccagagcactggtcacctcaggacattctccagccccaagtccctgtggggcagcaggaacaggtgggtccctcctgcgggctggtggcactgctaaggaagcaccagacagccttttttttttttttgagacagagtcgctctgtcacccaagctggaatgcggtggcatgatcttggctcactgcaacctcctcctcccaggttcaagcgatcttgtgcctcagcctcccaagtagctgggattacaggcacgcaccaccatgcttggctaatttttgtatttttagtagagacgggggtttcaccatgttggccaggctggtctccaactcatgacctcgtgatctgcccacctcggcctcccaaagtgctgggattacaggtgtgagccagcttgcccagcttatgtttatagatttattttagagacagggttgggctctattgcccaggccagagctggagtgcagtggtgcaatcatagctctctgcaggctccagcttctgggcgcaagcaatcctcccacctcagtctcccaagtagctacacttgggagactacgggcgcacactaccatgcccagctaatgttttttttgtagagatgggatcttgctatgttgcccagtctggtcttgaacttctggcctcaagcgaccctcctgccttggcctcccaaagtgctgggattacaggtgcgagccaccatgcctggcccattctgttttttgtcggccactgaggtagaggccctcttctaggaaagaatttctgtttgttttgttttgttttgttttgtttttttgaaacagtctctctctgtctcccaggctggagtgcagtggcgtgatctcagctcgctgcaacctccacttcccaggttcaagcaattcttctgccaagctgggactacaggcatgcaccaccaccatgccctgctaatttttgttgttgtcgttggtttttgagatagagtttcgctcttgttgcccaggctggagtgcagtggcacgatctcagctcaccgcaacctccgcctcccaggttcaagcaattatcttgcctcagcctcccaagtagctgggattacaggcatgcgccaccacacctggcttatttttgtatttttagtagagatggggtttctccatgttagccaagctggtctcgaactcccgacctcagatgatccgcctgcctcagcctcccaaagtgctggggttacaggtgtgagccaccacacccagcctttctttttgcatttttaatagagactgagtttcatcacactggccaggctggtttcgaactcctggcctcaagtgatccgctggcctcagcctcctaaagtgctggattacaggcatgagccaccgtgccaggccttgttaatatttttaactctggcacttcaccctagaggctgctaggaatcaggtgtgccaagcaactggcaccactccatggaaagcgtctagggcagtgccttggttctgccaatcctgagaagccaggctgccccttgggctgggcagtggcctcagtaccgagccccaggccagcaagcccacaagcctcgagaaagactgcacttccggtggaggctgcagtttccttaaagggaaaatctgccccacccctgtcaagggcaggacacaagtcactggcattgaaggacccactccacacccagcagatcatcgacgcagactttttttttcccagatagagtctcactctgtcgtccaggctggactgcaatggtgtgatcttggctcactgtaacctccgcctcccgggctcaagtgattctcctgcctcagcctcctgagtagctaggattacaggcgcccaccatcacgcctggctaatttttgtatttttagtagagacggggttttgccatgttggccaggctggtcttgaactcctgacctcaagtgatcctcctgcctcagcctcccaaagtgctgggattataggcgtgagccacctcgtccggcccaagactttttgcctcagatgctgcagagccctggtggggcccaggagggcaaggcccacacaggagccgaaacccatgtagaacctgccaacctgtagctcacacctataatcccagcactttgggaggctgaggtgggcggatcgcttgagccaaggagttcgagaccagcctgggcaacattacgagaccctgtctctacaaaaatacaaaaattacccgggcttggtggctcgtgcctatagtcccagctactggggaggctgaggtgggagaatcatctgagcccagggaggttgagactgcagtgagccaagattgtgccactgcactccagcctgggtaaaatgagtgagaccacgtctcaacccctttcacagcccgtctgcggcccacccacccatgggtactgtgggatgggggacaggctggcttaacacaaatcgaggcaggaataaccccagagaatgggctttgcatggagcttggctcctgtccctgcctgtgagggaggaccagactcggcctcaccacctgccactctgagcaaacaggcaacggtgtttcctgaacatctttctgaagcggctgagggatgtcagctgagcccccgctgggcctgctctggagcgggatgtctccagaagccgcccttggagcgggcacttccctatttgggcgtgtcccagtcccatgcctcaccatccccttgcttgaagctccaagagcatgagagtgggcagcctggtctgctgaggaaagtgtctgatggatgcggaaatggccaccccaaacaccggtaagcagatgttaccctgcaggcggtggctcctggggcccagccctgcagaaacacatggggcaggctgggcagaggggctcacacccgttattcccagcgctttgggaggctgaggcgggaggatcgcttgagcccaggagtttgagaccagcctgggcaacatagcaagactctatctccactaaaaatcaaaacaaaacaattagctgggtatggtggcacacgcctgtagttccagctactggggaggctgagggggaggatcacttgagcccaggagttcaaggctgcagtgagccatgattgcgccactgcactccagcctgggcaacagagcaagaccctgccccgccgcctgaaagaaagaaaaaagaaagagaaaggaagagaaagaaaggaaaagaaaaaggaaacatacgaggctatggggccgtgtacgggggccaggctgtggcagaagcatcctggcgtggccttctccagccccatcctggttgggtaaggtgtcgccgtgggtcttcgtgtcacagcttcaaggacagacccaactctggtatcacaaacttaacaggtaatggagtttcctaaagtgtgctctgcaggagtgctggaagggccagcatggaaggaccccagggagggagatttctttgctccacagcatccccaagcctcacgaggcctctcccctccaagtctctatgtgcatcgttctccagatgttggagcatcctgcaggggccagcccagcctgtcaggggcagagaccctgcactggccccctcgagagtggacccctgggctggcttatctgctccagtgcagtgaggatcagctggagctccgacctgactcacatctggatgcgcagtgaggggcccgttggggccgtgatactgggaggaagccgggctctgtgctcttgctccaagtgagttgaccagggagccgaagttaaggtggcctgggagccacgtcctcccacctagcggctgggctctcacagccactagaaacccatcagcctttcccctgggtctatgcggggctcttcagccctcctgggagctcagtggctgggatgctgctttacagacagtgcacggctctgccatctgacagctcccagagggttctgggggtgactgtaaagagtggtgctggccccgaacctttcctgttcccctggatttagttcccagcaggtggtgaggaactgaacattttgtcccatagtggtgggagagagggctggccacatgggtccaggccaccccctcagcctccacagcctgccccgcacccagccacaggaacagcagagcagctcccccatccaggtaagcgcccccaccacagccccatcacaaaggaatagcctcctggtgtagtgggaggtgaggagctttttttgttttccttttatttattttagggacagggtcttgctctgttgccaagttaagtgcagtggtatgatcatgagctcactgcagccttgacatggtggtaaagccatcctcccgcctcagcctttcgagtagctgggactacaggtgtgtgccaccatgcccagacgcccagctaatgtttgtattttttgtagagatgggggtctcactatgttgcccaggctggcctcaagcaatcctcccacctgagccccgcaaagtactcggattacaggtgtgagtcaccgcgcctggccgggagctttaatttttcctacttgttaacagcgttatggggctggaaggaggctctcagatttccctgccctcctcacatcccccaaccctccctgggcgtgggggtgtcaagcatgagtcaggctgagcctgactctgaagctgttcccagctctttagtctaaacttcaaatcttcaaccctgttccctaatccaacacattccccaaatgaagggactggacagtgagatatcgggaaaccccatgaaaatagatgcataataaaggtgaaaatcattt

SEQ ID NO: 21135 - DNA, 2528 bp, Homo sapiens
  source 1..2528: mol_type = unassigned DNA
gcgccccggccgggccactgggccacaggccacgcggccacgcagtccgagcgggagccgagccgggcggggcgagggcagctccgcctggctcccaccatgagtgctgagcttaacgtgcctatcgacccctctgctcctgcctgccctgagcccggccataagggcatggattaccgggactgggtccgccgcagctacctggaactggtcacctctaaccaccactcggtacaggccctgtcgtggcggaagctctacctgagcagggccaagctgaaggcctccagcaggacctccgccctcctctccggctttgccatggtggccatggtggaggtgcagctggagacgcagtaccagtacccgcggccgctgctgattgccttcagcgcctgcaccacggtgctggtggccgtgcacctgttcgccctcctcatcagcacctgcatcctgcccaatgtggaggccgtgagcaacatccacaacctgaactccatcagcgagtccccgcatgagcgcatgcacccctacatcgagctggcctggggcttctccaccgtgcttggcatcctactcttcctggccgaggtggtgctgctctgctggatcaagttcctccccgtggatgcccggcgccagcctggccccccacctggccctgggagtcacacgggctggcaggccgccctggtgtccaccatcatcatggtgcccgtgggcctcatcttcgtggtcttcaccatccacttctaccgctccctggtgcgccacaaaacggagcgccacaaccgcgagatcgaggagctccacaagctcaaggtccagctggacgggcatgagcgcagcctgcaggtcttgtgaggggccgagggccggggctgggagcggccctgtgcccgggagtccgcagaggcggggatttgtcagatgcagacattttgcaaggctgccgggtagttcaagaccaaagttttcctcttgtcttaataccataaggactggatgacttctcctgagatagaaccgtttggttcaatgagggactgtgttgctaagagcgttgggggcaaagccaggctggttccttggcctcggggtttcctgggtcggggacacggtgaagaggctccagcgggacctgcccatcagtcctgggccaggaggggctccaagcagcacccagcggtccgggggagtctcagacccggcatgcgtggctggcagacctgggagagccagggcagggttttgcgttcagagaaggattgccccagagacccgtggtggacttcatgggtgctgagtggcccgtgtgacagtgatgacacgaaggcttcggcgtttgagtgggtgcaggtgcacgccagggcttggtgcttccctgcctggccctggagggagctgggtggcctggcttcaggggaagacaggagccaggacacacgtcagcccagcaggtgtggggggtgctgcagccctcggcagtggggtcaggccctgggggatgtttccaatggtgggcagcctggccaggccggagaagacatgttcacgggcatctatcagatgcccccttgaggaggctgagttatttgagggctgctgcaaagtacgctaggctcaaattctcttttcccagccagagccctggccacacggactcagaggggccaccggggtggggaaaggacccctcccccaccccccgcagccactggcctccagctctcggccacagaatggcctctaaggctgactcagccactcccttgggctgtggcagcaggaggcgggggctctggctcaggccccggagcctgtgcagcttgcccatggccctaggcagcgaggggacagcctgggggacttcctgcctaggcaaggtcattggccgggcctggcctgtggatagtggggccaggggccggcccaggccaaatgagtgccctccttgttatgacaccaagtgactacaagggaggcaagacccctccaggcctctcagccgacactgggtcccaccacacacagtgactgtgccgtgcagtgcaggttctggccttttccttgaaggcatctggtagacccgaagccacgctctcgggccgcacatgcacgccgcagcaccagctgccctgagctgcttgtacaaccaaacacctttcccctcttctccagctgtaacctggagagtcagccatgccttgtcttttgttctcataaatagtcactggggccgggcgcagtgactcacgcctgtaatcccagcactttgggaggcctaggtgggcggatcacttgaggtcaggagttcgagaccagcctggccaacatggtgaaaccctgtctctactaaaaaaatacagaaaattagctgggcgtggtggcgggcgcctgtagccccagctacttgggaggctgaggcgggagaatggcaatggcgtgaacccgggaggcagagcttgcagtgagctgagatggcgccactgcactccagcctgggcgacagagccagactccatctc

SEQ ID NO: 21136 - DNA, 736 bp, Homo sapiens
  source 1..736: mol_type = unassigned DNA
gcgccccggccgggccactgggccacaggccacgcggccacgcagtccgagcgggagccgagccgggcggggcgagggcagctccgcctggctcccaccatgagtgctgagcttaacgtgcctatcgacccctctgctcctgcctgccctgagcccggccataagggcatggattaccgggactgggtccgccgcagctacctggaactggtcacctctaaccaccactcggtacaggccctgtcgtggcggaagctctacctgagcagggccaagctgaaggcctccagcaggacctccgccctcctctccggctttgccatggtggccatggtggaggtgcagctggagacgcagtaccagtacccgcggccgctgctgattgccttcagcgcctgcaccacggtgctggtggccgtgcacctgttcgccctcctcatcagcacctgcatcctgcccaatgtggaggccgtgagcaacatccacaacctgaactccatcagcgagtccccgcatgagcgcatgcacccctacatcgagctggcctggggcttctccaccgtgcttggcatcctactcttcctggccgaggtggtgctgctctgctggatcaagttcctccccgtggatgcccggcgccagcctggccccccacctggccctgggagtcacacgggctggcaggccgccctggtgtccaccatcatcatggtgcccgtgggcctcatcttcgtgg

SEQ ID NO: 21137 - DNA, 2493 bp, Homo sapiens
  source 1..2493: mol_type = unassigned DNA
ggagagcctgagttggcattcgtataaatgacctgcctggctcccaccatgagtgctgagcttaacgtgcctatcgacccctctgctcctgcctgccctgagcccggccataagggcatggattaccgggactgggtccgccgcagctacctggaactggtcacctctaaccaccactcggtacaggccctgtcgtggcggaagctctacctgagcagggccaagctgaaggcctccagcaggacctccgccctcctctccggctttgccatggtggccatggtggaggtgcagctggagacgcagtaccagtacccgcggccgctgctgattgccttcagcgcctgcaccacggtgctggtggccgtgcacctgttcgccctcctcatcagcacctgcatcctgcccaatgtggaggccgtgagcaacatccacaacctgaactccatcagcgagtccccgcatgagcgcatgcacccctacatcgagctggcctggggcttctccaccgtgcttggcatcctactcttcctggccgaggtggtgctgctctgctggatcaagttcctccccgtggatgcccggcgccagcctggccccccacctggccctgggagtcacacgggctggcaggccgccctggtgtccaccatcatcatggtgcccgtgggcctcatcttcgtggtcttcaccatccacttctaccgctccctggtgcgccacaaaacggagcgccacaaccgcgagatcgaggagctccacaagctcaaggtccagctggacgggcatgagcgcagcctgcaggtcttgtgaggggccgagggccggggctgggagcggccctgtgcccgggagtccgcagaggcggggatttgtcagatgcagacattttgcaaggctgccgggtagttcaagaccaaagttttcctcttgtcttaataccataaggactggatgacttctcctgagatagaaccgtttggttcaatgagggactgtgttgctaagagcgttgggggcaaagccaggctggttccttggcctcggggtttcctgggtcggggacacggtgaagaggctccagcgggacctgcccatcagtcctgggccaggaggggctccaagcagcacccagcggtccgggggagtctcagacccggcatgcgtggctggcagacctgggagagccagggcagggttttgcgttcagagaaggattgccccagagacccgtggtggacttcatgggtgctgagtggcccgtgtgacagtgatgacacgaaggcttcggcgtttgagtgggtgcaggtgcacgccagggcttggtgcttccctgcctggccctggagggagctgggtggcctggcttcaggggaagacaggagccaggacacacgtcagcccagcaggtgtggggggtgctgcagccctcggcagtggggtcaggccctgggggatgtttccaatggtgggcagcctggccaggccggagaagacatgttcacgggcatctatcagatgcccccttgaggaggctgagttatttgagggctgctgcaaagtacgctaggctcaaattctcttttcccagccagagccctggccacacggactcagaggggccaccggggtggggaaaggacccctcccccaccccccgcagccactggcctccagctctcggccacagaatggcctctaaggctgactcagccactcccttgggctgtggcagcaggaggcgggggctctggctcaggccccggagcctgtgcagcttgcccatggccctaggcagcgaggggacagcctgggggacttcctgcctaggcaaggtcattggccgggcctggcctgtggatagtggggccaggggccggcccaggccaaatgagtgccctccttgttatgacaccaagtgactacaagggaggcaagacccctccaggcctctcagccgacactgggtcccaccacacacagtgactgtgccgtgcagtgcaggttctggccttttccttgaaggcatctggtagacccgaagccacgctctcgggccgcacatgcacgccgcagcaccagctgccctgagctgcttgtacaaccaaacacctttcccctcttctccagctgtaacctggagagtcagccatgccttgtcttttgttctcataaatagtcactggggccgggcgcagtgactcacgcctgtaatcccagcactttgggaggcctaggtgggcggatcacttgaggtcaggagttcgagaccagcctggccaacatggtgaaaccctgtctctactaaaaaaatacagaaaattagctgggcgtggtggcgggcgcctgtagccccagctacttgggaggctgaggcgggagaatggcaatggcgtgaacccgggaggcagagcttgcagtgagctgagatggcgccactgcactccagcctgggcgacagagccagactccatctcaaaaaaaaaaaaaaaa

SEQ ID NO: 21138 - DNA, 2638 bp, Homo sapiens
  source 1..2638: mol_type = unassigned DNA
cgctcggcgccccggccgggccactgggccacaggccacgcggccacgcagtccgagcgggagccgagccgggcggggcgagggcagctccggaacgtcccagggatggaagtgcttggatgcggtgctgctggctgcggatgtgcgcaaggagatgggatggagagcctgagttggcattcgtataaatgacctgcctggctcccaccatgagtgctgagcttaacgtgcctatcgacccctctgctcctgcctgccctgagcccggccataagggcatggattaccgggactgggtccgccgcagctacctggaactggtcacctctaaccaccactcggtacaggccctgtcgtggcggaagctctacctgagcagggccaagctgaaggcctccagcaggacctccgccctcctctccggctttgccatggtggccatggtggaggtgcagctggagacgcagtaccagtacccgcggccgctgctgattgccttcagcgcctgcaccacggtgctggtggccgtgcacctgttcgccctcctcatcagcacctgcatcctgcccaatgtggaggccgtgagcaacatccacaacctgaactccatcagcgagtccccgcatgagcgcatgcacccctacatcgagctggcctggggcttctccaccgtgcttggcatcctactcttcctggccgaggtggtgctgctctgctggatcaagttcctccccgtggatgcccggcgccagcctggccccccacctggccctgggagtcacacgggctggcaggccgccctggtgtccaccatcatcatggtgcccgtgggcctcatcttcgtggtcttcaccatccacttctaccgctccctggtgcgccacaaaacggagcgccacaaccgcgagatcgaggagctccacaagctcaaggtccagctggacgggcatgagcgcagcctgcaggtcttgtgaggggccgagggccggggctgggagcggccctgtgcccgggagtccgcagaggcggggatttgtcagatgcagacattttgcaaggctgccgggtagttcaagaccaaagttttcctcttgtcttaataccataaggactggatgacttctcctgagatagaaccgtttggttcaatgagggactgtgttgctaagagcgttgggggcaaagccaggctggttccttggcctcggggtttcctgggtcggggacacggtgaagaggctccagcgggacctgcccatcagtcctgggccaggaggggctccaagcagcacccagcggtccgggggagtctcagacccggcatgcgtggctggcagacctgggagagccagggcagggttttgcgttcagagaaggattgccccagagacccgtggtggacttcatgggtgctgagtggcccgtgtgacagtgatgacacgaaggcttcggcgtttgagtgggtgcaggtgcacgccagggcttggtgcttccctgcctggccctggagggagctgggtggcctggcttcaggggaagacaggagccaggacacacgtcagcccagcaggtgtggggggtgctgcagccctcggcagtggggtcaggccctgggggatgtttccaatggtgggcagcctggccaggccggagaagacatgttcacgggcatctatcagatgcccccttgaggaggctgagttatttgagggctgctgcaaagtacgctaggctcaaattctcttttcccagccagagccctggccacacggactcagaggggccaccggggtggggaaaggacccctcccccaccccccgcagccactggcctccagctctcggccacagaatggcctctaaggctgactcagccactcccttgggctgtggcagcaggaggcgggggctctggctcaggccccggagcctgtgcagcttgcccatggccctaggcagcgaggggacagcctgggggacttcctgcctaggcaaggtcattggccgggcctggcctgtggatagtggggccaggggccggcccaggccaaatgagtgccctccttgttatgacaccaagtgactacaagggaggcaagacccctccaggcctctcagccgacactgggtcccaccacacacagtgactgtgccgtgcagtgcaggttctggccttttccttgaaggcatctggtagacccgaagccacgctctcgggccgcacatgcacgccgcagcaccagctgccctgagctgcttgtacaaccaaacacctttcccctcttctccagctgtaacctggagagtcagccatgccttgtcttttgttctcataaatagtcactggggccgggcgcagtgactcacgcctgtaatcccagcactttgggaggcctaggtgggcggatcacttgaggtcaggagttcgagaccagcctggccaacatggtgaaaccctgtctctactaaaaaaatacagaaaattagctgggcgtggtggcgggcgcctgtagccccagctacttgggaggctgaggcgggagaatggcaatggcgtgaacccgggaggcagagcttgcagtgagctgagatggcgccactgcactccagcctgggcgacagagccagactccatctc

SEQ ID NO: 21139 - DNA, 463 bp, Homo sapiens
  source 1..463: mol_type = unassigned DNA
aatgctgggcaccccccgaggctcaccctgccaagcctggggctccccttttgcgcccggacccaggggcagggaaagcccagctcgtggtctgtgggtagccggacccccgatggggcggtggggggcctcgccttgactcccagagctggggccggggacaggagctggggcaggagggatgcgcgcgggtcggggtcttcccacctcccctgctcctctccctcgcgcgatcccggggtggttccagggaaggaacgtcccagggatggaagtgcttggatgcggtgctgctggctgcggatgtgcgcaaggagatgggatggagagcctgagttggcattcgtataaatgacctgcctggctcccaccatgagtgctgagcttaacgtgcctatcgacccctctgctcctgcctgccctgagcccggccataagggcatggattaccgggactgggtcc

SEQ ID NO: 21140 - DNA, 937 bp, Homo sapiens
  source 1..937: mol_type = unassigned DNA
accccgcgcgaccggcggaaggagggagggggccgcgctcggcgccccggccgggccactgggccacaggccacgcggccacgcagtccgagcgggagccgagccgggcggggcgagggcagctccgggaaggaacgtcccagggatggaagtgcttggatgcggtgctgctggctgcggatgtgcgcaaggagatgggatggagagcctgagttggcattcgtataaatgacctgcctggctcccaccatgagtgctgagcttaacgtgcctatcgacccctctgctcctgcctgccctgagcccggccataagggcatggattaccgggactgggtccgccgcagctacctggaactggtcacctctaaccaccactcggtacaggccctgtcgtggcggaagctctacctgagcagggccaagctgaaggcctccagcaggacctccgccctcctctccggctttgccatggtggccatggtggaggtgcagctggagacgcagtaccagtacccgcggccgctgctgattgccttcagcgcctgcaccacggtgctggtggccgtgcacctgttcgccctcctcatcagcacctgcatcctgcccaatgtggaggccgtgagcaacatccacaacctgaactccatcagcgagtccccgcatgagcgcatgcacccctacatcgagctggcctggggcttctccaccgtgcttggcatcctactcttcctggccgaggtggtgctgctctgctggatcaagttcctccccgtggatgcccggcgccagcctggccccccacctggccctgggagtcacacgggctggcaggccgccctggtgtccaccatcatcatggtgcccgtgggcctcatcttcgtggtcttcaccatccacttctaccgctccctggtgcgccacaaaacggagcgcc

SEQ ID NO: 21141 - DNA, 479 bp, Homo sapiens
  source 1..479: mol_type = unassigned DNA
tacagcattttctattatgtggagctaacctacggattgcagcgtttctctgaattctccccaagggaaggaacgtcccagggatggaagtgcttggatgcggtgctgctggctgcggatgtgcgcaaggagatgggatggagagcctgagttggcattcgtataaatgacctgcctggctcccaccatgagtgctgagcttaacgtgcctatcgacccctctgctcctgcctgccctgagcccggccataagggcatggattaccgggactgggtccgccgcagctacctggaactggtcacctctaaccaccactcggtacaggccctgtcgtggcggaagctctacctgagcagggccaagctgaaggcctccagcaggacctccgccctcctctccggctttgccatggtggccatggtggaggtgcagctggagacgcagtaccagtacccgcggccgctgctgattgccttca

SEQ ID NO: 21142 - DNA, 2206 bp, Homo sapiens
  source 1..2206: mol_type = unassigned DNA
ccagttcctgttttggcctccgctgtcccgctccggctcctggggctccccgcagacgctgcttttcttgctccactgggggtgcctcttcctgggcgcccgccgcctgcatcctgctcgtcctgtctgggaatggggccgcccccgggcttgggccggcccggctggggcccccgaggcgcttccgccccgtagtgaccgcctggtgccgccccccccccaggatgaagggcggcgagggggacgcgggcgagcaggccccgctgaaccctgagggcgagagccctgcaggctcggccacgtaccgggagttcgtgcaccgcggctacctggacctcatgggggccagtcagcactcgctgcgggcgctcagctggcgccgcctctacctcagccgggccaagctcaaagcttccagccgcacgtctgccttgctctcgggcttcgccatggtggccatggtggaggtgcagctggagagtgaccacgagtacccaccaggcctgctggtggccttcagtgcctgcaccaccgtgctggtggctgtgcacctctttgcactcatggtctccacgtgtctgctgccccacattgaagctgtgagcaacatccacaacctcaactctgtccaccagtcgccacaccagagactgcaccgctacgtggagctggcctggggcttctccactgccctgggcacctttctcttccttgctgaagttgtcctggttggttgggtcaagtttgtgcccattggggctcccttggacacaccgacccccatggtgcccacatcccgggtgcccgggactctggcaccagtggctacctcccttagtccagcttccaatctcccacggtcctctgcgtctgcagcaccgtcccaagctgagccagcctgcccaccccggcaagcctgtggtggtggtggggcccatgggccaggctggcaagcagccatggcctccacagccatcatggtacccgtggggctcgtgtttgtggcctttgccctgcatttctaccgctccttggtggcacacaagacagaccgctacaagcaggaactagaggaactgaatcgcctgcagggggagctgcaggctgtgtgagactggtgttagccaccgctcactgcaagcactgcctccctccggggtctgtaagaggccgcaggggcctacagacctcatccccccatcccctggctggagccacttccagtggccactctcaggcagagttcagattcctgcccgcagggtcctctgggctgggccttggggcagctcccacattcccagggattttccccatcagtctgtcccttgggttttgcaagctactctgcacctgggctggcctcagttgaaggatcatgcagtagatagaggggaggcagggagagcttgtgggaccttcagtgctgactttagccaccatttccattcctatacaggatgtgaaggtcagaaggcagccaattgttggtttaatttttttttttttttgagacagtctgtttcccaggctggagtgtagtgatacagtcacagctcactgtagcctcgaccttccaggctcaaaagatgctcccaccacagcctcccaggtagtgagtagctggtactacaggtgtgtgctgccacacccgactaatttttttgtagagacggggtttcgctgttcccaggctggtctcaaactcctgggctcaagtgaacctcccgcctcggcctcccaaagtgctgggattcctttctttatttctgtagaatctattttatggttggcattttgggggaagatttcgatgggttccacattcttgctttagttgttgtagagggatttgggtgtttctacccaaggcattggtctagcttttcctacaatgaacctatctttggaggttcaagctccccaccttcccccactgtggtgacctgtggccacttgcagaagggatggtgcctgacccactgccctagccccacgctatgcaccaaacttgttctccccgtcctggtccagggctggggtctttagagactgacagcctctgccccaggcctgagtccttagcaagggttgggtaaggaggttttaagggagaaggtccagtccttagcccttgaaatacaaagctcttctgacactgaatttggatgcaccttgttttatataataaatcgtgtttcacaga

SEQ ID NO: 21143 - DNA, 1028 bp, Homo sapiens
  source 1..1028: mol_type = unassigned DNA
tccgctgtcccgctccggctcctggggctccccgcagacgctgcttttcttgctccactgggggtgcctcttcctgggcgcccgccgcctgcatcctgctcgtcctgtctgggaatggggccgcccccgggcttgggccggcccggctggggcccccgaggcgcttccgccccgtagtgaccgcctggtgccgccccccccccaggatgaagggcggcgagggggacgcgggcgagcaggccccgctgaaccctgagggcgagagccctgcaggctcggccacgtaccgggagttcgtgcaccgcggctacctggacctcatgggggccagtcagcactcgctgcgggcgctcagctggcgccgcctctacctcagccgggccaagctcaaagcttccagccgcacgtctgccttgctctcgggcttcgccatggtggccatggtggaggtgcagctggagagtgaccacgagtacccaccaggcctgctggtggccttcagtgcctgcaccaccgtgctggtggctgtgcacctctttgcactcatggtctccacgtgtctgctgccccacattgaagctgtgagcaacatccacaacctcaactctgtccaccagtcgccacaccagagactgcaccgctacgtggagctggcctggggcttctccactgccctgggcacctttctcttccttgctgaagttgtcctggttggttgggtcaagtttgtgcccattggggctcccttggacacaccgacccccatggtgcccacatcccgggtgcccgggactctggcaccagtggctacctcccttagtccagcttccaatctcccacggtcctctgcgtctgcagcaccgtcccaagctgagccagcctgcccaccccggcaagcctgtggtggtggtggggcccatgggccaggctggcaagcagccatggcctccacattcccagggattttccccatcagtctgtcccttgggttttgcaagctactctgcacctgggctggcctcagttga

SEQ ID NO: 21144 - DNA, 2478 bp, Homo sapiens
  source 1..2478: mol_type = unassigned DNA
gggtctcgtctcctcccaagcggagcatttgtgcctgaagctgccgggtctgctacggcaccgcggggctgcagaaacccgggggccaagggcgggctgcttgccgctatggctggcagtcaggacatattcgatgccatcgtgatggcggatgagaggtttcatggggaagggtatcgggaaggctatgaagaaggcagtagtttgggtgtgatggagggaaggcagcatggcacgctgcatggagccaaaatcgggtctgagatcgggtgctaccaaggttttgcttttgcatggaaatgtctactgcacagttgcaccactgagaaggacagcagaaagatgaaggtcttagaatcattgattggaatgatccagaaattcccttatgatgaccctacttacgataaactccatgaagacttagacaagatcagaggaaaatttaaacagttttgttcgttactcaatgttcagccagactttaaaattagtgcagaaggttccggactttcattttgaggaggatggatgaacagagaccgaacgtcgaggaacagatgtgtgtgtgacgtgtttagaaatgcggtgaagggccagacggtgctgggaaggcagttgttcattgggagggtgagggttccggttcggccgtgggagggcttccttccctggggttttctgcctgtgtcaccttggtgcccgtcttggggcctcgccacacatgccctttgttgggctgaagccgtccctggcagagccctcgtgcattgacttgacagcctctccggcagcacaggcctagctggttctgggttggagttggctctggatagggtcagtcaccaggcctggactgaaggcagttatttttattattattattatttgcaatgagagagatggttggccccgaatgaggctcatgggaggtttggacgggtgctgtgccgcatgtcgaggccgattgtgtgccaggcggtgcgggacgtgcctcccgtgtgttatttaatcccttcaggagcccacaagatgggtgttattctcattttacagaggagggaggggagacgcgaagggattgcctggtctaagggcacccagcagcagagctaggacttccgccctaaggctgtgcctcactgccaccaggcacagccgcctccggaatgcacaggcgagtccctgccctccctcccaggccgcacaggtcctgccaagcctcacggagcacgggggagtctgtggtggccagtttacctgggcatctggctgagaggaagaaaggccaacctgatcctgaggggacccagacatatcctttgcactgtccctagaggggcgatgagctttgcagcattaaaaaatggtgaaggggggaaatattttgaaccaaagaccaaatgttaggccgccgttatatttgcagaagctttgagaaccatgcgtatagcctcctgcattctcccctctcctaggagctcttttgtctctgtccttacgaggcgtcatacagaggcagtggggtgggcacagatgagcagagtggatggttcggtgggtccccacgaggcgagtggtggtcatatgtgatggcacgtgttcacacaccctcctgtgtacccccccagggtcaccgaagtccccacacgctggctctccacacccctcctgttccagaaagcatgtccgaaagcagtccaggagattattaaggggtcgccatgaatccactttggttttaaaaccattcccgaatgtcctagtggattgtgttgtgctgcctaagctgccggctgcaggagccagagaagtgacccccgcgggagcagcggcaggtggatctccacggtggctcgctttgtttttgttttgttttttcttttaagacggagtctcactctgtcgccgagtttggagtgtattggcgcgatctcggctcactgtaacctccgcctcctgaattcaagtgattctcctgcctcagcctccctagtagctgggattataggcgccccccaccacgcccaagtaacttttgtatttttagtagagatggggttttgccttgttggccaggctggtcttgaactcccagcctgaaatgatccacccacgtccacctaccaaagtgctggaattgcaggcatgagccaccactcccggcctgctttttgtttttgaagacaggacttaggtctcctcctcccgaactctaaacctgcgtgtgtggctgtgcaccgctcgtttgtagcgtcacctcaggtctggggaagtctgtgctggcatctcctcattgtgccttcatcagagctggtgccttcgggccagaaagactctcgttctttctagatggtgggatcaggggcctttgctgtgtttcccttggtggatttttgtgttttgtaagttgtctattttgataatgtattatttttataactgtaaaaaaagtaaatagcatattttaaagtgaaa

SEQ ID NO: 21145 - DNA, 1000 bp, Homo sapiens
  source 1..1000: mol_type = unassigned DNA
tctcgtctcctcccaagcggagcatttgtgcctgaagctgccgggtctgctacggcaccgcggggctgcagaaacccgggggccaagggcgggctgcttgccgctatggctggcagtcaggacatattcgatgccatcgtgatggcggatgagaggtttcatggggaagggtatcgggaaggctatgaagaaggcagtagtttgggtgtgatggagggaaggcagcatggcacgctgcatggagccaaaatcgggtctgagatcgggtgctaccaaggttttgcttttgcatggaaatgtctactgcacagttgcaccactgagaaggacagcagaaagatgaaggtcttagaatcattgattggaatgatccagaaattcccttatgatgaccctacttacgataaactccatgaagacttagacaagatcagaggaaaatttaaacagacgggcctttcgccttccgccgtgatggtgaggcctcccagctacgtagaactgccggttacatgttggtgctgggaagcgccgcggtgcaaccagaaatgcacagacccagccgcccgccgcccagaccctcagacttgcgcgtcacaggacagactccgctgtgccccgtgcacttgccaccagcctttggcctctcgatacacacaacatccaggacttgtgcccttgccccatcacgacagacaaagcgtccctcaaggcccccgcgtggttcagacagacgccgcagccaggatggttgagcagcaaacaatgtgaaagagatacacagaagcgatgtgaatatttccaaaccgtgcctggaagtcaacggtagcagcgcaataagaaaatggagctgcggcctgtccccggtgtgggcaccgccccttcccctcgggagcctcctcctcacacctcctcccgcctgtcctccctcacacgtcagcctccacactcttgccacctcccttcaacacttcctaaataaaaattacaagaattacat

SEQ ID NO: 21146 - DNA, 709 bp, Homo sapiens
  source 1..709: mol_type = unassigned DNA
atttgtgcctgaagctgccgggtctgctacggcaccgcggggctgcagaaacccgggggccaagggcgggctgcttgccgctatggctggcagtcaggacatattcgatgccatcgtgatggcggatgagaggtttcatggggaagggtatcgggaaggctatgaagaaggcagtagtttgggtgtgatggagggaaggcagcatggcacgctgcatggagccaaaatcgggtctgagatcgggtgctaccaaggttttgcttttgcatggaaatgtctactgcacagttgcaccactgagaaggacagcagaaagatgaaggtcttagaatcattgattggaatgatccagaaattcccttatgatgaccctacttacgataaactccatgaagacttagacaagatcagaggaaaatttaaacagttttgttcgttactcaatgttcagccagactttaaaattagtgcagaaggttccggactttcattttgaggaggatggatgaacagagaccgaacgtcgaggaacagatgccgcacaggtcctgccaagcctcacggagcacgggggagtctgtggtggccagtttacctgggcatctggctgagaggaagaaaggccaacctgatcctgaggggacccagacatatcctttgcactgtccctagaggggcgatgagctttgcagcattaaaaaatggtgaa

SEQ ID NO: 21147 - DNA, 2274 bp, Homo sapiens
  source 1..2274: mol_type = unassigned DNA
gcatttgtgcctgaagctgccgggtctgctacggcaccgcggggctgcagaaacccgggggccaagggcgggctgcttgccgctatggctggcagtcaggacatattcgatgccatcgtgatggcggatgagagcagaaagatgaaggtcttagaatcattgattggaatgatccagaaattcccttatgatgaccctacttacgataaactccatgaagacttagacaagatcagaggaaaatttaaacagttttgttcgttactcaatgttcagccagactttaaaattagtgcagaaggttccggactttcattttgaggaggatggatgaacagagaccgaacgtcgaggaacagatgtgtgtgtgacgtgtttagaaatgcggtgaagggccagacggtgctgggaaggcagttgttcattgggagggtgagggttccggttcggccgtgggagggcttccttccctggggttttctgcctgtgtcaccttggtgcccgtcttggggcctcgccacacatgccctttgttgggctgaagccgtccctggcagagccctcgtgcattgacttgacagcctctccggcagcacaggcctagctggttctgggttggagttggctctggatagggtcagtcaccaggcctggactgaaggcagttatttttattattattattatttgcaatgagagagatggttggccccgaatgaggctcatgggaggtttggacgggtgctgtgccgcatgtcgaggccgattgtgtgccaggcggtgcgggacgtgcctcccgtgtgttatttaatcccttcaggagcccacaagatgggtgttattctcattttacagaggagggaggggagacgcgaagggattgcctggtctaagggcacccagcagcagagctaggacttccgccctaaggctgtgcctcactgccaccaggcacagccgcctccggaatgcacaggcgagtccctgccctccctcccaggccgcacaggtcctgccaagcctcacggagcacgggggagtctgtggtggccagtttacctgggcatctggctgagaggaagaaaggccaacctgatcctgaggggacccagacatatcctttgcactgtccctagaggggcgatgagctttgcagcattaaaaaatggtgaaggggggaaatattttgaaccaaagaccaaatgttaggccgccgttatatttgcagaagctttgagaaccatgcgtatagcctcctgcattctcccctctcctaggagctcttttgtctctgtccttacgaggcgtcatacagaggcagtggggtgggcacagatgagcagagtggatggttcggtgggtccccacgaggcgagtggtggtcatatgtgatggcacgtgttcacacaccctcctgtgtacccccccagggtcaccgaagtccccacacgctggctctccacacccctcctgttccagaaagcatgtccgaaagcagtccaggagattattaaggggtcgccatgaatccactttggttttaaaaccattcccgaatgtcctagtggattgtgttgtgctgcctaagctgccggctgcaggagccagagaagtgacccccgcgggagcagcggcaggtggatctccacggtggctcgctttgtttttgttttgttttttcttttaagacggagtctcactctgtcgccgagtttggagtgtattggcgcgatctcggctcactgtaacctccgcctcctgaattcaagtgattctcctgcctcagcctccctagtagctgggattataggcgccccccaccacgcccaagtaacttttgtatttttagtagagatggggttttgccttgttggccaggctggtcttgaactcccagcctgaaatgatccacccacgtccacctaccaaagtgctggaattgcaggcatgagccaccactcccggcctgctttttgtttttgaagacaggacttaggtctcctcctcccgaactctaaacctgcgtgtgtggctgtgcaccgctcgtttgtagcgtcacctcaggtctggggaagtctgtgctggcatctcctcattgtgccttcatcagagctggtgccttcgggccagaaagactctcgttctttctagatggtgggatcaggggcctttgctgtgtttcccttggtggatttttgtgttttgtaagttgtctattttgataatgtattatttttataactgtaaaaaaagtaaatagcatattttaaagtg

SEQ ID NO: 21148 - DNA, 3611 bp, Homo sapiens
  source 1..3611: mol_type = unassigned DNA
cggactggctgtgaggcggtcctgcctcgctgccttcagtccctagtgtctgggtccccgccctccagccgcctttgagtcgtgcctgggtcctcgcccttgcctcagaaccgcgaagaaaggaagctcgcgtgtttgctagaaaacctagttgggagtgcgaggcagagaacgttcagcacctttgttcctcccgaaccctcgggacagaggcagggttctgagggcagggattccccctcgtcttggccccaccgcccgggctgggcactaaactcgggccgcggcggggcgagcgaggcgggctccggagggagctgacgcctgatgatggcgcagtccaacatgtttaccgtggctgatgtgttgagtcaagatgaactgcgcaaaaagctataccagacgtttaaggatcggggtatactggatacactcaagacacaacttcgaaaccagctaattcatgagttgatgcaccctgtattgagtggagaactgcagcctcggtccatttcagtagaagggagctccctcttaataggcgcctctaactctttagtggcagatcacttacaaagatgtggctatgaatattcactttctgttttctttccagaaagtggtttggcaaaagaaaaggtatttactatgcaggatctattacaactcattaaaatcaaccctacttccagtctctacaaatcactggtttcaggatctgataaagaaaatcaaaaaggttttcttatgcattttttaaaagaattggcagaatatcatcaagctaaagagagttgtaatatggaaactcagacaagttcgacatttaacagagattctctggctgagaagcttcagcttattgatgatcagtttgcagatgcttaccctcagcgtatcaagttcgaatctttagaaataaagctaaatgagtataagagagaaatagaagagcaacttcgggcagaaatgtgtcaaaagttgaagttttttaaagataccgagatagcaaaaattaaaatggaagcaaaaaaaaagtatgaaaaggagttaaccatgttccagaatgattttgaaaaagcttgtcaagcaaaatctgaagctctcgttcttcgggaaaagagtacccttgaaagaattcacaagcaccaagagattgaaacaaaagaaatttatgctcaaaggcaacttttactaaaagatatggatttgctaagaggaagagaagcagagctgaagcaaagagttgaagcttttgaattgaaccagaagctccaggaagaaaaacataaaagcataactgaggcacttaggagacaggagcagaatataaagagttttgaggagacctatgaccgaaagctcaagaatgaacttctaaagtatcaacttgaactgaaggatgactacatcattagaactaatcgactgattgaagatgaaaggaagaataaagaaaaagctgttcatttgcaagaggagctcatagctattaattcaaaaaaggaggaactcaatcaatctgtaaatcgtgtgaaagaacttgagcttgaattagagtctgtcaaagcccagtctttggcaataacaaaacaaaaccatatgctgaatgaaaaggttaaagagatgagtgattattcactactaaaagaagagaaactggagcttctggcacaaaataaattacttaaacaacaactggaagagagtagaaatgaaaacctgcgtctcctaaaccgcctagctcagccggctcctgaacttgcagtctttcagaaagaactacggaaagccgaaaaggctatagtggttgagcatgaggagttcgaaagctgcaggcaagctctgcacaaacaactgcaagacgaaattgagcattctgcacagctgaaggcccagattctaggttacaaagcttctgtaaagagtttaactactcaggttgccgatttaaaattgcaactgaagcaaactcagacagccctagagaatgaagtgtactgcaatccaaagcagtctgtgatcgatcgttctgtcaatggattaataaatggcaatgtggtgccttgcaatggtgagataagtggggatttcttgaacaatccttttaaacaggaaaacgttctagcacgtatggttgcatcaaggatcacaaattatccaactgcatgggtggagggtagttcccctgattctgaccttgagtttgtagccaatactaaggcaagggtcaaagagcttcagcaagaggccgaacgcttggaaaaggctttcagaagttaccatcggagagtcattaaaaactctgccaaaagcccactagcagcaaagagcccaccatctctgcacttgctggaagccttcaaaaacattacttccagttccccggaaagacatatttttggagaggacagagttgtctctgagcagcctcaagtgggcacacttgaagaaaggaatgacgtcgtggaagcactgacaggcagtgcagcctcgaggctccgcgggggcacttcctccagacgcctctcttccacaccccttccaaaagcaaaaagaagcctcgaaagtgaaatgtatctggaaggtctgggcagatcacacattgcttcccccagtccttgtcctgacagaatgcccctaccatcacccactgagtctaggcacagcctctccatccctcctgtctccagccctccggagcagaaagtgggtctttatcgaagacaaactgaacttcaagacaaaagtgaattttcagatgtggacaagctagcttttaaggataatgaggagtttgaatcatcttttgaatctgcagggaacatgccaaggcagttggaaatgggcgggctttctcctgccggggatatgtctcatgtggacgctgctgcagctgctgtgcccctctcatatcagcacccaagtgtagatcagaaacaaattgaagaacaaaaggaagaagaaaaaatacgggaacagcaagtgaaagaacgaaggcagagagaagaaagaaggcagagtaacctacaagaagttttagaaagggaacgaagagaactagaaaaactgtatcaggaaaggaagatgattgaagaatcactgaagattaaaataaaaaaggaattagaaatggaaaatgaattagaaatgagtaatcaagaaataaaagacaaatctgctcacagtgaaaatcctttagagaaatacatgaaaatcatccagcaggagcaagaccaggagtcggcagataagagctcaaaaaagatggtccaagaaggctccctagtggacacgctgcaatctagtgacaaagtcgaaagtttaacaggcttttctcatgaagaactagacgactcttggtaaccatgtttgctgcccagcttctaacttacataccgtgagaagttacgtaacatttactcctttgtaaatgtttccctatcatcagacaaaactcaataaaaatgtgtgtaatccaatgtgggtttttttttccataattaattttgataccatagtgtgtgaaccaagaataatctagtcacgtgaaacctcttctccagtcatagtatttctcattcattataataaaagtaactggcttttaa

SEQ ID NO: 21149 - DNA, 3531 bp, Homo sapiens
  source 1..3531: mol_type = unassigned DNA
aaggctatatttagcaggtttccggaagttgccggactggctgtgaggcggtcctgcctcgctgccttcagtccctagtgtctgggtccccgccctccagccgcctttgagtcgtgcctgggtcctcgcccttgcctcagaaccgcgaagaaaggaagctcgcgtgtttgctagaaaacctagttgggagtgcgaggcagagaacgttcagcacctttgttcctcccgaaccctcgggacagaggcagggttctgagggcagggattccccctcgtcttggccccaccgcccgggctgggcactaaactcgggccgcggcggggcgagcgaggcgggctccggagggagctgacgcctgatgatggcgcagtccaacatgtttaccgtggctgatgtgttgagtcaagatgaactgcgcaaaaagctataccagacgtttaaggatcggggtatactggatacactcaagacacaacttcgaaaccagctaattcatgagttgatgcaccctgtattgagtggagaactgcagcctcggtccatttcagtagaagggagctccctcttaataggcgcctctaactctttagtggcagatcacttacaaagatgtggctatgaatattcactttctgttttctttccagaaagtggtttggcaaaagaaaaggtatttactatgcaggatctattacaactcattaaaatcaaccctacttccagtctctacaaatcactggtttcaggatctgataaagaaaatcaaaaaggttttcttatgcattttttaaaagaattggcagaatatcatcaagctaaagagagttgtaatatggaaactcagacaagttcgacatttaacagagattctctggctgagaagcttcagcttattgatgatcagtttgcagatgcttaccctcagcgtatcaagttcgaatctttagaaataaagctaaatgagtataagagagaaatagaagagcaacttcgggcagaaatgtgtcaaaagttgaagttttttaaagataccgagatagcaaaaattaaaatggaagcaaaaaaaaagtatgaaaaggagttaaccatgttccagaatgattttgaaaaagcttgtcaagcaaaatctgaagctctcgttcttcgggaaaagagtacccttgaaagaattcacaagcaccaagagattgaaacaaaagaaatttatgctcaaaggcaacttttactaaaagatatggatttgctaagaggaagagaagcagagctgaagcaaagagttgaagcttttgaattgtatcaacttgaactgaaggatgactacatcattagaactaatcgactgattgaagatgaaaggaagaataaagaaaaagctgttcatttgcaagaggagctcatagctattaattcaaaaaaggaggaactcaatcaatctgtaaatcgtgtgaaagaacttgagcttgaattagagtctgtcaaagcccagtctttggcaataacaaaacaaaaccatatgctgaatgaaaaggttaaagagatgagtgattattcactactaaaagaagagaaactggagcttctggcacaaaataaattacttaaacaacaactggaagagagtagaaatgaaaacctgcgtctcctaaaccgcctagctcagccggctcctgaacttgcagtctttcagaaagaactacggaaagccgaaaaggctatagtggttgagcatgaggagttcgaaagctgcaggcaagctctgcacaaacaactgcaagacgaaattgagcattctgcacagctgaaggcccagattctaggttacaaagcttctgtaaagagtttaactactcaggttgccgatttaaaattgcaactgaagcaaactcagacagccctagagaatgaagtgtactgcaatccaaagcagtctgtgatcgatcgttctgtcaatggattaataaatggcaatgtggtgccttgcaatggtgagataagtggggatttcttgaacaatccttttaaacaggaaaacgttctagcacgtatggttgcatcaaggatcacaaattatccaactgcatgggtggagggtagttcccctgattctgaccttgagtttgtagccaatactaaggcaagggtcaaagagcttcagcaagaggccgaacgcttggaaaaggctttcagaagttaccatcggagagtcattaaaaactctgccaaaagcccactagcagcaaagagcccaccatctctgcacttgctggaagccttcaaaaacattacttccagttccccggaaagacatatttttggagaggacagagttgtctctgagcagcctcaagtgggcacacttgaagaaaggaatgacgtcgtggaagcactgacaggcagtgcagcctcgaggctccgcgggggcacttcctccagacgcctctcttccacaccccttccaaaagcaaaaagaagcctcgaaagtgaaatgtatctggaaggtctgggcagatcacacattgcttcccccagtccttgtcctgacagaatgcccctaccatcacccactgagtctaggcacagcctctccatccctcctgtctccagccctccggagcagaaagtgggtctttatcgaagacaaactgaacttcaagacaaaagtgaattttcagatgtggacaagctagcttttaaggataatgaggagtttgaatcatcttttgaatctgcagggaacatgccaaggcagttggaaatgggcgggctttctcctgccggggatatgtctcatgtggacgctgctgcagctgctgtgcccctctcatatcagcacccaagtgtagatcagaaacaaattgaagaacaaaaggaagaagaaaaaatacgggaacagcaagtgaaagaacgaaggcagagagaagaaagaaggcagagtaacctacaagaagttttagaaagggaacgaagagaactagaaaaactgtatcaggaaaggaagatgattgaagaatcactgaagattaaaataaaaaaggaattagaaatggaaaatgaattagaaatgagtaatcaagaaataaaagacaaatctgctcacagtgaaaatcctttagagaaatacatgaaaatcatccagcaggagcaagaccaggagtcggcagataagagctcaaaaaagatggtccaagaaggctccctagtggacacgctgcaatctagtgacaaagtcgaaagtttaacaggcttttctcatgaagaactagacgactcttggtaaccatgtttgctgcccagcttctaacttacataccgtgagaagttacgtaacatttactcctttgtaaatgtttccctatcatcagacaaaactcaataaaaatgtgtgtaatccaatgtgggtttttttttccataattaattttgataccatagtgtgtgaaccaagaataatctagtcacgtgaaacctcttctccagtcatagtatttctcattcattataataaaagtaactggcttttaacctcctta

SEQ ID NO: 21150 - DNA, 3736 bp, Homo sapiens
  source 1..3736: mol_type = unassigned DNA
cggactggctgtgaggcggtcctgcctcgctgccttcagtccctagtgtctgggtccccgccctccagccgcctttgagtcgtgcctgggtcctcgcccttgcctcagaaccgcgaagaaaggaagctcgcgtgtttgctagaaaacctagttgggagtgcgaggcagagaacgttcagcacctttgttcctcccgaaccctcgggacagaggcagggttctgagggcagggattccccctcgtcttggccccaccgcccgggctgggcactaaactcgggccgcggcggggcgagcgaggcgggctccggagggagctgacgcctgatgatggcgcagtccaacatgtttaccgtggctgatgtgttgagtcaagatgaactgcgcaaaaagctataccagacgtttaaggatcggggtatactggatacactcaagacacaacttcgaaaccagctaattcatgagttgatgcaccctgtattgagtggagaactgcagcctcggtccatttcagtagaagggagctccctcttaataggcgcctctaactctttagtggcagatcacttacaaagatgtggctatgaatattcactttctgttttctttccagaaagtggtttggcaaaagaaaaggtatttactatgcaggatctattacaactcattaaaatcaaccctacttccagtctctacaaatcactggtttcaggatctgataaagaaaatcaaaaagccattaagtctgtgacttaatcgccaagtctcttggtagtaatgttagcagaatataaataaattggagcacaagatattctggactgcccgcaaactagaccatctctactgaagttcagtatggttttcttatgcattttttaaaagaattggcagaatatcatcaagctaaagagagttgtaatatggaaactcagacaagttcgacatttaacagagattctctggctgagaagcttcagcttattgatgatcagtttgcagatgcttaccctcagcgtatcaagttcgaatctttagaaataaagctaaatgagtataagagagaaatagaagagcaacttcgggcagaaatgtgtcaaaagttgaagttttttaaagataccgagatagcaaaaattaaaatggaagcaaaaaaaaagtatgaaaaggagttaaccatgttccagaatgattttgaaaaagcttgtcaagcaaaatctgaagctctcgttcttcgggaaaagagtacccttgaaagaattcacaagcaccaagagattgaaacaaaagaaatttatgctcaaaggcaacttttactaaaagatatggatttgctaagaggaagagaagcagagctgaagcaaagagttgaagcttttgaattgaaccagaagctccaggaagaaaaacataaaagcataactgaggcacttaggagacaggagcagaatataaagagttttgaggagacctatgaccgaaagctcaagaatgaacttctaaagtatcaacttgaactgaaggatgactacatcattagaactaatcgactgattgaagatgaaaggaagaataaagaaaaagctgttcatttgcaagaggagctcatagctattaattcaaaaaaggaggaactcaatcaatctgtaaatcgtgtgaaagaacttgagcttgaattagagtctgtcaaagcccagtctttggcaataacaaaacaaaaccatatgctgaatgaaaaggttaaagagatgagtgattattcactactaaaagaagagaaactggagcttctggcacaaaataaattacttaaacaacaactggaagagagtagaaatgaaaacctgcgtctcctaaaccgcctagctcagccggctcctgaacttgcagtctttcagaaagaactacggaaagccgaaaaggctatagtggttgagcatgaggagttcgaaagctgcaggcaagctctgcacaaacaactgcaagacgaaattgagcattctgcacagctgaaggcccagattctaggttacaaagcttctgtaaagagtttaactactcaggttgccgatttaaaattgcaactgaagcaaactcagacagccctagagaatgaagtgtactgcaatccaaagcagtctgtgatcgatcgttctgtcaatggattaataaatggcaatgtggtgccttgcaatggtgagataagtggggatttcttgaacaatccttttaaacaggaaaacgttctagcacgtatggttgcatcaaggatcacaaattatccaactgcatgggtggagggtagttcccctgattctgaccttgagtttgtagccaatactaaggcaagggtcaaagagcttcagcaagaggccgaacgcttggaaaaggctttcagaagttaccatcggagagtcattaaaaactctgccaaaagcccactagcagcaaagagcccaccatctctgcacttgctggaagccttcaaaaacattacttccagttccccggaaagacatatttttggagaggacagagttgtctctgagcagcctcaagtgggcacacttgaagaaaggaatgacgtcgtggaagcactgacaggcagtgcagcctcgaggctccgcgggggcacttcctccagacgcctctcttccacaccccttccaaaagcaaaaagaagcctcgaaagtgaaatgtatctggaaggtctgggcagatcacacattgcttcccccagtccttgtcctgacagaatgcccctaccatcacccactgagtctaggcacagcctctccatccctcctgtctccagccctccggagcagaaagtgggtctttatcgaagacaaactgaacttcaagacaaaagtgaattttcagatgtggacaagctagcttttaaggataatgaggagtttgaatcatcttttgaatctgcagggaacatgccaaggcagttggaaatgggcgggctttctcctgccggggatatgtctcatgtggacgctgctgcagctgctgtgcccctctcatatcagcacccaagtgtagatcagaaacaaattgaagaacaaaaggaagaagaaaaaatacgggaacagcaagtgaaagaacgaaggcagagagaagaaagaaggcagagtaacctacaagaagttttagaaagggaacgaagagaactagaaaaactgtatcaggaaaggaagatgattgaagaatcactgaagattaaaataaaaaaggaattagaaatggaaaatgaattagaaatgagtaatcaagaaataaaagacaaatctgctcacagtgaaaatcctttagagaaatacatgaaaatcatccagcaggagcaagaccaggagtcggcagataagagctcaaaaaagatggtccaagaaggctccctagtggacacgctgcaatctagtgacaaagtcgaaagtttaacaggcttttctcatgaagaactagacgactcttggtaaccatgtttgctgcccagcttctaacttacataccgtgagaagttacgtaacatttactcctttgtaaatgtttccctatcatcagacaaaactcaataaaaatgtgtgtaatccaatgtgggtttttttttccataattaattttgataccatagtgtgtgaaccaagaataatctagtcacgtgaaacctcttctccagtcatagtatttctcattcattataataaaagtaactggcttttaa

SEQ ID NO: 21151 - DNA, 1597 bp, Homo sapiens
  source 1..1597: mol_type = unassigned DNA
ttccggaagttgccggactggctgtgaggcggtcctgcctcgctgccttcagtccctagtgtctgggtccccgccctccagccgcctttgagtcgtgcctgggtcctcgcccttgcctcagaaccgcgaagaaaggaagctcgcgtgtttgctagaaaacctagttgggagtgcgaggcagagaacgttcagcacctttgttcctcccgaaccctcgggacagaggcagggttctgagggcagggattccccctcgtcttggccccaccgcccgggctgggcactaaactcgggccgcggcggggcgagcgaggcgggctccggagggagctgacgcctgatgatggcgcagtccaacatgtttaccgtggctgatgtgttgagtcaagatgaactgcgcaaaaagctataccagacgtttaaggatcggggtatactggatacactcaagacacaacttcgaaaccagctaattcatgagttgatgcaccctgtattgagtggagaactgcagcctcggtccatttcagtagaagggagctccctcttaataggcgcctctaactctttagtggcagatcacttacaaagatgtggctatgaatattcactttctgttttctttccagaaagtggtttggcaaaagaaaaggtatttactatgcaggatctattacaactcattaaaatcaaccctacttccagtctctacaaatcactggtttcaggatctgataaagaaaatcaaaaaggttttcttatgcattttttaaaagaattggcagaatatcatcaagctaaagagagttgtaatatggaaactcagacaagttcgacatttaacagagattctctggctgagaagcttcagcttattgatgatcagtttgcagatgcttaccctcagcgtatcaagttcgaatctttagaaataaagctaaatgagtataagagagaaatagaagagcaacttcgggcagaaatgtgtcaaaagttgaagttttttaaagataccgagatagcaaaaattaaaatggaagcaaaaaaaaagtatgaaaaggagttaaccatgttccagaatgattttgaaaaagcttgtcaagcaaaatctgaagctctcgttcttcgggaaaagagtacccttgaaagaattcacaagcaccaagagattgaaacaaaagaaatttatgctcaaaggcaacttttactaaaagatatggatttgctaagaggaagagaagcagagctgaagcaaagagttgaagcttttgaattgaaccagaagctccaggaagaaaaacataaaagcataactgaggcacttaggagacaggagcagaatataaagagttttgaggagacctatgaccgaaagctcaagaatgaacttctaaacttccacaggctgcatggtgtctgcctggctttgggaatcctcatatgactttggcaggtgttggagtttggaggctcttcgccacaggagtgcttctatttccttttggaaccaaaagggcagctggtaacagctgggaaagggaagtgaaactgtgaaaatgtgccttttggtattgctaatccggatataatgctcttg

SEQ ID NO: 21152 - DNA, 3307 bp, Homo sapiens
  source 1..3307: mol_type = unassigned DNA
gggagtgcgaggcagagaacgttcagcacctttgttcctcccgaaccctcgggacagaggcagggttctgagggcagggattccccctcgtcttggccccaccgcccgggctgggcactaaactcgggccgcggcggggcgagcgaggcgggctccggagggagctgacgcctgatgatggcgcagtccaacatgtttaccgtggctgatgtgttgagtcaagatgaactgcgcaaaaagctataccagacgtttaaggatcggggtatactggatacactcaagacacaacttcgaaaccagctaattcatgagttgatgcaccctgtattgagtggagaactgcagcctcggtccatttcagtagaagggagctccctcttaataggcgcctctaactctttagtggcagatcacttacaaagatgtggctatgaatattcactttctgttttctttccagaaagtggtttggcaaaagaaaaggtatttactatgcaggatctattacaactcattaaaatcaaccctacttccagtctctacaaatcactggtttcaggatctgataaagaaaatcaaaaagccattaagtctgtgacttaatcgccaagtctcttggtagtaatgttagcagaatataaataaattggagcacaagatattctggactgcccgcaaactagaccatctctactgaagttcagtatggttttcttatgcatttttaaagaattggcagaatatcatcaagctaaagagagttgtaatatggaaactcagacaagttcgacatttaacagagattctctggctgagaagcttcagcttattgatgatcagtttgcagatgcttaccctcagcgtatcaagttcgaatctttagaaataaagctaaatgagtataagagagaaatagaagagcaacttcgggcagaaatgtgtcaaaagttgaagttttttaaagataccgagatagcaaaaattaaaatggaagcaaaaaaaaagtatgaaaaggagttaaccatgttccagaatgattttgaaaaagcttgtcaagcaaaatctgaagctctcgttcttcgggaaaagagtacccttgaaagaattcacaagcaccaagagattgaaacaaaagaaatttatgctcaaaggcaacttttactaaaagatatggatttgctaagaggaagagaagcagagctgaagcaaagagttgaagcttttgaattgtatcaacttgaactgaaggatgactacatcattagaactaatcgactgattgaagatgaaaggaagaataaagaaaaagctgttcatttgcaagaggagctcatagctattaattcaaaaaaggaggaactcaatcaatctgtaaatcgtgtgaaagaacttgagcttgaattagagtctgtcaaagcccagtctttggcaataacaaaacaaaaccatatgctgaatgaaaaggttaaagagatgagtgattattcactactaaaagaagagaaactggagcttctggcacaaaataaattacttaaacaacaactggaagagagtagaaatgaaaacctgcgtctcctaaaccgcctagctcagccggctcctgaacttgcagtctttcagaaagaactacggaaagccgaaaaggctatagtggttgagcatgaggagttcgaaagctgcaggcaagctctgcacaaacaactgcaagacgaaccctagagaatgaagtgtactgcaatccaaagcagtctgtgatcgatcgttctgtcaatggattaataaatggcaatgtggtgccttgcaatggtgagataagtggggatttcttgaacaatccttttaaacaggaaaacgttctagcacgtatggttgcatcaaggatcacaaattatccaactgcatgggtggagggtagttcccctgattctgaccttgagtttgtagccaatactaaggcaagggtcaaagagcttcagcaagaggccgaacgcttggaaaaggctttcagaagttaccatcggagagtcattaaaaactctgccaaaagcccactagcagcaaagagcccaccatctctgcacttgctggaagccttcaaaaacattacttccagttccccggaaagacatatttttggagaggacagagttgtctctgagcagcctcaagtgggcacacttgaagaaaggaatgacgtcgtggaagcactgacaggcagtgcagcctcgaggctccgcgggggcacttcctccagacgcctctcttccacaccccttccaaaagcaaaaagaagcctcgaaagtgaaatgtatctggaaggtctgggcagatcacacattgcttcccccagtccttgtcctgacagaatgcccctaccatcacccactgagtctaggcacagcctctccatccctcctgtctccagccctccggagcagaaagtgggtctttatcgaagacaaactgaacttcaagacaaaagtgaattttcagatgtggacaagctagcttttaaggataatgaggagtttgaatcatcttttgaatctgcagggaacatgccaaggcagttggaaatgggcgggctttctcctgccggggatatgtctcatgtggacgctgctgcagctgctgtgcccctctcatatcagcacccaagtgtagatcagaaacaaattgaagaacaaaaggaagaagaaaaaatacgggaacagcaagtgaaagaacgaaggcagagagaagaaagaaggcagagtaacctacaagaagttttagaaagggaacgaagagaactagaaaaactgtatcaggaaaggaagatgattgaagaatcactgaagattaaaataaaaaaggaattagaaatggaaaatgaattagaaatgagtaatcaagaaataaaagacaaatctgctcacagtgaaaatcctttagagaaatacatgaaaatcatccagcaggagcaagaccaggagtcggcagataagagctcaaaaaagatggtccaagaaggctccctagtggacacgctgcaatctagtgacaaagtcgaaagtttaacaggcttttctcatgaagaactagacgactcttggtaaccatgtttgctgcccagcttctaacttacataccgtgagaagttacgtaacatttactcctttgtaaatgtttccctatcatcagacaaaactcaataaaaatgtgtgtaatccaatgtgggtttttttttccataattaattttgataccatagtgtgtgaaccaagaataatctagtcacgtgaaacctcttctccagtca

SEQ ID NO: 21153 - DNA, 3080 bp, Homo sapiens
  source 1..3080: mol_type = unassigned DNA
ctttggtcctggctttcggcccgtagttgtagaaggagccctgctggtgcaggttagaggtgccgcatcccccggagctctcgaagtggaggcggtaggaaacggagggcttgcggctagccggaggaagctttggagccggccatggcacactaccccacaaggctgaagaccagaaaaacttattcatgggttggcaggcccttgttggatcgaaaactgcactaccaaacctatagagaaatgtgtgtgaaaacagaaggttgttccaccgagattcacatccagattggacagtttgtgttgattgaaggggatgatgatgaaaacccgtatgttgctaaattgcttgagttgttcgaagatgactctgatcctcctcctaagaaacgtgctcgagtacagtggtttgtccgattctgtgaagtccctgcctgtaaacggcatttgttgggccggaagcctggtgcacaggaaatattctggtatgattacccggcctgtgacagcaacattaatgcggagaccatcattggccttgttcgggtgatacctttagccccaaaggatgtggtaccgacgaatctgaaaaatgagaagacactctttgtgaaactatcctggaatgagaagaaattcaggccactttcctcagaactatttgcggagttgaataaaccacaagagagtgcagccaagtgccagaaacccgtgagagccaagagtaagagtgcagagagcccttcttggaccccagcagaacatgtggccaaaaggattgaatcaaggcactccgcctccaaatctcgccaaactcctacccatcctcttaccccaagagccagaaagaggctggagcttggcaacttaggtaaccctcagatgtcccagcagacttcatgtgcctccttggattctccaggaagaataaaacggaaagtggccttctcggagatcacctcaccttctaagagatctcagcctgataaacttcaaaccttgtctccagctctgaaagccccagagaaaaccagagagactggactctcttatactgaggatgacaagaaggcttcacctgaacatcgcataatcctgagaacccgaattgcagcttcgaaaaccatagacattagagaggagagaacacttacccctatcagtgggggacagagatcttcagtggtgccatccgtgattctgaaaccagaaaacatcaaaaagagggatgcaaaagaagcaaaagcccagaatgaagcgacctctactccccatcgtatccgcagaaagagttctgtcttgactatgaatcggattaggcagcagcttcggtttctaggtaatagtaaaagtgaccaagaagagaaagagattctgccagcagcagagatttcagactctagcagtgacgaagaagaggcttccacaccgccccttccaaggagagcacccagaactgtgtccaggaacctgcgatcttccttgaagtcatccttacataccctcacgaaggtgccaaagaagagtctcaagcctagaacgccacgttgtgccgctcctcagatccgtagtcgaagcctggctgcccaggagccagccagtgtgctggaggaagcccgactgaggctgcatgtttctgctgtacctgagtctcttccctgtcgggaacaggaattccaagacatctacaattttgtggaaagcaaactccttgaccataccggagggtgcatgtacatctccggtgtccctgggacagggaagactgccactgttcatgaagtgatacgctgcctgcagcaggcagcccaagccaatgatgttcctccctttcaatacattgaggtcaatggcatgaagctgacggagccccaccaagtctatgtgcaaatcttgcagaagctaacaggccaaaaagcaacagccaaccatgcggcagaactgctggcaaagcaattctgcacccgagggtcacctcaggaaaccaccgtcctgcttgtggatgagctcgaccttctgtggactcacaaacaagacataatgtacaatctctttgactggcccactcataaggaggcccggcttgtggtcctggcaattgccaacacaatggacctgccagagcgaatcatgatgaaccgggtgtccagccgactgggtcttaccaggatgtgcttccagccctatacatatagccagctgcagcagatcctaaggtcccggctcaagcatctaaaggcctttgaagatgatgccatccagctggtagccaggaaggtagcagcactgtctggagatgcacgacggtgcctggacatctgcaggcgtgccacagagatctgtgagttctcccagcagaagcctgactcccctggcctggtcaccatagcccactcaatggaagctgtggatgagatgttttcatcatcatacatcacggccatcaaaaattcctctgttctggaacagagcttcctgagagccatcctcgcagagttccgtcgatcaggactggaggaagccacgtttcaacagatatatagtcaacatgtggcactgtgcagaatggagggactgccgtaccccaccatgtcagagaccatggccgtgtgttctcacctgggctcctgtcgcctcctgcttgtggagcccagcaggaacgatctgctccttcgggtgcggctcaacgtcagccaggatgatgtgctgtatgcgctgaaagacgagtaaaggggcttcacaagttaaaagactggggtcttgctgggttttgttttttgagacagggtcttgctctgtcgcccaggctggagtgcagtggcacgatcatggctcactgcagccttgacttctcaggcttaggtgaccccccaacctcatcctcccaggtggctgaaactacaggcacatgccaccatgcccagctgattttttgtagagacagggcttcaccatgttgccaagctagtctacaaagcatctgattttggaagtacatggaattgttgtaacaaagtatattgaatggaaatggctctcatgtattttggaattttccattaaataatttgctttttcct

SEQ ID NO: 21154 - DNA, 3157 bp, Homo sapiens
  source 1..3157: mol_type = unassigned DNA
cggggccacgccgattggcgcgaagttttcttttctccttccaccttcttttcatttctagtgagacacacgctttggtcctggctttcggcccgtagttgtagaaggagccctgctggtgcaggttagaggtgccgcatcccccggagctctcgaagtggaggcggtaggaaacggagggcttgcggctagccggaggaagctttggagccggaagccatggcacactaccccacaaggctgaagaccagaaaaacttattcatgggttggcaggcccttgttggatcgaaaactgcactaccaaacctatagagaaatgtgtgtgaaaacagaaggttgttccaccgagattcacatccagattggacagtttgtgttgattgaaggggatgatgatgaaaacccgtatgttgctaaattgcttgagttgttcgaagatgactctgatcctcctcctaagaaacgtgctcgagtacagtggtttgtccgattctgtgaagtccctgcctgtaaacggcatttgttgggccggaagcctggtgcacaggaaatattctggtatgattacccggcctgtgacagcaacattaatgcggagaccatcattggccttgttcgggtgatacctttagccccaaaggatgtggtaccgacgaatctgaaaaatgagaagacactctttgtgaaactatcctggaatgagaagaaattcaggccactttcctcagaactatttgcggagttgaataaaccacaagagagtgcagccaagtgccagaaacccgtgagagccaagagtaagagtgcagagagcccttcttggaccccagcagaacatgtggccaaaaggattgaatcaaggcactccgcctccaaatctcgccaaactcctacccatcctcttaccccaagagccagaaagaggctggagcttggcaacttaggtaaccctcagatgtcccagcagacttcatgtgcctccttggattctccaggaagaataaaacggaaagtggccttctcggagatcacctcaccttctaagagatctcagcctgataaacttcaaaccttgtctccagctctgaaagccccagagaaaaccagagagactggactctcttatactgaggatgacaagaaggcttcacctgaacatcgcataatcctgagaacccgaattgcagcttcgaaaaccatagacattagagaggagagaacacttacccctatcagtgggggacagagatcttcagtggtgccatccgtgattctgaaaccagaaaacatcaaaaagagggatgcaaaagaagcaaaagcccagaatgaagcgacctctactccccatcgtatccgcagaaagagttctgtcttgactatgaatcggattaggcagcagcttcggtttctaggtaatagtaaaagtgaccaagaagagaaagagattctgccagcagcagagatttcagactctagcagtgacgaagaagaggcttccacaccgccccttccaaggagagcacccagaactgtgtccaggaacctgcgatcttccttgaagtcatccttacataccctcacgaaggtgccaaagaagagtctcaagcctagaacgccacgttgtgccgctcctcagatccgtagtcgaagcctggctgcccaggagccagccagtgtgctggaggaagcccgactgaggctgcatgtttctgctgtacctgagtctcttccctgtcgggaacaggaattccaagacatctacaattttgtggaaagcaaactccttgaccataccggagggtgcatgtacatctccggtgtccctgggacagggaagactgccactgttcatgaagtgatacgctgcctgcagcaggcagcccaagccaatgatgttcctccctttcaatacattgaggtcaatggcatgaagctgacggagccccaccaagtctatgtgcaaatcttgcagaagctaacaggccaaaaagcaacagccaaccatgcggcagaactgctggcaaagcaattctgcacccgagggtcacctcaggaaaccaccgtcctgcttgtggatgagctcgaccttctgtggactcacaaacaagacataatgtacaatctctttgactggcccactcataaggaggcccggcttgtggtcctggcaattgccaacacaatggacctgccagagcgaatcatgatgaaccgggtgtccagccgactgggtcttaccaggatgtgcttccagccctatacatatagccagctgcagcagatcctaaggtcccggctcaagcatctaaaggcctttgaagatgatgccatccagctggtagccaggaaggtagcagcactgtctggagatgcacgacggtgcctggacatctgcaggcgtgccacagagatctgtgagttctcccagcagaagcctgactcccctggcctggtcaccatagcccactcaatggaagctgtggatgagatgttttcatcatcatacatcacggccatcaaaaattcctctgttctggaacagagcttcctgagagccatcctcgcagagttccgtcgatcaggactggaggaagccacgtttcaacagatatatagtcaacatgtggcactgtgcagaatggagggactgccgtaccccaccatgtcagagaccatggccgtgtgttctcacctgggctcctgtcgcctcctgcttgtggagcccagcaggaacgatctgctccttcgggtgcggctcaacgtcagccaggatgatgtgctgtatgcgctgaaagacgagtaaaggggcttcacaagttaaaagactggggtcttgctgggttttgttttttgagacagggtcttgctctgtcgcccaggctggagtgcagtggcacgatcatggctcactgcagccttgacttctcaggcttaggtgaccccccaacctcatcctcccaggtggctgaaactacaggcacatgccaccatgcccagctgattttttgtagagacagggcttcaccatgttgccaagctagtctacaaagcatctgattttggaagtacatggaattgttgtaacaaagtatattgaatggaaatggctctcatgtattttggaattttccattaaataatttgctttttcctga

SEQ ID NO: 21155 - DNA, 4312 bp, Homo sapiens
  source 1..4312: mol_type = unassigned DNA
gtgccgcacgcaggcttcccatcccccagctggcctccggtgctccttacctccccggtggtcgggcgcgaattactggaaattggcttttcccgttggggccgaaggtaccttccctgcggcggcgactcagcggggtgtcgttcggccggcgtgacgcagccggatcggcgccagacggaaacctagcggtgactgtatctgaattttgcagctgcagaatgtgtagtaccttaaaaggttggcaacaatgagtaaaccagaattaaaggaagacaagatgctggaggttcactttgtgggagatgatgatgttcttaatcacattctagatagagaaggaggagctaaattgaagaaggagcgagcgcagcttttggtcaaccccaaaaaaataataaagaagccagaatatgatttggaggaagatgaccaggaggtcttaaaagatcagaactatgtggaaattatgggaagagatgttcaagaatcattgaaaaatggctctgctacaggtggtggaaataaagtttattcttttcagaatagaaaacactctgaaaagatggctaaattagcttcagaactagcaaaaacaccacaaaaaagtgtttcattcagtttgaagaatgatcctgagattacgataaacgttcctcaaagtagcaagggccattctgcttcagacaaggttcaaccgaagaacaatgacaaaagtgaatttctgtcaacagcacctcgtagtctaagaaaaagattaatagttccaaggtctcattctgacagtgaaagcgaatattctgcttccaactcagaggatgatgaaggggttgcacaggaacatgaagaggacactaatgcagtcatattcagccaaaagattcaagctcagaatagagtagtttcagctcctgttggcaaagaaacaccttctaagagaatgaaaagagataaaacaagtgacttagtagaagaatattttgaagctcacagcagttcaaaagttttaacctctgatagaacactgcagaagctaaagagagctaaactggatcagcaaactttgcgtaacttattgagcaaggtttccccttccttttctgccgaacttaaacaactaaatcaacagtatgaaaaattatttcataaatggatgctgcaattacaccttgggttcaacattgtgctttatggtttgggttctaagagagatttactagaaaggtttcgaaccactatgctgcaagattccattcacgttgtcatcaatggcttctttcctggaatcagtgtgaaatcagtcctgaattctataacagaagaagtcctcgatcatatgggtactttccgcagtatactggatcagctagactggatagtaaacaaatttaaagaagattcttctttagaactcttccttctcatccacaatttggatagccagatgttgagaggagagaagagccagcaaatcattggtcagttgtcatctttgcataacatttaccttatagcatccattgaccacctcaatgctcctctcatgtgggatcatgcaaagcagagtctttttaactggctctggtatgaaactactacatacagtccttatactgaagaaacctcctatgagaactctcttctggtaaagcagtctggatccctgccacttagctcccttactcatgtcttacgaagccttacccctaatgcaaggggaattttcaggctactaataaaataccagctggacaaccaggataacccttcttacattggcctttcttttcaagatttttaccagcagtgtcgggaggcattcctcgtcaatagtgatctgacactccgggcccagttaactgaatttagggaccacaagcttataagaacaaagaagggaactgatggagtagagtatttattaattcctgttgataatggaacattgactgatttcttggaaaaggaagaagaggaggcttgaagctttcctttattcttgaatctcccatggaagggttgtaccccagctgccactcctctagttgaaagtgttgtgtttacatctgacattaaattatttttccagcatacaagatttaaatttgggaagggggggatgtcctcaattagaactttttgatcagcctggctggtaccgtctagtactatgcagcggtcctcaagttggagaaaatgtgcctttcattcattacctctctggagacttcttgctggaatgaacagtgtgctcagggactatttggaactggatgtttttgaattattttatacttagagatattctgaattttttgagggccttttaacactccccgagctgattgtttgcaagtgtgtttgttccagagtgtggaagtataaagacatgggcatcacgtaaattggttttgtttgctattctgtgtgtcagaaccaacgagtgtaatggagagggcaggtcatctcttattgtttctaaaacaacttaaaaggtgtagattgggaagaggtgagtgatccagctttctccttttggattgaggctatgtacttggtgggggcaggggagggaatatattataatactattcagttgggataatgggaaaaacagagtatatagggtatctacccagcctagaaagcacaggaacaatacgtcatatatttggaacagttattgtctgtgccatgaccttcatgataccagtgagaagccaggctagagaaataaaatcctgaattacattttagtaattgttttcaagacaacaaaaaataaaacatttcattattcttgtatattgacatatttttcttttcttgaacaacatgcaggtgagtagcatattaatggctggctgtaaattaattttgattcctctgtcaagtagacctaaaactcactgtaagatatttcagttttttccttaaagtgatgatttcaaacctcctgaatatttgcgcgagacttttttcttaggaaagaaaaaaggctcaccttggctactgttgtcagcttacagtcatcacataccccctgaaatatttgacacttggaaatgaagttcttcctgaaaatatcactgcaataaaatacgtactacgtcagcatttctcactcatttcttatcttgtaaacctctttcatgaaaatatttccaaaaatccttggaatttttaaataatttttcttgtggcatataattaagtaattttggccaggcataatggcttatgcctgtaatcacaacactttgggaggccaaggcaggaggatctctggagcccaggagtttaagaacagcctgggcaacatagtgagaccttgtctctacaaaaaatttaaaaaatcatccgggcatggtggcccatgcctatagtcctagctgctgtggaggctgaggcaggaggatcgcttgagcccaggggttcaagattacagtgagctatgattgtgccactgcacttcagtctgggtgcagagcaagaccttgtctttttttttttttaaatcatttttttaaaaagtaattttatgttaagtccatgggcttagtctttttttttttttttttttttttagatggaattgcactgtcatccagtctagagtgcagtggcgtgatctaagcttacagcagcctccacctcctgggttcaagtgattcttgtgcctcagcctcctgagctgggactacaggcacacgccaccacgcctggctagtttttgaatttttagcagagatggggtttcaccatgttggccaggctggtctcgaattcctgacctcaagtgatcctgcctcggcctcccaaagtactgggatcaggggtgagccactatgcctggccaagggcttagtcttaaatataacctctagtcaaaatgtttaaacaaatttgtacataaatgtgatttaaaaaaatttttttaatagtaccaaaggatattcagtgaaagtgagtttcctgcccactccctgatccacccagttctttaggcaaccactgatagcattttcttaagtattcttccagatatcgtctatgcatatgtaaaagtatctgtctttctccttttaaaaacacaattggtaatatatcatacttgctggtttgcaccttgctttttttgcttaatatatctagtttataatgacctaatgtgcaaatttttgcatctgccctaaatatctactggtttatttttataatttttgtgtctatactatttgcaagcagtatgtgtcagtagactttattattaataaataaaaagccaatttggatagaatcactttataaa

SEQ ID NO: 21156 - DNA, 546 bp, Homo sapiens
  source 1..546: mol_type = unassigned DNA
aagtcgcgcatctcaggactttccctcggcacttggggcatggtctttgcgcctcgctgccccccgcaggctgcccgggggctcgagaacccttactggtggagcgcagccaactggccagaggctggaggcgcaggccaaagtcctttaagacttgaggtgactgtatctgaattttgcagctgcagaatgtgtagtaccttaaaaggttggcaacaatgagtaaaccagaattaaaggaagacaagatgctggaggttcactttgtgggagatgatgatgttcttaatcacattctagatagagaaggaggagctaaattgaagaaggagcgagcgcagcttttggtcaaccccaaaaaaataataaagaagccagaatatgatttggaggaagatgaccaggaggtcttaaaagatcagaactatgtggaaattatgggaagagatgttcaagaatcattgaaaaatggctctgctacaggtggtggaaataaagtttattcttttcagaatagaaaacactctgaaaagatggctaaattag

SEQ ID NO: 21157 - DNA, 486 bp, Homo sapiens
  source 1..486: mol_type = unassigned DNA
agaggctggaggcgcaggccaaagtcctttaagacttgaggtgagaggctcactctgggaggacctttcgttagtctgccccgcagttataggccttttgtgcaagggacgcctgatactaacctacctgattcccagcttacgaagccctctggttggaaaaggagaactgtgaagatgtgtaacgacagtggtaaagtgccctgtgaggtgactgtatctgaattttgcagctgcagaatgtgtagtaccttaaaaggttggcaacaatgagtaaaccagaattaaaggaagacaagatgctggaggttcactttgtgggagatgatgatgttcttaatcacattctagatagagaaggaggagctaaattgaagaaggagcgagcgcagcttttggtcaaccccaaaaaaataataaagaagccagaatatgatttggaggaagatgaccaggaggtcttaaaagatcagaactatgtggaaa

SEQ ID NO: 21158 - DNA, 2501 bp, Homo sapiens
  source 1..2501: mol_type = unassigned DNA
gagtgcatctggaatacgcagagtcagtaagaccatggctacgtcctcgatgtctaagggttgctttgtttttaagccaaactccaaaaagagaaagatctctctgccaatagaggactattttaacaaagggaaaaatgagcctgaggacagtaagcttcgattcgaaacttatcagttgatatggcagcagatgaaatctgaaaatgagcgactacaagaggaattaaataaaaacttgtttgacaatctgattgaatttctgcaaaaatcacattctggattccagaagaattcaagagacttgggcggtcaaataaaactcagagaaattccaactgctgctcttgttcttggtgtgaatgtcacagatcatgatttgacattcggaagtctaacagaggcccttcagaataatgtcacaccatatgtagtctcattgcaagctaaagattgtccagatatgaaacattttttgcaaaagttgatctcacagttgatggactgctgtgtagatataaaatccaaagaggaggaaagtgttcacgtcacccaaagaaagacacattattcaatggattcactttccagttggtatatgactgtcacacagaagacggacccaaaaatgctaagcaaaaaaaggactacttctagccaatggcagtctcctcctgttgtcgttatcttgaaggatatggaaagctttgccacaaaagtactacaagacttcataattatcagcagtcaacatctccatgaatttccactaatactcatttttggaatagccacatctcctattatcatccaccgattgcttcctcatgcagtatcatctctattgtgcatagaactgttccaatctttgtcttgtaaggagcacctgactacggtactcgataagctacttcttacaactcagtttccctttaaaataaatgaaaaagtattacaggttctgaccaacatctttttgtatcatgatttctcagttcaaaactttataaaaggacttcagctttctctattagagcatttctattcccagcccttaagtgtcctgtgctgtaatcttccagaagccaaaagaagaataaattttttatcaaataatcaatgtgaaaacatccgacgtctaccatcttttaggaggtacgtggaaaagcaagcttcagaaaagcaagttgcgctcttgaccaatgagagatatttgaaggaggaaacacaattattactagaaaacctgcatgtttatcatatgaattacttcctggttttgagatgtcttcataagttcacctcttctcttcccaagtatccactaggtcgacagatcagagagttgtactgtacatgtttagaaaagaacatatgggattcagaggagtatgcatcagtcttgcagctgctgaggatgttggcaaaggatgaactgatgaccatacttgagaaatgtttcaaggtttttaagtcttattgtgaaaaccaccttggcagcacagctaagagaatagaggagttcctggcccagtttcagagcctcgatgcagaaaccaaagaggaagaagatgcttctgggtcacagccaaaggggcttcagaagacagacctctatcatcttcagaagtccttattggaaatgaaggagttaagaagaagtaagaagcaaaccaaatttgaagtactcagagaaaatgttgtgaacttcattgactgtctagtgagagaataccttctgcctcctgagacacagcctctccatgaggtggtgtacttcagtgctgcccatgcccttcgtgagcatttaaatgctgctccgcgaattgccctccatactgcactcaacaatccttactattatctcaagaatgaagcactgaaaagcgaagaaggctgcattccgaatatcgccccagacatctgcatagcatacaaactgcacctagagtgtagcaggctcatcaacctcgtggactggtcagaggcttttgcaacagttgtgacagctgctgaaaaaatggatgcaaattctgcaacctcagaagaaatgaatgaaattatccatgctcggtttattagagctgtttctgaactagaacttttaggatttataaaacctaccaaacagaagactgaccatgtggcaagactaacatggggaggctgctagaaagcaaataagcaaagccagaactatcacatttagcttaagagaaaaaggtgaccagtcatatttacatatattagaggagcctgttttgttgagaagataaatgtgtaacccccattgatgtttaaccagaaaagtacattgctaaccccaaacaggcatgtatcaaaacacctgtggagtactttagactccaacaaataataatgtaactaaaactgctcacacattttactgtactttccaaagtcattactaaattgtgagtaaatcattcttgaacttagagtatgtaaatgtaataaattccgttatccaggagtataaa

SEQ ID NO: 21159 - DNA, 2512 bp, Homo sapiens
  source 1..2512: mol_type = unassigned DNA
gcgcgggaaatcccgagtgcatctggaatacgcagagtcagtaagaccatggctacgtcctcgatgtctaagggttgctttgtttttaagccaaactccaaaaagagaaagatctctctgccaatagaggactattttaacaaagggaaaaatgagcctgaggacagtaagcttcgattcgaaacttatcagttgatatggcagcagatgaaatctgaaaatgagcgactacaagaggaattaaataaaaacttgtttgacaatctgattgaatttctgcaaaaatcacattctggattccagaagaattcaagagacttgggcggtcaaataaaactcagagaaattccaactgctgctcttgttcttggtgtgaatgtcacagatcatgatttgacattcggaagtctaacagaggcccttcagaataatgtcacaccatatgtagtctcattgcaagctaaagattgtccagatatgaaacattttttgcaaaagttgatctcacagttgatggactgctgtgtagatataaaatccaaagaggaggaaagtgttcacgtcacccaaagaaagacacattattcaatggattcactttccagttggtatatgactgtcacacagaagacggacccaaaaatgctaagcaaaaaaaggactacttctagccaatggcagtctcctcctgttgtcgttatcttgaaggatatggaaagctttgccacaaaagtactacaagacttcataattatcagcagtcaacatctccatgaatttccactaatactcatttttggaatagccacatctcctattatcatccaccgattgcttcctcatgcagtatcatctctattgtgcatagaactgttccaatctttgtcttgtaaggagcacctgactacggtactcgataagctacttcttacaactcagtttccctttaaaataaatgaaaaagtattacaggttctgaccaacatctttttgtatcatgatttctcagttcaaaactttataaaaggacttcagctttctctattagagcatttctattcccagcccttaagtgtcctgtgctgtaatcttccagaagccaaaagaagaataaattttttatcaaataatcaatgtgaaaacatccgacgtctaccatcttttaggaggtacgtggaaaagcaagcttcagaaaagcaagttgcgctcttgaccaatgagagatatttgaaggaggaaacacaattattactagaaaacctgcatgtttatcatatgaattacttcctggttttgagatgtcttcataagttcacctcttctcttcccaagtatccactaggtcgacagatcagagagttgtactgtacatgtttagaaaagaacatatgggattcagaggagtatgcatcagtcttgcagctgctgaggatgttggcaaaggatgaactgatgaccatacttgagaaatgtttcaaggtttttaagtcttattgtgaaaaccaccttggcagcacagctaagagaatagaggagttcctggcccagtttcagagcctcgatgaaaccaaagaggaagaagatgcttctgggtcacagccaaaggggcttcagaagacagacctctatcatcttcagaagtccttattggaaatgaaggagttaagaagaagtaagaagcaaaccaaatttgaagtactcagagaaaatgttgtgaacttcattgactgtctagtgagagaataccttctgcctcctgagacacagcctctccatgaggtggtgtacttcagtgctgcccatgcccttcgtgagcatttaaatgctgctccgcgaattgccctccatactgcactcaacaatccttactattatctcaagaatgaagcactgaaaagcgaagaaggctgcattccgaatatcgccccagacatctgcatagcatacaaactgcacctagagtgtagcaggctcatcaacctcgtggactggtcagaggcttttgcaacagttgtgacagctgctgaaaaaatggatgcaaattctgcaacctcagaagaaatgaatgaaattatccatgctcggtttattagagctgtttctgaactagaacttttaggatttataaaacctaccaaacagaagactgaccatgtggcaagactaacatggggaggctgctagaaagcaaataagcaaagccagaactatcacatttagcttaagagaaaaaggtgaccagtcatatttacatatattagaggagcctgttttgttgagaagataaatgtgtaacccccattgatgtttaaccagaaaagtacattgctaaccccaaacaggcatgtatcaaaacacctgtggagtactttagactccaacaaataataatgtaactaaaactgctcacacattttactgtactttccaaagtcattactaaattgtgagtaaatcattcttgaacttagagtatgtaaatgtaataaattccgttatccaggagtataaa

SEQ ID NO: 21160 - DNA, 2050 bp, Homo sapiens
  source 1..2050: mol_type = unassigned DNA
ggaatacgcagagtcagtaagaccatggctacgtcctcgatgtctaagggttgctttgtttttaagccaaactccaaaaagagaaagatctctctgccaataggcattggtcaaagagataagaggacaccccagggctctaattgaaaagagaatccaattacaccttccaaagaggactattttaacaaagggaaaaatgagcctgaggacagtaagcttcgattcgaaacttatcagttgatatggcagcagatgaaatctgaaaatgagcgactacaagaggaattaaataaaaacttgtttgacaatctgattgaatttctgcaaaaatcacattctggattccagaagaattcaagagacttgggcggtcaaataaaactcagagaaattccaactgctgctcttgttcttggtgtgaatgtcacagatcatgatttgacattcggaagtctaacagaggcccttcagaataatgtcacaccatatgtagtctcattgcaagctaaagattgtccagatatgaaacattttttgcaaaagttgatctcacagttgatggactgctgtgtagatataaaatccaaagaggaggaaagtgttcacgtcacccaaagaaagacacattattcaatggattcactttccagttggtatatgactgtcacacagaagacggacccaaaaatgctaagcaaaaaaaggactacttctagccaatggcagtctcctcctgttgtcgttatcttgaaggatatggaaagctttgccacaaaagtactacaagacttcataattatcagcagtcaacatctccatgaatttccactaatactcatttttggaatagccacatctcctattatcatccaccgattgcttcctcatgcagtatcatctctattgtgcatagaactgttccaatctttgtcttgtaaggagcacctgactacggtactcgataagctacttcttacaactcagtttccctttaaaataaatgaaaaagtattacaggttctgaccaacatctttttgtatcatgatttctcagttcaaaactttataaaaggacttcagctttctctattagagcatttctattcccagcccttaagtgtcctgtgctgtaatcttccagaagccaaaagaagaataaattttttatcaaataatcaatgtgaaaacatccgacgtctaccatcttttaggaggtacgtggaaaagcaagcttcagaaaagcaagttgcgctcttgaccaatgagagatatttgaaggaggaaacacaattattactagaaaacctgcatgtttatcatatgaattacttcctggttttgagatgtcttcataagttcacctcttctcttcccaagtatccactaggtcgacagatcagagagttgtactgtacatgtttagaaaagaacatatgggattcagaggagtatgcatcagtcttgcagctgctgaggctaggtttggccttccttgatattcagttatttggagctcaaagtggacaagagctgttgctgcccctatcctgggaagctaatccttcacatgctgctaacttgggttagatcttctgccagcagaacctcacccgtctttcccctccaagcaagtcagtgccggtgattccttggacaccagaaatgctaatcttgtctatttgaataggcctaaaggatgttggcaaaggatgaactgatgaccatacttgagaaatgtttcaaggtttttaagtcttattgtgaaaaccaccttggcagcacagctaagagaatagaggagttcctggcccagtttcagagcctcgatgcagaaaccaaagaggaagaagatgcttctgggtcacagccaaaggggcttcagaagacagacctctatcatcttcagaagtccttattggaaatgaaggagttaagaagaagtaagaagcaaaccaaatttgaagtactcagagaaaatgttgtgaacttcattgactgtctagtgagagaataccttctgcctcctgagacacagcctctccatgag

SEQ ID NO: 21161 - DNA, 2106 bp, Homo sapiens
  source 1..2106: mol_type = unassigned DNA
ctggaatacgcagagtcagtaagaccatggctacgtcctcgatgtctaagggttgctttgtttttaagccaaactccaaaaagagaaagatctctctgccaatagcgactacaagaggaattaaataaaaacttgtttgacaatctgattgaatttctgcaaaaatcacattctggattccagaagaattcaagagacttgggcggtcaaataaaactcagagaaattccaactgctgctcttgttcttggtgtgaatgtcacagatcatgatttgacattcggaagtctaacagaggcccttcagaataatgtcacaccatatgtagtctcattgcaagctaaagattgtccagatatgaaacattttttgcaaaagttgatctcacagttgatggactgctgtgtagatataaaatccaaagaggaggaaagtgttcacgtcacccaaagaaagacacattattcaatggattcactttccagttggtatatgactgtcacacagaagacggacccaaaaatgctaagcaaaaaaaggactacttctagccaatggcagtctcctcctgttgtcgttatcttgaaggatatggaaagctttgccacaaaagtactacaagacttcataattatcagcagtcaacatctccatgaatttccactaatactcatttttggaatagccacatctcctattatcatccaccgattgcttcctcatgcagtatcatctctattgtgcatagaactgttccaatctttgtcttgtaaggagcacctgactacggtactcgataagctacttcttacaactcagtttccctttaaaataaatgaaaaagtattacaggttctgaccaacatctttttgtatcatgatttctcagttcaaaactttataaaaggacttcagctttctctattagagcatttctattcccagcccttaagtgtcctgtgctgtaatcttccagaagccaaaagaagaataaattttttatcaaataatcaatgtgaaaacatccgacgtctaccatcttttaggaggtacgtggaaaagcaagcttcagaaaagcaagttgcgctcttgaccaatgagagatatttgaaggaggaaacacaattattactagaaaacctgcatgtttatcatatgaattacttcctggttttgagatgtcttcataagttcacctcttctcttcccaagtatccactaggtcgacagatcagagagttgtactgtacatgtttagaaaagaacatatgggattcagaggagtatgcatcagtcttgcagctgctgaggatgttggcaaaggatgaactgatgaccatacttgagaaatgtttcaaggtttttaagtcttattgtgaaaaccaccttggcagcacagctaagagaatagaggagttcctggcccagtttcagagcctcgatgaaaccaaagaggaagaagatgcttctgggtcacagccaaaggggcttcagaagacagacctctatcatcttcagaagtccttattggaaatgaaggagttaagaagaagtaagaagcaaaccaaatttgaagtactcagagaaaatgttgtgaacttcattgactgtctagtgagagaataccttctgcctcctgagacacagcctctccatgaggtggtgtacttcagtgctgcccatgcccttcgtgagcatttaaatgctgctccgcgaattgccctccatactgcactcaacaatccttactattatctcaagaatgaagcactgaaaagcgaagaaggctgcattccgaatatcgccccagacatctgcatagcatacaaactgcacctagagtgtagcaggctcatcaacctcgtggactggtcagaggcttttgcaacagttgtgacagctgctgaaaaaatggatgcaaattctgcaacctcagaagaaatgaatgaaattatccatgctcggtttattagagctgtttctgaactagaacttttaggatttataaaacctaccaaacagaagactgaccatgtggcaagactaacatggggaggctgctagaaagcaaataagcaaagccagaactatcacatttagcttaag

SEQ ID NO: 21162 - DNA, 2806 bp, Homo sapiens
  source 1..2806: mol_type = unassigned DNA
gagctggggaagtggctgctcctgggtgtagtgagatgtctccagccagggccaagcagcagcagtagcagcagcagcagtagcagcagcagcagcaacagcagcagcagcagcaacagcagcagcaaagggatttgaatttgttgaaatgagcagtcgtaaatcaaagagtaacagcttaattcacacagagtgcctttcacaggtacaaagaattttacgtgaaagattttgtcgtcagagtccacatagtaacctatttggagtgcaagtacaatacaaacacttaagtgagctgctgaaaagaactgctctccatggagagagtaactctgtccttattatcggaccccgaggatcaggaaaaactatgttaataaatcatgctttgaaagaactcatggaaatagaagaagtgagtgaaaatgtattacaagttcacttaaatggactgctgcagatcaatgacaaaatcgccctaaaggaaatcacaaggcagttaaatctggaaaatgtagttggagataaagtttttggaagctttgctgaaaacctttcatttcttctggaagctttaaaaaaaggtgaccgaactagcagttgcccagtgatcttcatattagatgaatttgatctttttgctcatcataaaaaccaaacacttctctataatctttttgacatttctcagtctgcacagaccccaatagcagttattggtcttacatgtagattggatattttggaactcttagaaaaaagagtgaagtcaagattttctcaccggcagatacacttaatgaattcatttggttttccacagtatgttaaaatatttaaagaacagttatctctacctgcagagtttccagacaaggtttttgctgagaagtggaatgaaaatgttcagtatctctcagaagatagaagtgtgcaagaagtactacagaagcatttcaatatcagcaaaaacctgcggtcattacacatgctattgatgcttgctttaaatcgagtaacagcatcgcacccatttatgactgccgtagatctaatggaagcaagccaactgtgtagcatggactcgaaagcaaatattgtacatggtctatcagtcttggaaatctgtcttataatagcaatgaaacatttaaatgacatctatgaggaagagccatttaattttcaaatggtctataatgagtttcagaagtttgttcaaaggaaagcacattccgtttataattttgaaaaacctgttgtcatgaaggcttttgaacacttgcagcaattagaattaataaagcccatggaaagaacttcaggaaattcacagagagagtaccagctgatgaaactgcttttggataatactcaaattatgaatgctctgcagaaatatcccaactgtcctacagatgtgaggcagtgggcaacatcctcactaagctggttatgaatataaccagtgacttcaactttggcatttcattcatacttctgtagagaacggaaaactattgtccattaacatgatatgctaaacattctataaacattcttgtatttatgtgagacttgcccatctactgtcttggctgtgtcttgccttttaatcatgaacagttacatgatttataatttcactgattgagattactttgtaagtagctgttcagaagaataaaatatgactgttttagggactagaccatgtgcttttttaacacttatatatataatggtctatttgaagagctcacttcaacctaacagctagatgtctttacaaaccttaaaccaaaggagtaaaaaaaacaatggtaagcactgaagtataataagtaacctttggtacagcaggtttgctgcagtgtttttttctgtccacatgcaaattttggattctatcccagacccaggttttctagttcagaagactaaccagcttagtcagaagatggttccatggaagaaaaaggccaaggagtttgaagatttttcttctagacatctcaaaatgtggtactcataccatccacatcagaatcccttgtaggattttctaaaattacagattgttgagcctaccataggtcaaaaggactggaattttccttcttaacaagtatagtcatggcaccacgtaacattttggtcaatgacattgtataaagggtggtctcataagattataccatatttttactgtaccttttctatgtctaaatatacaaatgttttaccattgtgttacagttgcctacagtatgattacagtaacattctgtacagtgctatagctgaagagtaataggctaggctatctgtatagcctaagtgtgtaacaggctatatacatatcatcagggtctgtgtaagtatactctgtgatgttcatacagtgatgaaatcacccaaagacacatttctcagaacgtagccccatcatgaagtgacgtgactaccagagatttctggaaaagcactcccaaaagtaatgagatgtgtatggcaatgttaactgaacctgtttgtattaaaaagtaaatccctatgaggaatgtggaaatgtccgtcaaagcattgtcttttaagtaagttccaagatccatgaattaacagaggcatatatttaaaatgaaatttaatgagcacttagtgacttcatttgttcaagaatatttgatttcctattgtgtgcatgggaggtttacaaaagacagactgtccctatgcttgtgcagcttacaatctatttaactattagaggccctgtgagatgtaggcagttatttacagatga

SEQ ID NO: 21163 - DNA, 2517 bp, Homo sapiens
  source 1..2517: mol_type = unassigned DNA
gtccgcagcggcaggtgaagtctagcagaggacgcggccaggcgattcggtgaagcgattcctgcaggcgttggttcccctctttgacctggatttgaatttgttgaaatgagcagtcgtaaatcaaagagtaacagcttaattcacacagagtgcctttcacaggtacaaagaattttacgtgaaagattttgtcgtcagagtccacatagtaacctatttggagtgcaagtacaatacaaacacttaagtgagctgctgaaaagaactgctctccatggagagagtaactctgtccttattatcggaccccgaggatcaggaaaaactatgttaataaatcatgctttgaaagaactcatggaaatagaagaagtgagtgaaaatgtattacaagttcacttaaatggactgctgcagatcaatgacaaaatcgccctaaaggaaatcacaaggcagttaaatctggaaaatgtagttggagataaagtttttggaagctttgctgaaaacctttcatttcttctggaagctttaaaaaaaggtgaccgaactagcagttgcccagtgatcttcatattagatgaatttgatctttttgctcatcataaaaaccaaacacttctctataatctttttgacatttctcagtctgcacagaccccaatagcagttattggtcttacatgtagattggatattttggaactcttagaaaaaagagtgaagtcaagattttctcaccggcagatacacttaatgaattcatttggttttccacagtatgttaaaatatttaaagaacagttatctctacctgcagagtttccagacaaggtttttgctgagaagtggaatgaaaatgttcagtatctctcagaagatagaagtgtgcaagaagtactacagaagcatttcaatatcagcaaaaacctgcggtcattacacatgctattgatgcttgctttaaatcgagtaacagcatcgcacccatttatgactgccgtagatctaatggaagcaagccaactgtgtagcatggactcgaaagcaaatattgtacatggtctatcagtcttggaaatctgtcttataatagcaatgaaacatttaaatgacatctatgaggaagagccatttaattttcaaatggtctataatgagtttcagaagtttgttcaaaggaaagcacattccgtttataattttgaaaaacctgttgtcatgaaggcttttgaacacttgcagcaattagaattaataaagcccatggaaagaacttcaggaaattcacagagagagtaccagctgatgaaactgcttttggataatactcaaattatgaatgctctgcagaaatatcccaactgtcctacagatgtgaggcagtgggcaacatcctcactaagctggttatgaatataaccagtgacttcaactttggcatttcattcatacttctgtagagaacggaaaactattgtccattaacatgatatgctaaacattctataaacattcttgtatttatgtgagacttgcccatctactgtcttggctgtgtcttgccttttaatcatgaacagttacatgatttataatttcactgattgagattactttgtaagtagctgttcagaagaataaaatatgactgttttagggactagaccatgtgcttttttaacacttatatatataatggtctatttgaagagctcacttcaacctaacagctagatgtctttacaaaccttaaaccaaaggagtaaaaaaaacaatggtaagcactgaagtataataagtaacctttggtacagcaggtttgctgcagtgtttttttctgtccacatgcaaattttggattctatcccagacccaggttttctagttcagaagactaaccagcttagtcagaagatggttccatggaagaaaaaggccaaggagtttgaagatttttcttctagacatctcaaaatgtggtactcataccatccacatcagaatcccttgtaggattttctaaaattacagattgttgagcctaccataggtcaaaaggactggaattttccttcttaacaagtatagtcatggcaccacgtaacattttggtcaatgacattgtataaagggtggtctcataagattataccatatttttactgtaccttttctatgtctaaatatacaaatgttttaccattgtgttacagttgcctacagtatgattacagtaacattctgtacagtgctatagctgaagagtaataggctaggctatctgtatagcctaagtgtgtaacaggctatatacatatcatcagggtctgtgtaagtatactctgtgatgttcatacagtgatgaaatcacccaaagacacatttctcagaacgtagccccatcatgaagtgacgtgactaccagagatttctggaaaagcactcccaaaagtaatgagatgtgtatggcaatgttaactgaacctgtttgtattaaaaagtaaatcccta

SEQ ID NO: 21164 - DNA, 2818 bp, Homo sapiens
  source 1..2818: mol_type = unassigned DNA
ggggcatgccgggagtggttgtgtacggtccgcagcggcaggtgaagtctagcagaggacgcggccaggcgattcggtgaagcgattcctgcaggcgttggttcccctctttgacctggtaaatgcaggcttttatgcgagaggatttgaatttgttgaaatgagcagtcgtaaatcaaagagtaacagcttaattcacacagagtgcctttcacaggtacaaagaattttacgtgaaagattttgtcgtcagagtccacatagtaacctatttggagtgcaagtacaatacaaacacttaagtgagctgctgaaaagaactgctctccatggagagagtaactctgtccttattatcggaccccgaggatcaggaaaaactatgttaataaatcatgctttgaaagaactcatggaaatagaagaagtgagtgaaaatgtattacaagttcacttaaatggactgctgcagatcaatgacaaaatcgccctaaaggaaatcacaaggcagttaaatctggaaaatgtagttggagataaagtttttggaagctttgctgaaaacctttcatttcttctggaagctttaaaaaaaggtgaccgaactagcagttgcccagtgatcttcatattagatgaatttgatctttttgctcatcataaaaaccaaacacttctctataatctttttgacatttctcagtctgcacagaccccaatagcagttattggtcttacatgtagattggatattttggaactcttagaaaaaagagtgaagtcaagattttctcaccggcagatacacttaatgaattcatttggttttccacagtatgttaaaatatttaaagaacagttatctctacctgcagagtttccagacaaggtttttgctgagaagtggaatgaaaatgttcagtatctctcagaagatagaagtgtgcaagaagtactacagaagcatttcaatatcagcaaaaacctgcggtcattacacatgctattgatgcttgctttaaatcgagtaacagcatcgcacccatttatgactgccgtagatctaatggaagcaagccaactgtgtagcatggactcgaaagcaaatattgtacatggtctatcagtcttggaaatctgtcttataatagcaatgaaacatttaaatgacatctatgaggaagagccatttaattttcaaatggtctataatgagtttcagaagtttgttcaaaggaaagcacattccgtttataattttgaaaaacctgttgtcatgaaggcttttgaacacttgcagcaattagaattaataaagcccatggaaagaacttcaggaaattcacagagagagtaccagctgatgaaactgcttttggataatactcaaattatgaatgctctgcagaaatatcccaactgtcctacagatgtgaggcagtgggcaacatcctcactaagctggttatgaatataaccagtgacttcaactttggcatttcattcatacttctgtagagaacggaaaactattgtccattaacatgatatgctaaacattctataaacattcttgtatttatgtgagacttgcccatctactgtcttggctgtgtcttgccttttaatcatgaacagttacatgatttataatttcactgattgagattactttgtaagtagctgttcagaagaataaaatatgactgttttagggactagaccatgtgcttttttaacacttatatatataatggtctatttgaagagctcacttcaacctaacagctagatgtctttacaaaccttaaaccaaaggagtaaaaaaaacaatggtaagcactgaagtataataagtaacctttggtacagcaggtttgctgcagtgtttttttctgtccacatgcaaattttggattctatcccagacccaggttttctagttcagaagactaaccagcttagtcagaagatggttccatggaagaaaaaggccaaggagtttgaagatttttcttctagacatctcaaaatgtggtactcataccatccacatcagaatcccttgtaggattttctaaaattacagattgttgagcctaccataggtcaaaaggactggaattttccttcttaacaagtatagtcatggcaccacgtaacattttggtcaatgacattgtataaagggtggtctcataagattataccatatttttactgtaccttttctatgtctaaatatacaaatgttttaccattgtgttacagttgcctacagtatgattacagtaacattctgtacagtgctatagctgaagagtaataggctaggctatctgtatagcctaagtgtgtaacaggctatatacatatcatcagggtctgtgtaagtatactctgtgatgttcatacagtgatgaaatcacccaaagacacatttctcagaacgtagccccatcatgaagtgacgtgactaccagagatttctggaaaagcactcccaaaagtaatgagatgtgtatggcaatgttaactgaacctgtttgtattaaaaagtaaatccctatgaggaatgtggaaatgtccgtcaaagcattgtcttttaagtaagttccaagatccatgaattaacagaggcatatatttaaaatgaaatttaatgagcacttagtgacttcatttgttcaagaatatttgatttcctattgtgtgcatgggaggtttacaaaagacagactgtccctatgcttgtgcagcttacaatctatttaactattagaggccctgtgagatgtaggcagttatttacagatga

SEQ ID NO: 21165 - DNA, 571 bp, Homo sapiens
  source 1..571: mol_type = unassigned DNA
ggctgctcctgggtgtagtgagatgtctccagccagggccaagcagcagcagtagcagcagcagcagtagcagcagcagcagcaacagcagcagcagcagcaacagcagcagcaaagggatttgaatttgttgaaatgagcagtcgtaaatcaaagagtaacagcttaattcacacagagtgcctttcacaggtacaaagaattttacgtgaaagattttgtcgtcagagtccacatagtaacctatttggagtgcaagtacaatacaaacacttaagtgagctgctgaaaagaactgctctccatggagagagtaactctgtccttattatcggaccccgaggatcaggaaaaactatgttaataaatcatgctttgaaagaactcatggaaatagaagaagtgagtgaaaatgtattacaagttcacttaaatggactgctgcagatcaatgacaaaatcgccctaaaggaaatcacaaggcagttaaatctggaaaatgtagttggagataaagtttttggaagctttgctgaaaacctttcatttcttctggaagctttaaaaaaag

SEQ ID NO: 21166 - DNA, 552 bp, Homo sapiens
  source 1..552: mol_type = unassigned DNA
gtgcgtgcgcggggcatgccgggagtggttgtgtacggtccgcagcggcaggtgaagtctagcagaggacgcggccaggcgattcggtgaagcgattcctgcaggcgttggttcccctctttgacctggtaaatgcaggcttttatgcgagaggatttgaatttgttgaaatgagcagtcgtaaatcaaagagtaacagcttaattcacacagagtgcctttcacaggtacaaagaattttacgtgaaagattttgtcgtcagagtccacatagtaacctatttggagtgcaagtacaatacaaacacttaagtgagctgctgaaaagaactgctctccatggagagagtaactctgtccttattatcggaccccgaggatcaggaaaaactatgttaataaatcatgctttgaaagaactcatggaaatagaagaagtgagtgaaaatgtattacaagttcacttaaatggactgctgcagatcaatgacaaaatcgccctaaaggaaatcacaaggcagttaaatctggaaaatgtagttggagataaag

SEQ ID NO: 21167 - DNA, 647 bp, Homo sapiens
  source 1..647: mol_type = unassigned DNA
ggtccgcagcggcaggtgaagtctagcagaggacgcggccaggcgattcggtgaagcgattcctgcaggcgttggttcccctctttgacctggaagcctggagccagaggacttttggtggctgaggccttagctacctggcttacacattaaggaggacacagatttgcttgctgtctgtctgtcaaggcctggctcagctaaggacctgttaacatttctagagaagaaaacagcattaccatggatttgaatttgttgaaatgagcagtcgtaaatcaaagagtaacagcttaattcacacagagtgcctttcacaggtacaaagaattttacgtgaaagattttgtcgtcagagtccacatagtaacctatttggagtgcaagtacaatacaaacacttaagtgagctgctgaaaagaactgctctccatggagagagtaactctgtccttattatcggaccccgaggatcaggaaaaactatgttaataaatcatgctttgaaagaactcatggaaatagaagaagtgagtgaaaatgtattacaagttcacttaaatggactgctgcagatcaatgacaaaatcgccctaaaggaaatcacaaggcagttaaatctggaaaatgtagttggagataaagtt

SEQ ID NO: 21168 - DNA, 3091 bp, Homo sapiens
  source 1..3091: mol_type = unassigned DNA
ggaagtcgctacgcttttaacacccccagctccctcctccttcctaagggaaagtggaggaacggaagtgggcgtggacggagacgaaaggaggtcacgtgtttgggcgggagaggggcggggtgggagaggtagtgcgtgcgcggggcatgccgggagtggttgtgtacggtccgcagcggcaggtgaagtctagcagaggacgcggccaggcgattcggtgaagcgattcctgcaggcgttggttcccctctttgacctggaagcctggagccagaggacttttggtggctgaggccttagctacctggcttacacattaaggaggacacagatttgcttgctgtctgtctgtcaaggcctggctcagctaaggacctgttaacatttctagagaagaaaacagcattaccatggatttgaatttgttgaaatgagcagtcgtaaatcaaagagtaacagcttaattcacacagagtgcctttcacaggtacaaagaattttacgtgaaagattttgtcgtcagagtccacatagtaacctatttggagtgcaagtacaatacaaacacttaagtgagctgctgaaaagaactgctctccatggagagagtaactctgtccttattatcggaccccgaggatcaggaaaaactatgttaataaatcatgctttgaaagaactcatggaaatagaagaagtgagtgaaaatgtattacaagttcacttaaatggactgctgcagatcaatgacaaaatcgccctaaaggaaatcacaaggcagttaaatctggaaaatgtagttggagataaagtttttggaagctttgctgaaaacctttcatttcttctggaagctttaaaaaaaggtgaccgaactagcagttgcccagtgatcttcatattagatgaatttgatctttttgctcatcataaaaaccaaacacttctctataatctttttgacatttctcagtctgcacagaccccaatagcagttattggtcttacatgtagattggatattttggaactcttagaaaaaagagtgaagtcaagattttctcaccggcagatacacttaatgaattcatttggttttccacagtatgttaaaatatttaaagaacagttatctctacctgcagagtttccagacaaggtttttgctgagaagtggaatgaaaatgttcagtatctctcagaagatagaagtgtgcaagaagtactacagaagcatttcaatatcagcaaaaacctgcggtcattacacatgctattgatgcttgctttaaatcgagtaacagcatcgcacccatttatgactgccgtagatctaatggaagcaagccaactgtgtagcatggactcgaaagcaaatattgtacatggtctatcagtcttggaaatctgtcttataatagcaatgaaacatttaaatgacatctatgaggaagagccatttaattttcaaatggtctataatgagtttcagaagtttgttcaaaggaaagcacattccgtttataattttgaaaaacctgttgtcatgaaggcttttgaacacttgcagcaattagaattaataaagcccatggaaagaacttcaggaaattcacagagagagtaccagctgatgaaactgcttttggataatactcaaattatgaatgctctgcagaaatatcccaactgtcctacagatgtgaggcagtgggcaacatcctcactaagctggttatgaatataaccagtgacttcaactttggcatttcattcatacttctgtagagaacggaaaactattgtccattaacatgatatgctaaacattctataaacattcttgtatttatgtgagacttgcccatctactgtcttggctgtgtcttgccttttaatcatgaacagttacatgatttataatttcactgattgagattactttgtaagtagctgttcagaagaataaaatatgactgttttagggactagaccatgtgcttttttaacacttatatatataatggtctatttgaagagctcacttcaacctaacagctagatgtctttacaaaccttaaaccaaaggagtaaaaaaaacaatggtaagcactgaagtataataagtaacctttggtacagcaggtttgctgcagtgtttttttctgtccacatgcaaattttggattctatcccagacccaggttttctagttcagaagactaaccagcttagtcagaagatggttccatggaagaaaaaggccaaggagtttgaagatttttcttctagacatctcaaaatgtggtactcataccatccacatcagaatcccttgtaggattttctaaaattacagattgttgagcctaccataggtcaaaaggactggaattttccttcttaacaagtatagtcatggcaccacgtaacattttggtcaatgacattgtataaagggtggtctcataagattataccatatttttactgtaccttttctatgtctaaatatacaaatgttttaccattgtgttacagttgcctacagtatgattacagtaacattctgtacagtgctatagctgaagagtaataggctaggctatctgtatagcctaagtgtgtaacaggctatatacatatcatcagggtctgtgtaagtatactctgtgatgttcatacagtgatgaaatcacccaaagacacatttctcagaacgtagccccatcatgaagtgacgtgactaccagagatttctggaaaagcactcccaaaagtaatgagatgtgtatggcaatgttaactgaacctgtttgtattaaaaagtaaatccctatgaggaatgtggaaatgtccgtcaaagcattgtcttttaagtaagttccaagatccatgaattaacagaggcatatatttaaaatgaaatttaatgagcacttagtgacttcatttgttcaagaatatttgatttcctattgtgtgcatgggaggtttacaaaagacagactgtccctatgcttgtgcagcttacaatctatttaactattagaggccctgtgagatgtaggcagttatttacagatga

SEQ ID NO: 21169 - DNA, 2695 bp, Homo sapiens
  source 1..2695: mol_type = unassigned DNA
ggaagtcgctacgcttttaacacccccagctccctcctccttcctaagggaaagtggaggaacggaagtgggcgtggacggagacgaaaggaggtcacgtgtttgggcgggagaggggcggggtgggagaggtagtgcgtgcgcggggcatgccgggagtggttgtgtacggtccgcagcggcaggtgaagtctagcagaggacgcggccaggcgattcggtgaagcgattcctgcaggcgttggttcccctctttgacctgttaataaatcatgctttgaaagaactcatggaaatagaagaagtgagtgaaaatgtattacaagttcacttaaatggactgctgcagatcaatgacaaaatcgccctaaaggaaatcacaaggcagttaaatctggaaaatgtagttggagataaagtttttggaagctttgctgaaaacctttcatttcttctggaagctttaaaaaaaggtgaccgaactagcagttgcccagtgatcttcatattagatgaatttgatctttttgctcatcataaaaaccaaacacttctctataatctttttgacatttctcagtctgcacagaccccaatagcagttattggtcttacatgtagattggatattttggaactcttagaaaaaagagtgaagtcaagattttctcaccggcagatacacttaatgaattcatttggttttccacagtatgttaaaatatttaaagaacagttatctctacctgcagagtttccagacaaggtttttgctgagaagtggaatgaaaatgttcagtatctctcagaagatagaagtgtgcaagaagtactacagaagcatttcaatatcagcaaaaacctgcggtcattacacatgctattgatgcttgctttaaatcgagtaacagcatcgcacccatttatgactgccgtagatctaatggaagcaagccaactgtgtagcatggactcgaaagcaaatattgtacatggtctatcagtcttggaaatctgtcttataatagcaatgaaacatttaaatgacatctatgaggaagagccatttaattttcaaatggtctataatgagtttcagaagtttgttcaaaggaaagcacattccgtttataattttgaaaaacctgttgtcatgaaggcttttgaacacttgcagcaattagaattaataaagcccatggaaagaacttcaggaaattcacagagagagtaccagctgatgaaactgcttttggataatactcaaattatgaatgctctgcagaaatatcccaactgtcctacagatgtgaggcagtgggcaacatcctcactaagctggttatgaatataaccagtgacttcaactttggcatttcattcatacttctgtagagaacggaaaactattgtccattaacatgatatgctaaacattctataaacattcttgtatttatgtgagacttgcccatctactgtcttggctgtgtcttgccttttaatcatgaacagttacatgatttataatttcactgattgagattactttgtaagtagctgttcagaagaataaaatatgactgttttagggactagaccatgtgcttttttaacacttatatatataatggtctatttgaagagctcacttcaacctaacagctagatgtctttacaaaccttaaaccaaaggagtaaaaaaaacaatggtaagcactgaagtataataagtaacctttggtacagcaggtttgctgcagtgtttttttctgtccacatgcaaattttggattctatcccagacccaggttttctagttcagaagactaaccagcttagtcagaagatggttccatggaagaaaaaggccaaggagtttgaagatttttcttctagacatctcaaaatgtggtactcataccatccacatcagaatcccttgtaggattttctaaaattacagattgttgagcctaccataggtcaaaaggactggaattttccttcttaacaagtatagtcatggcaccacgtaacattttggtcaatgacattgtataaagggtggtctcataagattataccatatttttactgtaccttttctatgtctaaatatacaaatgttttaccattgtgttacagttgcctacagtatgattacagtaacattctgtacagtgctatagctgaagagtaataggctaggctatctgtatagcctaagtgtgtaacaggctatatacatatcatcagggtctgtgtaagtatactctgtgatgttcatacagtgatgaaatcacccaaagacacatttctcagaacgtagccccatcatgaagtgacgtgactaccagagatttctggaaaagcactcccaaaagtaatgagatgtgtatggcaatgttaactgaacctgtttgtattaaaaagtaaatccctatgaggaatgtggaaatgtccgtcaaagcattgtcttttaagtaagttccaagatccatgaattaacagaggcatatatttaaaatgaaatttaatgagcacttagtgacttcatttgttcaagaatatttgatttcctattgtgtgcatgggaggtttacaaaagacagactgtccctatgcttgtgcagcttacaatctatttaactattagaggccctgtgagatgtaggcagttatttacagatga

SEQ ID NO: 21170 - DNA, 2863 bp, Homo sapiens
  source 1..2863: mol_type = unassigned DNA
ggaagtcgctacgcttttaacacccccagctccctcctccttcctaagggaaagtggaggaacggaagtgggcgtggacggagacgaaaggaggtcacgtgtttgggcgggagaggggcggggtgggagaggtagtgcgtgcgcggggcatgccgggagtggttgtgtacggtccgcagcggcaggtgaagtctagcagaggacgcggccaggcgattcggtgaagcgattcctgcaggcgttggttcccctctttgacctggtacaaagaattttacgtgaaagattttgtcgtcagagtccacatagtaacctatttggagtgcaagtacaatacaaacacttaagtgagctgctgaaaagaactgctctccatggagagagtaactctgtccttattatcggaccccgaggatcaggaaaaactatgttaataaatcatgctttgaaagaactcatggaaatagaagaagtgagtgaaaatgtattacaagttcacttaaatggactgctgcagatcaatgacaaaatcgccctaaaggaaatcacaaggcagttaaatctggaaaatgtagttggagataaagtttttggaagctttgctgaaaacctttcatttcttctggaagctttaaaaaaaggtgaccgaactagcagttgcccagtgatcttcatattagatgaatttgatctttttgctcatcataaaaaccaaacacttctctataatctttttgacatttctcagtctgcacagaccccaatagcagttattggtcttacatgtagattggatattttggaactcttagaaaaaagagtgaagtcaagattttctcaccggcagatacacttaatgaattcatttggttttccacagtatgttaaaatatttaaagaacagttatctctacctgcagagtttccagacaaggtttttgctgagaagtggaatgaaaatgttcagtatctctcagaagatagaagtgtgcaagaagtactacagaagcatttcaatatcagcaaaaacctgcggtcattacacatgctattgatgcttgctttaaatcgagtaacagcatcgcacccatttatgactgccgtagatctaatggaagcaagccaactgtgtagcatggactcgaaagcaaatattgtacatggtctatcagtcttggaaatctgtcttataatagcaatgaaacatttaaatgacatctatgaggaagagccatttaattttcaaatggtctataatgagtttcagaagtttgttcaaaggaaagcacattccgtttataattttgaaaaacctgttgtcatgaaggcttttgaacacttgcagcaattagaattaataaagcccatggaaagaacttcaggaaattcacagagagagtaccagctgatgaaactgcttttggataatactcaaattatgaatgctctgcagaaatatcccaactgtcctacagatgtgaggcagtgggcaacatcctcactaagctggttatgaatataaccagtgacttcaactttggcatttcattcatacttctgtagagaacggaaaactattgtccattaacatgatatgctaaacattctataaacattcttgtatttatgtgagacttgcccatctactgtcttggctgtgtcttgccttttaatcatgaacagttacatgatttataatttcactgattgagattactttgtaagtagctgttcagaagaataaaatatgactgttttagggactagaccatgtgcttttttaacacttatatatataatggtctatttgaagagctcacttcaacctaacagctagatgtctttacaaaccttaaaccaaaggagtaaaaaaaacaatggtaagcactgaagtataataagtaacctttggtacagcaggtttgctgcagtgtttttttctgtccacatgcaaattttggattctatcccagacccaggttttctagttcagaagactaaccagcttagtcagaagatggttccatggaagaaaaaggccaaggagtttgaagatttttcttctagacatctcaaaatgtggtactcataccatccacatcagaatcccttgtaggattttctaaaattacagattgttgagcctaccataggtcaaaaggactggaattttccttcttaacaagtatagtcatggcaccacgtaacattttggtcaatgacattgtataaagggtggtctcataagattataccatatttttactgtaccttttctatgtctaaatatacaaatgttttaccattgtgttacagttgcctacagtatgattacagtaacattctgtacagtgctatagctgaagagtaataggctaggctatctgtatagcctaagtgtgtaacaggctatatacatatcatcagggtctgtgtaagtatactctgtgatgttcatacagtgatgaaatcacccaaagacacatttctcagaacgtagccccatcatgaagtgacgtgactaccagagatttctggaaaagcactcccaaaagtaatgagatgtgtatggcaatgttaactgaacctgtttgtattaaaaagtaaatccctatgaggaatgtggaaatgtccgtcaaagcattgtcttttaagtaagttccaagatccatgaattaacagaggcatatatttaaaatgaaatttaatgagcacttagtgacttcatttgttcaagaatatttgatttcctattgtgtgcatgggaggtttacaaaagacagactgtccctatgcttgtgcagcttacaatctatttaactattagaggccctgtgagatgtaggcagttatttacagatga

SEQ ID NO: 21171 - DNA, 1441 bp, Homo sapiens
  source 1..1441: mol_type = unassigned DNA
ggggcatgccgggagtggttgtgtacggtccgcagcggcaggtgaagtctagcagaggacgcggccaggcgattcggtgaagcgattcctgcaggcgttggttcccctctttgacctggatttgaatttgttgaaatgagcagtcgtaaatcaaagagtaacagcttaattcacacagagtgcctttcacaggtacaaagaattttacgtgaaagattttgtcgtcagagtccacatagtaacctatttggagtgcaagtacaatacaaacacttaagtgagctgctgaaaagaactgctctccatggagagagtaactctgtccttattatcggaccccgaggatcaggaaaaactatggactgctgcagatcaatgacaaaatcgccctaaaggaaatcacaaggcagttaaatctggaaaatgtagttggagataaagtttttggaagctttgctgaaaacctttcatttcttctggaagctttaaaaaaaggatattttggaactcttagaaaaaagagtgaagtcaagattttctcaccggcagatacacttaatgaattcatttggttttccacagtatgttaaaatatttaaagaacagttatctctacctgcagagtttccagacaaggtttttgctgagaagtggaatgaaaatgttcagtatctctcagaagatagaagtgtgcaagaagtactacagaagcatttcaatatcagcaaaaacctgcggtcattacacatgctattgatgcttgctttaaatcgagtaacagcatcgcacccatttatgactgccgtagatctaatggaagcaagccaactgtgtagcatggactcgaaagcaaatattgtacatggtctatcagtcttggaaatctgtcttataatagcaatgaaacatttaaatgacatctatgaggaagagccatttaattttcaaatggtctataatgagtttcagaagtttgttcaaaggaaagcacattccgtttataattttgaaaaacctgttgtcatgaaggcttttgaacacttgcagcaattagaattaataaagcccatggaaagaacttcaggaaattcacagagagagtaccagctgatgaaactgcttttggataatactcaaattatgaatgctctgcagaaatatcccaactgtcctacagatgtgaggcagtgggcaacatcctcactaagctggttatgaatataaccagtgacttcaactttggcatttcattcatacttctgtagagaacggaaaactattgtccattaacatgatatgctaaacattctataaacattcttgtatttatgtgagacttgcccatctactgtcttggctgtgtcttgccttttaatcatgaacagttacatgatttataatttcactgattgagattactttgtaagtagctgttcagaag

SEQ ID NO: 21172 - DNA, 1958 bp, Homo sapiens
  source 1..1958: mol_type = unassigned DNA
agcccggcagcgcaggctcctcccacgacgctgcgggtccggtttccggcgggagcgtgggccgccagactcgggagaggctccgtcttgtgcaagggtcctgtgggctggctgcactggcctctgcggtggtgcctgccagaatgccccacttggaaaacgtggtgctttgtcgcgagtctcaagtgtccatcttgcagtccttgtttggagagagacatcatttcagctttccatccatttttatttatggacatactgctagtggaaagacctatgtaacacaaacgttgttgaaaactttagagctcccacatgtgtttgtgaattgtgttgaatgctttacattgaggctgcttttggaacaaattttaaacaaattgaatcatcttagttcttcagaggatggatgttctactgaaataacctgtgaaacatttaatgactttgttcgcttgtttaaacaagtaaccacagctgaaaatcttaaagatcagactgtatatattgttctagataaagcagagtatctaagagatatggaagcaaatcttttgcctggatttcttagattacaagaattggctgacagaaatgtgactgttctctttctcagtgaaattgtttgggaaaagtttcgtccaaatactggatgctttgagccgtttgtcttatatttccctgattacagcataggcaaccttcaaaagatcctgtcccatgatcatcctccagagtattcagctgatttctatgctgcctacattaacattcttcttggagttttctacactgtttgtcgagatttgaaagagctcagacatctggcagtacttaattttcctaaatattgtgaacccgtggttaaaggagaagcaagtgaacgtgatactcgcaaactgtggagaaatattgaacctcatttgaagaaagctatgcagactgtttatctcagggaaatatcaagttcccagtgggaaaagctacagaaagatgacacagatccggggcaactgaaaggcctctcagcgcatactcatgtggaacttccatattactctaagttcattctaattgctgcataccttgcttcatacaatccagcaagaactgacaagaggttttttcttaagcatcatggaaaaatcaagaaaaccaactttctaaaaaaacacgaaaagacaagcaatcatctccttgggccaaaaccatttccactagacagattattagcaatattatatagtatcgtggacagcagagttgctccaacagcaaatattttttcccagattacctctctagtgacccttcagctgttaaccctggttggccatgacgatcagcttgatggaccaaaatacaaatgcacagtgtctctagacttcatcagagctattgcaaggacggtgaactttgacataataaaatacttgtatgatttcttgtgaaaacaagcttcaaagccatatggacactgtgacaatgactaagccaagctgtgttcatccagctacttagctggccaaggagaggagttctttggctctattggatttgtccaaacaggtgctggcccagcatggaatctgatgaaaatattctgattggtctgggtggatgtgagcagaagactatttaccagggaccctggagtatttggaagcaacgtgttaattataaacagcagggtttgagcacaatctgttctactcttaatgatgttatcttaacactgaaattgcctgaaacccatttacttaggactacattttgctctgtgaactatcccctgcgctttgaacgtgccagcagcccttgtttatatgcccattcttttcacttcctctccacaggagcctctgcagtcgcttgccaaagcagattttcctaaggccactgttttaaaagatcatagttgcaaaatataataaatacaagttctttttaaaatccaa

SEQ ID NO: 21173 - DNA, 1409 bp, Homo sapiens
  source 1..1409: mol_type = unassigned DNA
tgcaagggtcctgtgggctggctgcactggcctctgcggtggtgcctgccagaatgccccacttggaaaacgtggtgctttgtcgcgagtctcaagtgtccatcttgcagtccttgtttggagagagacatcatttcagctttccatccatttttatttatggacatactgctagtggaaagacctatgtaacacaaacgttgttgaaaactttagagctcccacatgtgtttgtgaattgtgttgaatgctttacattgaggctgcttttggaacaaattttaaacaaattgaatcatcttagttcttcagaggatggatgttctactgaaataacctgtgaaacatttaatgactttgttcgcttgtttaaacaagtaaccacagctgaaaatcttaaagatcagactgtatatattgttctagataaagcagagtatctaagagatatggaagcaaatcttttgcctggatttcttagattacaagaattggctgacagaaatgtgactgttctctttctcagtgaaattgtttgggaaaagtttcgtccaaatactggatgctttgagccgtttgtcttatatttccctgattacagcataggcaaccttcaaaagatcctgtcccatgatcatcctccagagtattcagctgatttctatgctgcctacattaacattcttcttggagttttctacactgtttgtcgagatttgaaagagctcagacatctggcagtacttaattttcctaaatattgtgaacccgtggttaaaggagaagcaagtgaacgtgatactcgcaaactgtggagaaatattgaacctcatttgaagaaagctatgcagactgtttatctcagggaaatatcaagttcccagtgggaaaagctacagaaagatgacacagatccggggcaactgaaaggtatcagaggaagtattgagacagttaccggagatacttcttcagctaattatcaagatactaaagttaatactaaagagcattcagtcaggaaatagtgttataaaagagaatttacttttcaagctataatgctattttgattaatgatttttctttaactgaagctctaatttaatgggaggaaataaaagtttgaataccagctttctattttctaaatattggattatatcatgaaaatcaagcagtttctatttctttaaatgcttttattaaagcaatctaattatgtgacagttttatctcattatgtttatatttcatgagttttatggaataaaatgtaattttatgttaatcggtttgggatatgcactttggtggttatgttttgaaaacattgtgcttttgtttaagaaaactactactttggattcatcccaaatattaaatagaactaattttacttaaaaaaa

SEQ ID NO: 21174 - DNA, 2043 bp, Homo sapiens
  source 1..2043: mol_type = unassigned DNA
ggcgggagcgtgggccgccagactcgggagaggctccgtcttgtgcaagggtcctgtgggctggctgcactggcctctgcggtggtgcctgccagaatgccccacttggaaaacgtggtgctttgtcgcgagtctcaagtgtccatcttgcagtccttgtttggagagagacatcatttcagctttccatccatttttatttatggacatactgctagtggaaagacctatgtaacacaaacgttgttgaaaactttagagggactcagacaggcacttagaatatgctgcctttaaaagtcatggatggtacaaatgccgtaagcaagacactattcataacagagatgttgtggacttttgttcttaaaggacagtaaaggagtgagagagaactcccacatgtgtttgtgaattgtgttgaatgctttacattgaggctgcttttggaacaaattttaaacaaattgaatcatcttagttcttcagaggatggatgttctactgaaataacctgtgaaacatttaatgactttgttcgcttgtttaaacaagtaaccacagctgaaaatcttaaagatcagactgtatatattgttctagataaagcagagtatctaagagatatggaagcaaatcttttgcctggatttcttagattacaagaattggctgacagaaatgtgactgttctctttctcagtgaaattgtttgggaaaagtttcgtccaaatactggatgctttgagccgtttgtcttatatttccctgattacagcataggcaaccttcaaaagatcctgtcccatgatcatcctccagagtattcagctgatttctatgctgcctacattaacattcttcttggagttttctacactgtttgtcgagatttgaaagagctcagacatctggcagtacttaattttcctaaatattgtgaacccgtggttaaaggagaagcaagtgaacgtgatactcgcaaactgtggagaaatattgaacctcatttgaagaaagctatgcagactgtttatctcagggaaatatcaagttcccagtgggaaaagctacagaaagatgacacagatccggggcaactgaaaggcctctcagcgcatactcatgtggaacttccatattactctaagttcattctaattgctgcataccttgcttcatacaatccagcaagaactgacaagaggttttttcttaagcatcatggaaaaatcaagaaaaccaactttctaaaaaaacacgaaaagacaagcaatcatctccttgggccaaaaccatttccactagacagattattagcaatattatatagtatcgtggacagcagagttgctccaacagcaaatattttttcccagattacctctctagtgacccttcagctgttaaccctggttggccatgacgatcagcttgatggaccaaaatacaaatgcacagtgtctctagacttcatcagagctattgcaaggacggtgaactttgacataataaaatacttgtatgatttcttgtgaaaacaagcttcaaagccatatggacactgtgacaatgactaagccaagctgtgttcatccagctacttagctggccaaggagaggagttctttggctctattggatttgtccaaacaggtgctggcccagcatggaatctgatgaaaatattctgattggtctgggtggatgtgagcagaagactatttaccagggaccctggagtatttggaagcaacgtgttaattataaacagcagggtttgagcacaatctgttctactcttaatgatgttatcttaacactgaaattgcctgaaacccatttacttaggactacattttgctctgtgaactatcccctgcgctttgaacgtgccagcagcccttgtttatatgcccattcttttcacttcctctccacaggagcctctgcagtcgcttgccaaagcagattttcctaaggccactgttttaaaagatcatagttgcaaaatataataaatacaagttctttttaaaatcc

SEQ ID NO: 21175 - DNA, 1628 bp, Homo sapiens
  source 1..1628: mol_type = unassigned DNA
gcgcgcgggtttcgttgacccgcggcgttcacgggaattgttcgctttagtgccggcgccatggggtcggagctgatcgggcgcctagccccgcgcctgggcctcgccgagcccgacatgctgaggaaagcagaggagtacttgcgcctgtcccgggtgaagtgtgtcggcctctccgcacgcaccacggagaccagcagtgcagtcatgtgcctggaccttgcagcttcctggatgaagtgccccttggacagggcttatttaattaaactttctggtttgaacaaggagacatatcagagctgtcttaaatcttttgagtgtttactgggcctgaattcaaatattggaataagagacctagctgtacagtttagctgtatagaagcagtgaacatggcttcaaagatactaaaaagctatgagtccagtcttccccagacacagcaagtggatcttgacttatccaggccacttttcacttctgctgcactgctttcagcatgcaagattctaaagctgaaagtggataaaaacaaaatggtagccacatccggtgtaaaaaaagctatatttgatcgactgtgtaaacaactagagaagattggacagcaggtcgacagagaacctggagatgtagctactccaccacggaagagaaagaagatagtggttgaagccccagcaaaggaaatggagaaggtagaggagatgccacataaaccacagaaagatgaagatctgacacaggattatgaagaatggaaaagaaaaattttggaaaatgctgccagtgctcaaaaggctacagcagagtgatttcagcttccaaactggtatacattccaaactgatagtacattgccatctccaggaagacttgacggctttgggattttgtttaaacttttataataaggatcctaagactgttgcctttaaatagcaaagcagcctacctggaggctaagtctgggcagtgggctggcccctggtgtgagcattagaccagccacagtgcctgattggtatagccttatgtgctttcctacaaaatggaattggaggccgggcgcagtggctcacgcctgtaatcccagcactttgggaggccaaggtgggtggatcacctgaggtcaggagctcgagaccagcctggccaacatggtgaaaccccatctctactaaaaatacaaaaattagccaggtgtgatggtgcatgcctgtaatcccagctcctcagtaggctgagacaggagcatcacttgaacgtgggaggcagaggttgcagtgagccgagattgcaccaccgcactccagcctgggtgacagagcgagacttatctcataaataaatagatagatactccagcctgggtgacagagcgagacttatagatagatagatagatagatggatagatagatagatagatagatagatagataaacggaattggagccattttgctttaagtgaatggcagtcccttgtcttattcagaatataaaattcagtctgaatggcatcttacagattttacttcaatttttgtgtacggtattttttatttgactaaatcaatatattgtacagcctaagttaataaatgttatttatatatgca

SEQ ID NO: 21176 - DNA, 2692 bp, Homo sapiens
  source 1..2692: mol_type = unassigned DNA
attttaagcaattcttagtctcaagtaaacaccatcattaaaagaactgagaactattatcaattcttcctttggagtccatcttcaatggaaaggagaagggaaaaccttttttaaaaagaagaaagaaaactgaagtttttgatttgactagagaaatattcagaagactccttattttcacctagtttaatcacaaaattgagaaacaaacattatcccttgaccatgtaaattttacaccacattatgtcaacagcatgtaccttccacattgagtattcagaaagaagtgatctgaactctgaccattctttatggatacattaagtcaaatataagagtctgactacttgacacactggctcggtgagttctgctttttctttttaatataaatttattatgttggtaaatttagcttttggcttttcactttgctctcatgatataagaaaatgtaggttttctctttcagtttgaattttcctattcagtaaaacaacatgctagaaaacaaacttttggaaaggcattgtaactattttttcaaatagaaccataataacaagtcttgtcttaccctaaagtcaaatgctgaagattctttactgctgtcatcagcatctacaagtagcatattttggatggtgtttgtgtgctacttcaaagtaactaggaaaaaataatcctcgcaacacaggtaccttgtcatgtcagaattgggggtgttaggttgccagttgtatcagtgttgattcatttcattacttcctacagagcaaacatgaacgttggagttgcccacagtgaagtgaatccaaatacccgtgtcatgaacagccggggtatgtggctgacatatgcattgggagttggcttgcttcatattgtcttactcagcattcccttcttcagtgttcctgttgcttggactttaacaaatattatacataatctggggatgtacgtatttttgcatgcagtgaaaggaacacctttcgaaactcctgaccagggtaaagcaaggctcctaactcattgggaacaactggactatggagtacagtttacatcttcacggaagtttttcacaatttctccaataattctatattttctggcaagtttctatacgaagtatgatccaactcacttcatcctaaacacagcttctctcctgagtgtactaattcccaaaatgccacaactacatggtgttcggatctttggaattaataagtattgaaatgttttgaaactgaaaaaaaattttacagctactgaatttcttataaggaaggagtggttagtaaactgcactgtttctgtgataatgtgaaatgagaagtatttacattggagggccaatggctggtccttcaagtgctgttttgaagtgcagatttccattaaatgatgcctctgtttaatacacctggtacatttctgaagaggggctttataagcaggctgggcaggcccagcttataagttaaagggcatcacagtgagggtgtagtagataaattcaaggaaataagagatttgtaagaaactaggaccagcttaacttataatgaatgggcattgtgttaagaaaagaacatttccagtcattcagctgtggttatttaaagcagacttacatgtaaaccggaatcctctctatacaagtttattaaagattatttttattaccgtacatatttctcgttttatgtaagcggatgtatatcctcttgttttatacaagccagttcccacttatgagggtacttttttggttttgctggcttaatattgtgtattggtcaatgaggccatttttacatttattacgttacagagttcatggaggttcacctttgtgactgattggtgataaaagatagccaagtgtcttacaagcagcttctgagtcaagtgttctaattttggaacaaagcaggttttactgcttttccagacacaaggctgctaaaccaattaagaaaataattaatttctttcaagcaactaaaaaatatatggtaatttaaaggtgtctgcttatttggttgaacaatttaattgggaaagtttgtcatcatttgaaaaaggaaatataaaaggaacaaccatatagccaacctgtggtctggcagaaacaacgtctctagcaatagtaccaaagtaagtaatggagtcttttttttggcaggtctgcagtaaaagataacattttcttttcttagtcctcctgctctcaacccccatattttgcctttgaatacgtgggttttagtatatatagcccaaaatggtaactgtctccagaacagcaaccacattgaattcttgtgacttaggaaagcttcttatagttgctgacattaattgcaagaaataactatatactactttgagaagtaaacatgtcaaaaaaaacaaagttcagatatgggacaaaatttaaaaattcagtaacatttataaacagaattgaatgaaaagagttacagaccaacttaaacatcaattcgtgtcagtaaactgacttttgggggtaatgatcattgttttgtatctcaaaagtattgagtttagaaatcagttgtatgatactacctttgtatgtctgtcttttcccgtgtatttttaaataactggtgatctataatttaataaaatttttcgttggtgtaatatt

SEQ ID NO: 21177 - DNA, 1137 bp, Homo sapiens
  source 1..1137: mol_type = unassigned DNA
agcttccgcaagctgcgcagcgccgggcctgagggcgtgtatccgcggccgtagcagccgggctggtcctgctgcgagccggcggcccggagtggggcggcggcatgtaccttccacattgagtattcagaaagaagtgatctgaactctgaccattctttatggatacattaagtcaaatataagagtctgactacttgacacactggctcgagcaaacatgaacgttggagttgcccacagtgaagtgaatccaaatacccgtgtcatgaacagccggggtatgtggctgacatatgcattgggagttggcttgcttcatattgtcttactcagcattcccttcttcagtgttcctgttgcttggactttaacaaatattatacataatctggggatgtacgtatttttgcatgcagtgaaaggaacacctttcgaaactcctgaccagggtaaagcaaggctcctaactcattgggaacaactggactatggagtacagtttacatcttcacggaagtttttcacaatttctccaataattctatattttctggcaagtttctatacgaagtatgatccaactcacttcatcctaaacacagcttctctcctgagtgtactaattcccaaaatgccacaactacatggtgttcggatctttggaattaataagtattgaaatgttttgaaactgaaaaaaaattttacagctactgaatttcttataaggaaggagtggttagtaaactgcactgtttctgtgataatgtgaaatgagaagtatttacattggagggccaatggctggtccttcaagtgctgttttgaagtgcagatttccattaaatgatgcctctgtttaatacacctggtacatttctgaagaggggctttataagcaggctgggcaggcccagcttataagttaaagggcatcacagtgagggtgtagtagataaattcaaggaaataagagatttgtaagaaactaggaccagcttaacttataatgaatgggcattgtgttaagaaaagaacatttccagtcattcagctgtggttatttaaagcagacttacatgtaaaccggaatcctctctatacaagtttattaaagattatttttattaccgt

SEQ ID NO: 21178 - DNA, 2009 bp, Homo sapiens
  source 1..2009: mol_type = unassigned DNA
gcaagctgcgcagcgccgggcctgagggcgtgtatccgcggccgtagcagccgggctggtcctgctgcgagccggcggcccggagtggggcggcggagcaaacatgaacgttggagttgcccacagtgaagtgaatccaaatacccgtgtcatgaacagccggggtatgtggctgacatatgcattgggagttggcttgcttcatattgtcttactcagcattcccttcttcagtgttcctgttgcttggactttaacaaatattatacataatctggggatgtacgtatttttgcatgcagtgaaaggaacacctttcgaaactcctgaccagggtaaagcaaggctcctaactcattgggaacaactggactatggagtacagtttacatcttcacggaagtttttcacaatttctccaataattctatattttctggcaagtttctatacgaagtatgatccaactcacttcatcctaaacacagcttctctcctgagtgtactaattcccaaaatgccacaactacatggtgttcggatctttggaattaataagtattgaaatgttttgaaactgaaaaaaaattttacagctactgaatttcttataaggaaggagtggttagtaaactgcactgtttctgtgataatgtgaaatgagaagtatttacattggagggccaatggctggtccttcaagtgctgttttgaagtgcagatttccattaaatgatgcctctgtttaatacacctggtacatttctgaagaggggctttataagcaggctgggcaggcccagcttataagttaaagggcatcacagtgagggtgtagtagataaattcaaggaaataagagatttgtaagaaactaggaccagcttaacttataatgaatgggcattgtgttaagaaaagaacatttccagtcattcagctgtggttatttaaagcagacttacatgtaaaccggaatcctctctatacaagtttattaaagattatttttattaccgtacatatttctcgttttatgtaagcggatgtatatcctcttgttttatacaagccagttcccacttatgagggtacttttttggttttgctggcttaatattgtgtattggtcaatgaggccatttttacatttattacgttacagagttcatggaggttcacctttgtgactgattggtgataaaagatagccaagtgtcttacaagcagcttctgagtcaagtgttctaattttggaacaaagcaggttttactgcttttccagacacaaggctgctaaaccaattaagaaaataattaatttctttcaagcaactaaaaaatatatggtaatttaaaggtgtctgcttatttggttgaacaatttaattgggaaagtttgtcatcatttgaaaaaggaaatataaaaggaacaaccatatagccaacctgtggtctggcagaaacaacgtctctagcaatagtaccaaagtaagtaatggagtcttttttttggcaggtctgcagtaaaagataacattttcttttcttagtcctcctgctctcaacccccatattttgcctttgaatacgtgggttttagtatatatagcccaaaatggtaactgtctccagaacagcaaccacattgaattcttgtgacttaggaaagcttcttatagttgctgacattaattgcaagaaataactatatactactttgagaagtaaacatgtcaaaaaaaacaaagttcagatatgggacaaaatttaaaaattcagtaacatttataaacagaattgaatgaaaagagttacagaccaacttaaacatcaattcgtgtcagtaaactgacttttgggggtaatgatcattgttttgtatctcaaaagtattgagtttagaaatcagttgtatgatactacctttgtatgtctgtcttttcccgtgtatttttaaataactggtgatctataatttaataaaatttttcgttggtgtaatatta

SEQ ID NO: 21179 - DNA, 893 bp, Homo sapiens
  source 1..893: mol_type = unassigned DNA
tatgggtctctagagcggaaggagcattatactccggaaacatttgctggaaggggttatgagaaattcctctctgtatgctaactccgtaatacaagcgtttgtgtattttaaaatcacagctgttccaaatataatctagcctcgttttccccctccgtcggatgataggtgttcttcaggacagttttattttaagcaattcttagtctcaagtaaacaccatcattaaaagaactgagaactattatcaattcttcctttggagtccatcttcaatggaaaggagaagggaaaaccttttttaaaaagaagaaagaaaactgaagtttttgatttgactagagaaatattcagaagactccttattttcacctagtttaatcacaaaattgagaaacaaacattatcccttgaccatgtaaattttacaccacattatgtcaacagcatgtaccttccacattgagtattcagaaagaagtgatctgaactctgaccattctttatggatacattaagtcaaatataagagtctgactacttgacacactggctcgagcaaacatgaacgttggagttgcccacagtgaagtgaatccaaatacccgtgtcatgaacagccggggtatgtggctgacatatgcattgggagttggcttgcttcatattgtcttactcagcattcccttcttcagtgttcctgttgcttggactttaacaaatattatacataatctggggatgtacgtatttttgcatgcagtgaaaggaacacctttcgaaactcctgaccagggtaaagcaaggctcctaactcattgggaacaactggactatggagtacagtttacatcttcacggaagtttttcacaatttctccaataattct

SEQ ID NO: 21180 - DNA, 914 bp, Homo sapiens
  source 1..914: mol_type = unassigned DNA
cgcggccgtagcagccgggctggtcctgctgcgagccggcggcccggagtggggcggcggcatgtaccttccacattgagtattcagaaagaagtgatctgaactctgaccattctttatggatacattaagtcaaatataagagtctgactacttgacacactggctcggtgagttctgctttttctttttaatataaatttattatgttggtaaatttagcttttggcttttcactttgctctcatgatataagaaaatgtaggttttctctttcagtttgaattttcctattcagtaaaacaacatgctagaaaacaaacttttggaaaggcattgtaactattttttcaaatagaaccataataacaagtcttgtcttaccctaaagtcaaatgctgaagattctttactgctgtcatcagcatctacaagtagcatattttggatggtgtttgtgtgctacttcaaagtaactaggaaaaaataatcctcgcaacacaggtaccttgtcatgtcagaattgggggtgttaggttgccagttgtatcagtgttgattcatttcattacttcctacagagcaaacatgaacgttggagttgcccacagtgaagtgaatccaaatacccgtgtcatgaacagccggggtatgtggctgacatatgcattgggagttggcttgcttcatattgtcttactcagcattcccttcttcagtgttcctgttgcttggactttaacaaatattatacataatctggggatgtacgtatttttgcatgcagtgaaaggaacacctttcgaaactcctgaccagggtaaagcaaggctcctaactcattgggaacaactggactatggagtacagtttacatcttcacggaagtttttcacaatttctccaataattct

SEQ ID NO: 21181 - DNA, 2141 bp, Homo sapiens
  source 1..2141: mol_type = unassigned DNA
actgtatcttgcgaacgacagaaatggcaaccaactgtgcttctgcattacagaccaccaaccaatgggtggtggcagcgctgattctgttcctccaataggaaaggggcagaaggagaggcgttacttcctggagacttcaggtgtggtagccggcgccgcgcccatagccggacggggatctgagctggcaggatgaatgtgggggtggcacacagcgaagtaaaccccaacacccgagtgatgaatagccgaggcatctggctggcctacatcatcttggtaggattgctgcatatggttctactcagcatccccttcttcagcattcctgttgtctggaccctgaccaacgtcatccataacctggctacgtatgtcttccttcatacggtgaaagggacaccctttgagactcctgaccaaggaaaggctcggctactgacacactgggagcaaatggactatgggctccagtttacctcttcccgcaagttcctcagcatctctcctattgtgctctatctcctggccagcttctataccaagtatgatgctgcgcacttcctcatcaacacagcctcattgctaagtgtactgctgccgaagttgccccagttccatggggttcgtgtctttggcatcaacaaatactgagggatgggttttgggacagctccatgggcatggggaaggcactgaaacagaggactataaaacatccttctcttattctccatactgtcttctacacctttaaagcctgagaactatacaacctttcccagactcccaagaagagaagagattggcaaatggggctcctgggcccagtcctgctagtggcaagtttctttgaatcaggaaggcaggtgaggtaagggccaaatcactctcctccatagcaggaagccatttgggcagcttctttggtgattacatctttccatatcttttacacttaccaccttccagctctgttttgctgtgtatttttcttacaataatttttttcagctatagctgcagtttaatcaggatgggtagagagctgtcctcataaggctgggggtgggaagatggaatactgacctaatgtataaaacttaaaacaattctccaatcccctctcctttggtccagtaggaggtgcccttcactctaagcttaacacttagtagggaagagattctcaaatgagaaaaagggctccggctatatgggcaacaaagagggaagatacaggttgccagttatacatttatagaaagataatcccctggctttaaatagtcatgtacatacaaatatgaacaaacttaaaaaaaaaatacaaacccttggatcacatgggggcttctgggaacccccgtattcttccccctcacccaagggcagtgggcatgaatctactttttaaaaatgattaattttggccatccttgcagaaaagagcctaaaattgggtgatttacccacaaagtgaaagtcgagggaaaattcagtttccagtctctgaactctatgcgataatctcctatcattagggctacatgctttcttgttctcttttaaatattatatcaggataaaggagagggctccctcctgaaatgggtcaagaaagaagatagacttgtagctttaaaagggtgggaaaaagtgtcatctgccctaaaagcaaatgacaagacaaaggcatacagaccccagggaaatacccagttcccacacctaaagggatacactgtccagcccaggtccaggccctaggttctttactctagctaccccctatttctttggtattgtcaaaagacaagattcaggccgggcacagtggcttatgcctgtaatccagcactttgggaggccaagacgggtggatcacctgagctcaggagttcgagaccagcctgggcaacatggtgaaaccccgtctctactaaaaatacaaaaaagaattagctgggccaggtgtggtggtgtgtgcctgtaatcccagctactcaggaggctgagatgggagaattgcttgaacccgggagacagaggttgcagtaagctgagatcacaccactgcactccagctgggcaacagagcaagactccatctcaaaaaataaaaagaaaaagattca

SEQ ID NO: 21182 - DNA, 671 bp, Homo sapiens
  source 1..671: mol_type = unassigned DNA
atcagctttagagctaccacaattttaaagatccgagttcagataatcactgctgcccctggagtcagagccaaggctccacctttcgaggatgaatgtgggggtggcacacagcgaagtaaaccccaacacccgagtgatgaatagccgaggcatctggctggcctacatcatcttggtaggattgctgcatatggttctactcagcatccccttcttcagcattcctgttgtctggaccctgaccaacgtcatccataacctggctacgtatgtcttccttcatacggtgaaagggacaccctttgagactcctgaccaaggaaaggctcggctactgacacactgggagcaaatggactatgggctccagtttacctcttcccgcaagttcctcagcatctctcctattgtgctctatctcctggccagcttctataccaagtatgatgctgcgcacttcctcatcaacacagcctcattgctaagtgtactgctgccgaagttgccccagttccatggggttcgtgtctttggcatcaacaaatactgagggatgggttttgggacagctccatgggcatggggaaggcactgaaacagaggactataaaacatccttctcttattctccatactgtcttctacacctttaaagcctgagaactata

SEQ ID NO: 21183 - DNA, 2111 bp, Homo sapiens
  source 1..2111: mol_type = unassigned DNA
gattcggccggagctgccagcggggaggctgcagccgcgggttgttacagctgctggagcagcagcggcccccgctcccgggaaccgttcccgggccgttgatcttcggccccacacgaacagcagagaggggcagcaggatgaatgtgggcacagcgcacagcgaggtgaaccccaacacgcgggtgatgaacagccgtggcatctggctctcctacgtgctggccatcggtctcctccacatcgtgctgctgagcatcccgtttgtgagtgtccctgtcgtctggaccctcaccaacctcattcacaacatgggcatgtatatcttcctgcacacggtgaaggggacaccctttgagaccccggaccagggcaaggcgaggctgctaacccactgggagcagatggattatggggtccagttcacggcctctcggaagttcttgaccatcacacccatcgtgctgtacttcctcaccagcttctacactaagtacgaccagatccattttgtgctcaacaccgtgtccctgatgagcgtgcttatccccaagctgccccagctccacggagtccggatttttggaatcaataagtactgagagtgcagccccttcccctgcccagggtggcaggggaggggtagggtaaaaggcatgtgctgcaacactgaagacagaaagaagaagcctctggacactgccagagatgggggttgagcctctggcctaatttcccccctcgcttcccccagtagccaacttggagtagcttgtagtggggttggggtaggccccctgggctctgaccttttctgaattttttgatcttttccttttgctttttgaatagagactccatggagttggtcatggaatgggctgggctcctgggctgaacatggaccacgcagttgcgacaggaggccaggggaaaaacccctgctcacttgtttgccctcaggcagccaaagcactttaacccctgcatagggagcagagggcggtacggcttctggattgtttcactgtgattcctaggttttttcgatgccacgcagtgtgtgcttttgtgtatggaagcaagtgtgggatgggtctttgcctttctgggtagggagctgtctaatccaagtcccaggcttttggcagcttctctgcaacccaccgtgggtcctggttgggagtggggagggtcaggttggggaaagatggggtagagtgtagatggcttggttccagaggtgagggggccagggctgctgccatcctggcctggtggaggttggggagctgtaggagagctagtgagtcgagacttagaagaatggggccacatagcagcagaggactggtgtaagggagggaggggtagggacagaagctagacccaatctcctttgggatgtgggcagggagggaagcaggcttggagggttaatttacccacagaatgtgatagtaataggggagggaggctgctgtgggtttaactcctgggttggctgttgggtagacaggtggggaaaaggcccgtgagtcattgtaagcacaggtccaacttggccctgactcctgcgggggtatggggaagctgtgacagaaacgatgggtgctgtggtcctctgcaggccctcaccccttaacttcctcatacagactggcactgggcagggcctctcatgtggcagccacatgtggcgttgtgaggccaccccatgtggggtctgtggtgagagtcctgtaggatccctgctcaagcagcacagaggaaggggcaagacgtggcctgtaggcactgtctcagcctgcagagaagaaagtgaggccgggagcctgagcctgggctggagccttctcccctccccagttggactaggggcagtgttaattttgaaaaggtgtgggtccctgtgtcctcttccaggggtccaagggaacgggagaggtcactgggcctgttttctccctcctgaccctgcatctcccaccccgtgtatcatagggaactttcaccttaaaatctttctaagcaaagtgtgaataggatttttactccctttgtacagtattctgagaaacgcaaataaaagggcaacatgtttctgtttc

SEQ ID NO: 21184 - DNA, 2230 bp, Homo sapiens
  source 1..2230: mol_type = unassigned DNA
gtgctcctcttccagaagacaggaggtttgctgttgtgagggctgctctttcctgggggagggaatgggaagggctcacctggtggctgccctggtggtgctcagccttggcttgagtgtctggcatactggctgggcccggatatttgtatgtggagccaagagggtggggcgggaaggagggggaaagagctaccagcaaaaaagtggttaacacaacagagttgctgcaggctctggtttgaggcaggttatgaaaccacatcagggcccagcactaagcagccacctgccagctatggcagcagaagttttcggctcaactcctgtagacctagtcgacctctgccagcctcttctctctgtttctccccatctagggtaggggccagttggttgttttactaatggaagtgatatgtatccatagtcacacgaaagtctcaagagtgtttcctcattgccagtctttttgttagtttattgatctcttctttttcaggggtctctggtggtttcctgctctcagggcacctagtgtttaggcttcaggaagaagcttctgagggtgttggctaggacctaggtctaggcttttcctaggctcatcaagttttgttggctgccctgtgaaagccagaaaggcgtatggggtcctgtgatctgggattccccaaggcttttggcactcctggacaaatactaggaagggttagtggactttctataccagcacccctgtaggtgcgggttacagagaggtgatggggtggcagtttcaggtcagacttgggaagctctttccctctccttagtcagagttaagtccttcagagccctcacttgtcagccacatgccgccctcccctctcaggtggaggcttttgcgtagcagctgtcccaggggctgctagagtaactgaagccccaaggccctgggaagataaacaatctgagccagctctggctttctagatacttgaatttctgttaggctcaattatccagcctagtgggctgcgctgatgggtcccaggagcatctcttcaatcagaatgcgccccaggctggcgcacgggtgtttgcttgttgggatggcgtgttgtgggtcacattttctctgaggtctctaagcttggagctgtctgagaagaggaaacttgctcctgttatcctggaagtaaataactggcccctgaggactcagtctcctgtgcagggccctcagggatctggggacagccaaactctggataaggggcagatcattccaccccttccttctctacttccctctgctcactgtgggttgcggccacctcctggttcctcctgctgcaggactcctaccgttggtgctgggcaggggaaggcatggtgctaatatacacctggaaacaggtgctgagaggggagactgagtcctcctaagttggggtttggggagatccagaattgaaaaaatcagaggagaacagcagagaggggcagcaggatgaatgtgggcacagcgcacagcgaggtgaaccccaacacgcgggtgatgaacagccgtggcatctggctctcctacgtgctggccatcggtctcctccacatcgtgctgctgagcatcccgtttgtgagtgtccctgtcgtctggaccctcaccaacctcattcacaacatgggcatgtatatcttcctgcacacggtgaaggggacaccctttgagaccccggaccagggcaaggcgaggctgctaacccactgggagcagatggattatggggtccagttcacggcctctcggaagttcttgaccatcacacccatcgtgctgtacttcctcaccagcttctacactaagtacgaccagatccattttgtgctcaacaccgtgtccctgatgagcgtgcttatccccaagctgccccagctccacggagtccggatttttggaatcaataagtactgagagtgcagccccttcccctgcccagggtggcaggggaggggtagggtaaaaggcatgtgctgcaacactgaagacagaaagaagaagcctctggacactgccagagatgggggttgagcctctggcctaatttcccccctcgcttcccccagtagccaacttggagtagcttgtagtggggttggggtaggccccctgggctctgaccttttctgaattttttgatcttttccttttgctttttgaatagagactccatggagttggtcatgg

SEQ ID NO: 21185 - DNA, 2048 bp, Homo sapiens
  source 1..2048: mol_type = unassigned DNA
ctccggcgtcactgttgcgcttcatagacgccgcgtgtacccggttgtcctcaggcgctgtcagatctgtggtttttctacttgaaggacacaatgttttccaaactagcacatttgcagaggtttgctgtacttagtcgcggagttcattcttcagtggcttctgctacatctgttgcaactaaaaaaacagtccaaggccctccaacctctgatgacatttttgaaagggaatataagtatggtgcacacaactaccatcctttacctgtagccctggagagaggaaaaggtatttacttatgggatgtagaaggcagaaaatattttgacttcctgagttcttacagtgctgtcaaccaagggcattgtcaccccaagattgtgaatgctctgaagagtcaagtggacaaattgaccttaacatctagagctttctataataacgtacttggtgaatatgaggagtatattactaaacttttcaactaccacaaagttcttcctatgaatacaggagtggaggctggagagactgcctgtaaactagctcgtaagtggggctataccgtgaagggcattcagaaatacaaagcaaagattgtttttgcagctgggaacttctggggtaggacgttgtctgctatctccagttccacagacccaaccagttacgatggttttggaccatttatgccgggattcgacatcattccctataatgatctgcccgcactggagcgtgctcttcaggatccaaatgtggctgcgttcatggtagaaccaattcagggtgaagcaggcgttgttgttccggatccaggttacctaatgggagtgcgagagctctgcaccaggcaccaggttctctttattgctgatgaaatacagacaggattggccagaactggtagatggctggctgttgattatgaaaatgtcagacctgatatagtcctccttggaaaggccctttctgggggcttataccctgtgtctgcagtgctgtgtgatgatgacatcatgctgaccattaagccaggggagcatgggtccacatacggtggcaatccactaggctgccgagtggccatcgcagcccttgaggttttagaagaagaaaaccttgctgaaaatgcagacaaattgggcattatcttgagaaatgaactcatgaagctaccttctgatgttgtaactgccgtaagaggaaaaggattattaaacgctattgtcattaaagaaaccaaagattgggatgcttggaaggtgtgtctacgacttcgagataatggacttctggccaagccaacccatggcgacattatcaggtttgcgcctccgctggtgatcaaggaggatgagcttcgagagtccattgaaattattaacaagaccatcttgtctttctgagggtagccagctgttttcagtggtccctgggagccagctggagacaggtggtcctgtaaaagctttattcctaatgtgggcacattccactcccatgagtcttcaaaaactttttttttgaatatatttttttcagttgatacataatagaacaacgtttatgaacctgccgtttgctttgtaacgtaactaaataatgtaatggcatctatattcagttgaagtgttttgatgtgcatgtgtacttcctaaggtgaaatgcatctatatacagacagcctctaaatcaagtccttcagtataattgatatatgtttttataatttcctcactggtataagtgtttcatatttgaaaaagttatctctgggtattgcataaaaggcttcatcttataaagtgaaatcattgttattgaattttaggaaggattaatggttaagtgtatataaaatactaatattaagtaaacttcatattggccaacaccagggttgtattctatggatgtcattattttgaattaagaattagtgtttaacattcctaaattgttttgagtgcttgattataatttgtaaaaaatgtttattttcaatacttctttaaatttaaaataaagcttatatttcaaa

SEQ ID NO: 21186 - DNA, 1864 bp, Homo sapiens
  source 1..1864: mol_type = unassigned DNA
ttgggggcggggcagaatcagcctttaagttgcagtgactctccggcgtcactgttgcgcttcatagacgccgcgtgtacccggttgtcctcaggcgctgtcaggtatttacttatgggatgtagaaggcagaaaatattttgacttcctgagttcttacagtgctgtcaaccaagggcattgtcaccccaagattgtgaatgctctgaagagtcaagtggacaaattgaccttaacatctagagctttctataataacgtacttggtgaatatgaggagtatattactaaacttttcaactaccacaaagttcttcctatgaatacaggagtggaggctggagagactgcctgtaaactagctcgtaagtggggctataccgtgaagggcattcagaaatacaaagcaaagattgtttttgcagctgggaacttctggggtaggacgttgtctgctatctccagttccacagacccaaccagttacgatggttttggaccatttatgccgggattcgacatcattccctataatgatctgcccgcactggagcgtgctcttcaggatccaaatgtggctgcgttcatggtagaaccaattcagggtgaagcaggcgttgttgttccggatccaggttacctaatgggagtgcgagagctctgcaccaggcaccaggttctctttattgctgatgaaatacagacaggattggccagaactggtagatggctggctgttgattatgaaaatgtcagacctgatatagtcctccttggaaaggccctttctgggggcttataccctgtgtctgcagtgctgtgtgatgatgacatcatgctgaccattaagccaggggagcatgggtccacatacggtggcaatccactaggctgccgagtggccatcgcagcccttgaggttttagaagaagaaaaccttgctgaaaatgcagacaaattgggcattatcttgagaaatgaactcatgaagctaccttctgatgttgtaactgccgtaagaggaaaaggattattaaacgctattgtcattaaagaaaccaaagattgggatgcttggaaggtgtgtctacgacttcgagataatggacttctggccaagccaacccatggcgacattatcaggtttgcgcctccgctggtgatcaaggaggatgagcttcgagagtccattgaaattattaacaagaccatcttgtctttctgagggtagccagctgttttcagtggtccctgggagccagctggagacaggtggtcctgtaaaagctttattcctaatgtgggcacattccactcccatgagtcttcaaaaactttttttttgaatatatttttttcagttgatacataatagaacaacgtttatgaacctgccgtttgctttgtaacgtaactaaataatgtaatggcatctatattcagttgaagtgttttgatgtgcatgtgtacttcctaaggtgaaatgcatctatatacagacagcctctaaatcaagtccttcagtataattgatatatgtttttataatttcctcactggtataagtgtttcatatttgaaaaagttatctctgggtattgcataaaaggcttcatcttataaagtgaaatcattgttattgaattttaggaaggattaatggttaagtgtatataaaatactaatattaagtaaacttcatattggccaacaccagggttgtattctatggatgtcattattttgaattaagaattagtgtttaacattcctaaattgttttgagtgcttgattataatttgtaaaaaatgtttattttcaatacttctttaaatttaaaataaagcttatatttcaaatgtc

SEQ ID NO: 21187 - DNA, 2653 bp, Homo sapiens
  source 1..2653: mol_type = unassigned DNA
gacgtcggcccgccggcgccccaccagctccgcgcgggcccgggttggccaccgccgggcccccgcccctcccccggcggtgtcccggccggaaccgatcgtggctggtttgagctggtgcgtctccatggcgacccgccggtgctataagtagggagcggcgtgccgtggggctttgtcagtccctcctgtagccgccgccgccgccgcccgccgcccctctgccagcagctccggcgccacctcgggccggcgtctccggcgggcgggagccaggcgctgacgggcgcggcgggggcggccgagcgctcctgcggctgcgactcaggctccggcgtctgcgcttccccatggggctggcctgcggcgcctgggcgctctgagattgtcactgctgttccaagggcacacgcagagggatttggaattcctggagagttgcctttgtgagaagctggaaatatttctttcaattccatctcttagttttccataggaacatcaagaaatcatgaacaactttggtaatgaagagtttgactgccacttcctcgatgaaggttttactgccaaggacattctggaccagaaaattaatgaagtttcttcttctgatgataaggatgccttctatgtggcagacctgggagacattctaaagaaacatctgaggtggttaaaagctctccctcgtgtcacccccttttatgcagtcaaatgtaatgatagcaaagccatcgtgaagacccttgctgctaccgggacaggatttgactgtgctagcaagactgaaatacagttggtgcagagtctgggggtgcctccagagaggattatctatgcaaatccttgtaaacaagtatctcaaattaagtatgctgctaataatggagtccagatgatgacttttgatagtgaagttgagttgatgaaagttgccagagcacatcccaaagcaaagttggttttgcggattgccactgatgattccaaagcagtctgtcgtctcagtgtgaaattcggtgccacgctcagaaccagcaggctccttttggaacgggcgaaagagctaaatatcgatgttgttggtgtcagcttccatgtaggaagcggctgtaccgatcctgagaccttcgtgcaggcaatctctgatgcccgctgtgtttttgacatgggggctgaggttggtttcagcatgtatctgcttgatattggcggtggctttcctggatctgaggatgtgaaacttaaatttgaagagatcaccggcgtaatcaacccagcgttggacaaatactttccgtcagactctggagtgagaatcatagctgagcccggcagatactatgttgcatcagctttcacgcttgcagttaatatcattgccaagaaaattgtattaaaggaacagacgggctctgatgacgaagatgagtcgagtgagcagacctttatgtattatgtgaatgatggcgtctatggatcatttaattgcatactctatgaccacgcacatgtaaagccccttctgcaaaagagacctaaaccagatgagaagtattattcatccagcatatggggaccaacatgtgatggcctcgatcggattgttgagcgctgtgacctgcctgaaatgcatgtgggtgattggatgctctttgaaaacatgggcgcttacactgttgctgctgcctctacgttcaatggcttccagaggccgacgatctactatgtgatgtcagggcctgcgtggcaactcatgcagcaattccagaaccccgacttcccacccgaagtagaggaacaggatgccagcaccctgcctgtgtcttgtgcctgggagagtgggatgaaacgccacagagcagcctgtgcttcggctagtattaatgtgtagatagcactctggtagctgttaactgcaagtttagcttgaattaagggatttggggggaccatgtaacttaattactgctagttttgaaatgtctttgtaagagtagggtcgccatgatgcagccatatggaagactaggatatgggtcacacttatctgtgttcctatggaaactatttgaatatttgttttatatggatttttattcactcttcagacacgctactcaagagtgcccctcagctgctgaacaagcatttgtagcttgtacaatggcagaatgggccaaaagcttagtgttgtgacctgtttttaaaataaagtatcttgaaataattaggcattgggacgtttttatggtgtgttcattccagacagttcacgaatcccgtatagctcgctctgattctcagagaacaatgagtgggtccacccacacacaggtaggaggacaggtgagacggaagccccatcctcccatgtggacggtgcacatctgctcagcccaccccacatgtccagagttggctgcaaactccttgtccagagcctctggtggtgggacctacttaagtctgacggacctgtcctgtccaggccagtgcccagggaaggtgtgggaggccctttgagcctggcctgcagagaccatccgtgtcccctcccaccttcatgcctgtgagaagttaggaatgtatacggtaccacatttggcagtcagcttattttaataaattcagcaacagcaagtcccta

SEQ ID NO: 21188 - DNA, 1943 bp, Homo sapiens
  source 1..1943: mol_type = unassigned DNA
cctggcggccgcgcagcaggtgcaggggcgcagagcccgggctcgccttggtacagacgagcgggccccggccttggcgccttcagtttccttccagtttttattttcgctgtgtctacagagcagatgacaccaatttggaaacccgcgagagtgggtagagctaagatagtcttgctgtagtagctgtgatattagatgctcggccatgacttagaggtgtttatttaaggactgtgaatgactcggtgatttcggaaaagcttggcttagatgaacggacatacacaggggagacagccctaagattgtcactgctgttccaagggcacacgcagagggatttggaattcctggagagttgcctttgtgagaagctggaaatatttctttcaattccatctcttagttttccataggaacatcaagaaatcatgaacaactttggtaatgaagagtttgactgccacttcctcgatgaaggttttactgccaaggacattctggaccagaaaattaatgaagtttcttcttctgatgataaggatgccttctatgtggcagacctgggagacattctaaagaaacatctgaggtggttaaaagctctccctcgtgtcacccccttttatgcagtcaaatgtaatgatagcaaagccatcgtgaagacccttgctgctaccgggacaggatttgactgtgctagcaagactgaaatacagttggtgcagagtctgggggtgcctccagagaggattatctatgcaaatccttgtaaacaagtatctcaaattaagtatgctgctaataatggagtccagatgatgacttttgatagtgaagttgagttgatgaaagttgccagagcacatcccaaagcaaagttggttttgcggattgccactgatgattccaaagcagtctgtcgtctcagtgtgaaattcggtgccacgctcagaaccagcaggctccttttggaacgggcgaaagagctaaatatcgatgttgttggtgtcagcttccatgtaggaagcggctgtaccgatcctgagaccttcgtgcaggcaatctctgatgcccgctgtgtttttgacatgggggctgaggttggtttcagcatgtatctgcttgatattggcggtggctttcctggatctgaggatgtgaaacttaaatttgaagagatcaccggcgtaatcaacccagcgttggacaaatactttccgtcagactctggagtgagaatcatagctgagcccggcagatactatgttgcatcagctttcacgcttgcagttaatatcattgccaagaaaattgtattaaaggaacagacgggctctgatgacgaagatgagtcgagtgagcagacctttatgtattatgtgaatgatggcgtctatggatcatttaattgcatactctatgaccacgcacatgtaaagccccttctgcaaaagagacctaaaccagatgagaagtattattcatccagcatatggggaccaacatgtgatggcctcgatcggattgttgagcgctgtgacctgcctgaaatgcatgtgggtgattggatgctctttgaaaacatgggcgcttacactgttgctgctgcctctacgttcaatggcttccagaggccgacgatctactatgtgatgtcagggcctgcgtggcaactcatgcagcaattccagaaccccgacttcccacccgaagtagaggaacaggatgccagcaccctgcctgtgtcttgtgcctgggagagtgggatgaaacgccacagagcagcctgtgcttcggctagtattaatgtgtagatagcactctggtagctgttaactgcaagtttagcttgaattaagggatttggggggaccatgtaacttaattactgctagttttgaaatgtctttgtaagagtagggtcgccatgatgcagc

SEQ ID NO: 21189 - DNA, 494 bp, Homo sapiens
  source 1..494: mol_type = unassigned DNA
ggggaggccctggcggccgcgcagcaggtgcaggggcgcagagcccgggctcgccttggtacagacgagcgggccccggccttggcgccttcagtttccttccagtttttattttcgctgtgtctacagagcagatgacaccaatttggaaacccgcgagaattgtcactgctgttccaagggcacacgcagagggatttggaattcctggagagttgcctttgtgagaagctggaaatatttctttcaattccatctcttagttttccataggaacatcaagaaatcatgaacaactttggtaatgaagagtttgactgccacttcctcgatgaaggttttactgccaaggacattctggaccagaaaattaatgaagtttcttcttctgatgataaggatgccttctatgtggcagacctgggagacattctaaagaaacatctgaggtggttaaaagctctccctcgtgtcacccccttttatgcagtcaa

SEQ ID NO: 21190 - DNA, 1548 bp, Homo sapiens
  source 1..1548: mol_type = unassigned DNA
gtcagtccctcctgtagccgccgccgccgccgcccgccgcccctctgccagcagctccggcgccacctcgggccggcgtctccggcgggcgggagccaggcgctgacgggcgcggcgggggcggccgagcgctcctgcggctgcgactcaggctccggcgtctgcgcttccccatggggctggcctgcggcgcctgggcgctctgagattgtcactgctgttccaagggcacacgcagagggatttggaattcctggagagttgcctttgtgagaagctggaaatatttctttcaattccatctcttagttttccataggaacatcaagaaatcatgaacaactttggtaatgaagagtttgactgccacttcctcgatgaaggttttactgccaaggacattctggaccagaaaattaatgaagtttcttcttcttcaaatgtaatgatagcaaagccatcgtgaagacccttgctgctaccgggacaggatttgactgtgctagcaagactgaaatacagttggtgcagagtctgggggtgcctccagagaggattatctatgcaaatccttgtaaacaagtatctcaaattaagtatgctgctaataatggagtccagatgatgacttttgatagtgaagttgagttgatgaaagttgccagagcacatcccaaagcaaagttggttttgcggattgccactgatgattccaaagcagtctgtcgtctcagtgtgaaattcggtgccacgctcagaaccagcaggctccttttggaacgggcgaaagagctaaatatcgatgttgttggtgtcagcttccatgtaggaagcggctgtaccgatcctgagaccttcgtgcaggcaatctctgatgcccgctgtgtttttgacatgggggctgaggttggtttcagcatgtatctgcttgatattggcggtggctttcctggatctgaggatgtgaaacttaaatttgaagagatcaccggcgtaatcaacccagcgttggacaaatactttccgtcagactctggagtgagaatcatagctgagcccggcagatactatgttgcatcagctttcacgcttgcagttaatatcattgccaagaaaattgtattaaaggaacagacgggctctgatgacgaagatgagtcgagtgagcagacctttatgtattatgtgaatgatggcgtctatggatcatttaattgcatactctatgaccacgcacatgtaaagccccttctgcaaaagagacctaaaccagatgagaagtattattcatccagcatatggggaccaacatgtgatggcctcgatcggattgttgagcgctgtgacctgcctgaaatgcatgtgggtgattggatgctctttgaaaacatgggcgcttacactgttgctgctgcctctacgttcaatggcttccagaggccgacgatctactatgtgatgtcagggcctgcgtggcaactcatgcagcaattccagaaccccgacttcccaccctgcctgtgtcttgtgcctgggagagtgggatga

SEQ ID NO: 21191 - DNA, 1142 bp, Homo sapiens
  source 1..1142: mol_type = unassigned DNA
ttttgcgaacggcgagcagcggcggcggcgcggagagacgcagcggaggttttcctggtttcggaccccagcggccggatggtgaaatcctccctgcagcggatcctcaatagccactgcttcgccagagagaaggaaggggataaacccagcgccaccatccacgccagccgcaccatgccgctcctaagcctgcacagccgcggcggcagcagcagtgagagttccagggtctccctccactgctgtagtaacccgggtccggggcctcggtggtgcgatgcccctcacccacccctgaagatcccaggtgggcgagggaatagtcagagggatcacaatctttcagctaacttattctactccgatgatcggctgaatgtaacagaggaactaacgtccaacgacaagacgaggattctcaacgtccagtccaggctcacagacgccaaacgcattaactggcgaacagtgctgagtggcggcagcctctacatcgagatcccgggcggcgcgctgcccgaggggagcaaggacagctttgcagttctcctggagttcgctgaggagcagctgcgagccgaccatgtcttcatttgcttccacaagaaccgcgaggacagagccgccttgctccgaaccttcagctttttgggctttgagattgtgagaccggggcatccccttgtccccaagagacccgacgcttgcttcatggcctacacgttcgagagagagtcttcgggagaggaggaggagtagggccgcctcggggctgggcatccggcccctggggccaccccttgtcagccgggtgggtaggaaccgtagactcgctcatctcgcctgggtttgtccgcatgttgtaatcgtgcaaataaacgctcactccgaattagcggtgtatttcttgaagtttaatattgtgtttgtgatactgaagtatttgctttaattctaaataaaaatttatattttacttttttattgctggtttaagatgattcagattatccttgtactttgaggagaagtttcttatttggagtcttttggaaacagtcttagtcttttaacttggaaagatgaggtattaatcccctccattgctctccaaaagccaataaagtgattacacccga

SEQ ID NO: 21192 - DNA, 1004 bp, Homo sapiens
  source 1..1004: mol_type = unassigned DNA
atgtggatcaccagtctcatcaccatgaaggatgaagatatatttgatttggcaggggatccccaagacagcctcattcctgggccttctcccacccccaagcaaaacccagtttgtaatgaggctttctttggacaccagactttctccttaagagagactggattgaaatctgtgcattgccaagggcaagaagctgagaacatggagagagagaagtttcagcagaaggctctgaagcaaactaagcagaagaaatccaagtcggctgaatttctgatggttaaagaagatagagaagctacagaaggcactggaaatccagcttttaacatgagcagtccagatctctcagcatgtcagactgcagaaaagaaagttattagacacgacatgccggatcgcacccttgcagctcaccaacaaaaattcaggctgccagcctctgcagaaccaaaaggaaatgaatacggcagaaattactttgacccactgatggatgaggaaataaacccaaggcagtgtgcgacggaggtcagcagagaagatgagagtggccgggaggagactctgaattctgaagcacctgggagttccaataagagtcacgaaatccacaaagaagccagcgaagccaccactgctcaccttgaggagttccaaagatctcagaaaactataattctgcttggaagttctccattagaacaggaaattagatctacttcattgcattgtatggaggatgagatgagtcatccatggatactcttgctcaaagtaactgctgtaatcagaagcaggaggtactatagagagcaaagattctaaaacccattctcaggtcagtgctcgcaatgttcttatgttcactgtgtcgggaagttccatgaacacacaaggcaacatcataagtaggaaaaaccttcagatttggtgttagaactcagagctgtcatccttgattcagatatttatgtgaacttaaacctctttgtaaaata

SEQ ID NO: 21193 - DNA, 1489 bp, Homo sapiens
  source 1..1489: mol_type = unassigned DNA
agagactggattgaaatctgtgcattgccaagggcaagaagctgagaacatggagagagagaagtttcagcagaaggctctgaagcaaactaagcagaagaaatccaagtcggctgaatttctgatggttaaagaagatagagaagctacagaaggcactggaaatccagcttttaacatgagcagtccagatctctcagcatgtcagactgcagaaaagaaagttattagacacgacatgccggatcgcacccttgcagctcaccaacaaaaattcaggctgccagcctctgcagaaccaaaaggaaatgaatacggcagaaattactttgacccactgatggatgaggaaataaacccaaggcagtgtgcgacggaggtcagcagagaagtttgtctaatggctaaaggagagaaagcagaatcaggagtggataatacagctggcctttcagagaaggaaacacagaagaatcctcgtgcaccaatggatgaggcagacgttaaatccgcagcacactcttctcaggggagcattcctaaaaaaatcggtccctgttctatggactatgatcccaatctcttagaagaagacgatgaactacactctcagggagatagcctgacggatcattctgtgaaaggaaaatcaactgtttggagaattggagaagctgaagattattcacaggacatatcttacttggaggaactggaggaacaccgattttctgtttgctgttcttcagttgctgatagtagatatggagacttcttcaagcatctccattttgtgctggtatcagcgtcttcagaacttcagttatctcaatggcaaagccagggcttctggtacattatactgctgatgttttttctctggttcctgaggctctacctgcattacttgggccagtggcttttcctccaggccatttcaactcctgttacaaaattccatttttctcttcacatcgttgagctttgctacccaacttcctcacttcacattggagaagagcttcccgtggttgtgatggggcctttaatgctgaatgcaatcctgcttcttttggttttgatcagatggggctgtcagctactctttgcctcctgtcctgatgtcttgtcaaagttaatcattaccatgggactatggacaattctggacccattggcagtgtttatactggatactctcctggggcggcttacagataatgaggagactcctgtggcggatgccgcgaagctctactggatgtttgtaagaaccgtgcagccaggcattcttggcgtggtgatcacagtgctgctttacatcctcctgttcgtcatttcttctttgattttatatttatattgtcttaggttgcacaatgactcttggatattagatgcttttcagcgcatccacagtgaagaaaccaagttcttcataccgtatgacttggagatttccaatcaggagctaagttatatagtgaaa

SEQ ID NO: 21194 - DNA, 802 bp, Homo sapiens
  source 1..802: mol_type = unassigned DNA
gcccatagtttattataaaggtgactgcaccctgcagccaccagcactgcctggctccacgtgcctcctggtctcagtatggcgctgtcctgggttcttacagtcctgagcctcctacctctgctggaagcccagatcccattgtgtgccaacctagtaccggtgcccatcaccaacgccaccctggaccggatcactggcaagtggttttatatcgcatcggcctttcgaaacgaggagtacaataagtcggttcaggagatccaagcaaccttcttttacttcacccccaacaagacagaggacacgatctttctcagagagtaccagacccgacaggaccagtgcatctataacaccacctacctgaatgtccagcgggaaaatgggaccatctccagatacgtgggaggccaagagcatttcgctcacttgctgatcctcagggacaccaagacctacatgcttgcttttgacgtgaacgatgagaagaactgggggctgtctgtctatgctgacaagccagagacgaccaaggagcaactgggagagttctacgaagctctcgactgcttgcgcattcccaagtcagatgtcgtgtacaccgattggaaaaaggataagtgtgagccactggagaagcagcacgagaaggagaggaaacaggaggagggggaatcctagcaggacacagccttggatcaggacagagacttgggggccatcctgcccctccaacccgacatgtgtacctcagctttttccctcacttgcatcaataaagcttctgtgtttggaacag

SEQ ID NO: 21195 - DNA, 996 bp, Homo sapiens
  source 1..996: mol_type = unassigned DNA
cagcactgcctggctccacgtgcctcctggtctcagtatggcgctgtcctgggttcttacagtcctgagcctcctacctctgctggaagcccagatcccattgtgtgccaacctagtaccggtgcccatcaccaacgccaccctggaccgggtgagtgcctgggctagccctgtcctgagcacatgggcagctgcctcccttctctgggcttccctttccctgctggctgtggtcggacccccactcccggctctgcctttttctcttctgggtccccagggtgaaattctcaccagcccaggggactctggaggcaccccctgcctccaaacacagaagcctcactgcagagtccttcacggaggacggttctgtgctgggcctggaggggctgcctggggggcaatgactgatcctcagggtgagctcctgcatgcgcactgcccaccaggggcctcatctccccatctgcaaaatcagggagagatctgcctgagtctcctcccagctgacagtcaaagattcagcatcaagcccccatcaccagctcccaccttctccccagatcactggcaagtggttttatatcgcatcggcctttcgaaacgaggagtacaataagtcggttcaggagatccaagcaaccttcttttacttcacccccaacaagacagaggacacgatctttctcagagagtaccagacccgacaggaccagtgcatctataacaccacctacctgaatgtccagcgggaaaatgggaccatctccagatacggtgagggccagccctcaggcaggagggttcactgtgggaacagggcaggccagcataaggtgggggctggatgtagagccctggaggctttgggcacagagaaataaccactaacatttttgagctctaacgatgtgctcagaaacaactctaagaggacactgagagaattagaggaggaaaaagaagaacagagacctcaaatagtttccccaa

SEQ ID NO: 21196 - DNA, 980 bp, Homo sapiens
  source 1..980: mol_type = unassigned DNA
actgcctggctccacgtgcctcctggtctcagtatggcgctgtcctgggttcttacagtcctgagcctcctacctctgctggaagcccagatcccattgtgtgccaacctagtaccggtgcccatcaccaacgccaccctggaccgggtgagtgcctgggctagccctgtcctgagcacatgggcagctgcctcccttctctgggcttccctttacctgctggctgtggtcgcacccccactcccagctctgcctttttctcttctgggtccccagggtgaaattctcaccagcccaggggactctggaggcaccccctgcctccaaacacagaagcctcactgcagagtccttcacggaggacggttctgtgctgggcctggaggggctgcctggggggcaatgactgatcctcagggtgagctcctgcatgcgcactgcccaccaggggcctcatctccccatctgcaaaatcagggagagatctgcctgagtctcctcccagctgacagtcaaagattcagcatcaagcccccatcaccagctccccccttctccccagatcactggcaagtggttttatatcgcatcggcctttcgaaacgaggagtacaataagtcggttcaggagatccaagcaaccttcttttactttacccccaacaagacagaggacacgatctttctcagagagtaccagacccgccagaaccagtgcttctataactccagttacctgaatgtccagcgggagaatgggaccgtctccagatacgagggaggccgagaacatgttgctcacctgctgttccttagggacaccaagaccttgatgtttggttcctacctggacgatgagaagaactgggggctgtctttctatgctgacaagccagagacgaccaaggagcaactgggagagttctacgaagctctcgactgcttgtgcattcccaggtcagatgtcatgtacaccgact

SEQ ID NO: 21197 - DNA, 760 bp, Homo sapiens
  source 1..760: mol_type = unassigned DNA
agcactgcctggctccacgtgcctcctggtctcagtatggcgctgtcctgggttcttacagtcctgagcctcctacctctgctggaagcccagatcccattgtgtgccaacctagtaccggtgcccatcaccaacgccaccctggaccggatcactggcaagtggttttatatcgcatcggcctttcgaaacgaggagtacaataagtcggttcaggagatccaagcaaccttcttttactttacccccaacaagacagaggacacgatctttctcagagagtaccagacccgccagaaccagtgcttctataactccagttacctgaatgtccagcgggagaatgggaccgtctccagatacgagggaggccgagaacatgttgctcacctgctgttccttagggacaccaagaccttgatgtttggttcctacctggacgatgagaagaactgggggctgtctttctatgctgacaagccagagacgaccaaggagcaactgggagagttctacgaagctctcgactgcttgtgcattcccaggtcagatgtcatgtacaccgactggaaaaaggataagtgtgagccactggagaagcagcacgagaaggagaggaaacaggaggagggggaatcctagcaggacacagccttggatcaggacagagacttgggggccatcctgcccctccaacccgacatgtgtacctcagctttttccctcacttgcatcaataaagcttctgtgtttggaacag

SEQ ID NO: 21198 - DNA, 2861 bp, Homo sapiens
  source 1..2861: mol_type = unassigned DNA
acatacccggggagggcagtagaaaggtgatcaatcttcatcaggctacatttccaatcacctaaacaaccgagcaagacaagccactccgacaaggttggctgcccggcgggtctctgtgagagatccaggtagatggtgaacggccccggcagctgagggcaggccaggcccccagacgcatcagaccctgaaggactgcgtggtgggagccctgcaccgctcctggccccgggccccctggatccgtcggggcgcctccacccagctgttagcatgatgtcttacctcaaacaacccccatacggcatgaacgggctgggcctggccgggcccgccatggacctcctgcacccatccgtgggctatccggccactccgcggaagcagcggcgggagcgcaccaccttcacgcgttcacagctggacgtgctcgaggcgctcttcgccaagactcgctaccctgacatcttcatgcgggaggaggtggcgctcaagatcaacctgccggagtctagagtccaggtctggttcaagaaccgccgcgccaaatgccgccagcagcagcagagcgggagcggaaccaagagccgcccagccaagaagaagtcctctccagtgcgggagagctcgggctccgaaagcagtggccaattcacgccgccagctgtgtccagctctgcctcgtcctctagctcggcgtccagctcttccgccaacccagcggctgcagcggctgcgggactaggtgggaacccggtggcggccgcgtcgtcgctgagtacaccagctgcctcatctatctggagcccggcctccatctcgccaggctcagcgcccgcgtccgtgtcggtgccggagccattggccgcgcctagcaacacctcgtgtatgcagcgctccgtagctgcaggcgccgccaccgcagcagcctcttatcccatgtcctacggccagggcggcagctacggccaaggctaccctacgccctcctcttcctactttggcggcgtggactgcagctcatacctagcgcccatgcactcacatcaccacccgcaccagctcagccccatggcaccctcctccatggcgggccaccatcatcaccacccacatgcgcaccacccgttgagccagtcctcaggccaccaccaccaccatcaccaccaccaccaccaaggctacggtggctctgggcttgccttcaactctgccgactgcttggattacaaggagcctggcgccgctgctgcttcctccgcctggaaactcaacttcaactcccccgactgtctggactataaggaccaagcctcatggcggttccaggtcttgtgagcccaggaatgaaagaggagaagaaacgcaactacctgcgccctccgtggtcccgatcctgttgctgctgctgcaccgcccgcctttgcctcgtcttctccaaaactgaattttcaccccccaaaaagatgtccattgcctgcactgccgcccccatttttgtgccacttgcttggggggatgtgcaaacccaccctgccccttggatggggggaccggtgcttcggcttggcctacacattctatacaggagagatgtattatttccccccttcagcccctactaaactcttaagcctccccttccagtctttctggacagctattaagcacttgcagccttcggaggctctgcgctctgatccgctgtttgagcccaacactttaatttattctttctggacactggagtcactaactggcgtgtttctgcccattggagcacccgcacactactccaaatcaaaaccactaagagttcctcccgcgcagactgctgccccttcagctgccctcgattttgctccacgcctgccggccagagcctcccggcgtttcttccgccccagcggagtgcgctggggcgcgccagggctaggcccgccggaggagcgcgtccccagccttccgcgcacagagccgcatcccgccccgccctgcgctggactggttcaagcttccgcctcggcgggaacgctgtacatagtcaggtccgttccagggaccacttaaactttttagttgctgttggttggttgaactgaacatatcttgtcttagcacccaggaaacagaactttaagatatatacagcacatatatatatatatacatatatatatacacatatataaaaaacaaaagcaaaaaatattttccctctgtccgtcccccttctgctcttcctcaatcaatggcgctttttctttttcagttgttgcaaagctgccctgccctcttcacatcttctccctctgtgtatttattgaagagaaccgcttggtttcaggaagctgggcgcgggatatccgaagtgtggaggaaacagacaagtcagggtacagaggtgggggttgggcaggggcgcagggctgaccccctcacccggtctaagcacagggtcgcagttccagtttacaaacctaaaacaagaaaaccaaaaccagggaacaaaacaacaaaacaaaacaaaatccgtaaaagtacagcattagggaaaaacaaacaaacccaggccccaaacccagttccaactcctctgtcggcttctctctttcaacacccttgttttgtctagtgagtttttagtgcaccttcgttctccgaaatctgcggagagcccgcgcgcctgtgtatcaattttggctttggccgcttcgtccagtaggtgggaaagtaatttgtaaatttgatttgtctgatgtgaagatcacaaattacttgttgaaatgtaaggcagtccccctcctcctctttatctacattacttcccgaaaataaatgcaaattaatgaacggct

SEQ ID NO: 21199 - DNA, 2861 bp, Homo sapiens
  source 1..2861: mol_type = unassigned DNA
ggacgctgggctccaacgtttcagtagaagcgcttaagacttgcaaacacccttggtggggacctggaaccccgggagatgccgacgagcaagcaggttggctgcccggcgggtctctgtgagagatccaggtagatggtgaacggccccggcagctgagggcaggccaggcccccagacgcatcagaccctgaaggactgcgtggtgggagccctgcaccgctcctggccccgggccccctggatccgtcggggcgcctccacccagctgttagcatgatgtcttacctcaaacaacccccatacggcatgaacgggctgggcctggccgggcccgccatggacctcctgcacccatccgtgggctatccggccactccgcggaagcagcggcgggagcgcaccaccttcacgcgttcacagctggacgtgctcgaggcgctcttcgccaagactcgctaccctgacatcttcatgcgggaggaggtggcgctcaagatcaacctgccggagtctagagtccaggtctggttcaagaaccgccgcgccaaatgccgccagcagcagcagagcgggagcggaaccaagagccgcccagccaagaagaagtcctctccagtgcgggagagctcgggctccgaaagcagtggccaattcacgccgccagctgtgtccagctctgcctcgtcctctagctcggcgtccagctcttccgccaacccagcggctgcagcggctgcgggactaggtgggaacccggtggcggccgcgtcgtcgctgagtacaccagctgcctcatctatctggagcccggcctccatctcgccaggctcagcgcccgcgtccgtgtcggtgccggagccattggccgcgcctagcaacacctcgtgtatgcagcgctccgtagctgcaggcgccgccaccgcagcagcctcttatcccatgtcctacggccagggcggcagctacggccaaggctaccctacgccctcctcttcctactttggcggcgtggactgcagctcatacctagcgcccatgcactcacatcaccacccgcaccagctcagccccatggcaccctcctccatggcgggccaccatcatcaccacccacatgcgcaccacccgttgagccagtcctcaggccaccaccaccaccatcaccaccaccaccaccaaggctacggtggctctgggcttgccttcaactctgccgactgcttggattacaaggagcctggcgccgctgctgcttcctccgcctggaaactcaacttcaactcccccgactgtctggactataaggaccaagcctcatggcggttccaggtcttgtgagcccaggaatgaaagaggagaagaaacgcaactacctgcgccctccgtggtcccgatcctgttgctgctgctgcaccgcccgcctttgcctcgtcttctccaaaactgaattttcaccccccaaaaagatgtccattgcctgcactgccgcccccatttttgtgccacttgcttggggggatgtgcaaacccaccctgccccttggatggggggaccggtgcttcggcttggcctacacattctatacaggagagatgtattatttccccccttcagcccctactaaactcttaagcctccccttccagtctttctggacagctattaagcacttgcagccttcggaggctctgcgctctgatccgctgtttgagcccaacactttaatttattctttctggacactggagtcactaactggcgtgtttctgcccattggagcacccgcacactactccaaatcaaaaccactaagagttcctcccgcgcagactgctgccccttcagctgccctcgattttgctccacgcctgccggccagagcctcccggcgtttcttccgccccagcggagtgcgctggggcgcgccagggctaggcccgccggaggagcgcgtccccagccttccgcgcacagagccgcatcccgccccgccctgcgctggactggttcaagcttccgcctcggcgggaacgctgtacatagtcaggtccgttccagggaccacttaaactttttagttgctgttggttggttgaactgaacatatcttgtcttagcacccaggaaacagaactttaagatatatacagcacatatatatatatatacatatatatatacacatatataaaaaacaaaagcaaaaaatattttccctctgtccgtcccccttctgctcttcctcaatcaatggcgctttttctttttcagttgttgcaaagctgccctgccctcttcacatcttctccctctgtgtatttattgaagagaaccgcttggtttcaggaagctgggcgcgggatatccgaagtgtggaggaaacagacaagtcagggtacagaggtgggggttgggcaggggcgcagggctgaccccctcacccggtctaagcacagggtcgcagttccagtttacaaacctaaaacaagaaaaccaaaaccagggaacaaaacaacaaaacaaaacaaaatccgtaaaagtacagcattagggaaaaacaaacaaacccaggccccaaacccagttccaactcctctgtcggcttctctctttcaacacccttgttttgtctagtgagtttttagtgcaccttcgttctccgaaatctgcggagagcccgcgcgcctgtgtatcaattttggctttggccgcttcgtccagtaggtgggaaagtaatttgtaaatttgatttgtctgatgtgaagatcacaaattacttgttgaaatgtaaggcagtccccctcctcctctttatctacattacttcccgaaaataaatgcaaattaatgaacggct

SEQ ID NO: 21200 - DNA, 2198 bp, Homo sapiens
  source 1..2198: mol_type = unassigned DNA
cctgagagcgggaccggcctcagctccaacacagcctccactgtgattaaaaataaaaattgctagagcagccctcactcgccacatctactttgatagctggctatttggaatttaaaggatatttgactttttctaacctcccatgaggctgtaagttccactgctccaaacccacccaccaaggactctgaacctgtccaccccgggcgcatcaagatcttccagctgggtacccccgatttgggccgactttgcacctccaaacaaccttagcatgatgtcttatcttaagcaaccgccttacgcagtcaatgggctgagtctgaccacttcgggtatggacttgctgcacccctccgtgggctacccggggccctgggcttcttgtcccgcagccaccccccggaaacagcgccgggagaggacgacgttcactcgggcgcagctagatgtgctggaagcactgtttgccaagacccggtacccagacatcttcatgcgagaggaggtggcactgaaaatcaacttgcccgagtcgagggtgcaggtatggtttaagaatcgaagagctaagtgccgccaacaacagcaacaacagcagaatggaggtcaaaacaaagtgagacctgccaaaaagaagacatctccagctcgggaagtgagttcagagagtggaacaagtggccaattcactcccccctctagcacctcagtcccgaccattgccagcagcagtgctcctgtgtctatctggagcccagcttccatctccccactgtcagatcccttgtccacctcctcttcctgcatgcagaggtcctatcccatgacctatactcaggcttcaggttatagtcaaggatatgctggctcaacttcctactttgggggcatggactgtggatcatatttgacccctatgcatcaccagcttcccggaccaggggccacactcagtcccatgggtaccaatgcagtcaccagccatctcaatcagtccccagcttctctttccacccagggatatggagcttcaagcttgggttttaactcaaccactgattgcttggattataaggaccaaactgcctcctggaagcttaacttcaatgctgactgcttggattataaagatcagacatcctcgtggaaattccaggttttgtgaagacctgtagaacctctttttgtgggtgatttttaaatatactgggctggacattccagttttagccaggcattggttaaaagagttagatgggatgatgctcagactcatctgatcaaagttccgagaggcatagaaggaaaaacgaagggccttagaggggcctacaaaccagcaacatgaaatggacaaaccaatctgcttaagatcctgtcatagttttagatcattggttatcctgatttgcaaagtgatcaaaagcattctagccatgtgcaaccaaacaccaccaaaaataaaatcaaacaaaactaagttgtgaaggaagggagggaaggtcatagccttcttaagcagaggtgttccattgttttagccaatccttggttgaatcttaggaatgaacagtgtctcaagctcattcacgtttcatgaccaactggtagttggcactgaaaaaacttttcagggctgtgtgaattgtgtgactgattgtcctagatgcactactttatttaaaaaataatgttcataaggagtcaatatgtagtttaagagacaatcagtgtgtgtcttataaatggtacatctgtggtttttaatctgtgctagacttcaaaactgtgatctcctgttattgtatgcaaccttgaactccacctctgcaggggttcttctgtgattaaataggttataattataagcaaaattcagagcaactgagtactgatctaaaaagattacctttggctggaggtgagctgcactgaaactttacgacaaaatgtctctggacaaagagagtcagagaagagaagcaaaaggacactaattcatctgtaatttactgttggtaagcctagcagtaaagagacattggtcaattgctctgaccctgatgaattattaaactgagatcattgtcgtttatgcttgcagatgttaaatggaaaagttatatatgcataaaccttttcttcctggatttggcagatatgtataattatattaaaatggttctagcaca

SEQ ID NO: 21201 - DNA, 1082 bp, Homo sapiens
  source 1..1082: mol_type = unassigned DNA
tttttaagttagtgctggaacgtggaagagctgctgcctccgaagcagtaaaccagcccctctgtttgtttgtttgctttgcccttagttccactgctccaaacccacccaccaaggactctgaacctgtccaccccgggcgcatcaagatcttccagctgggtacccccgatttgggccgactttgcacctccaaacaaccttagcatgatgtcttatcttaagcaaccgccttacgcagtcaatgggctgagtctgaccacttcgggtatggacttgctgcacccctccgtgggctacccggccaccccccggaaacagcgccgggagaggacgacgttcactcgggcgcagctagatgtgctggaagcactgtttgccaagacccggtacccagacatcttcatgcgagaggaggtggcactgaaaatcaacttgcccgagtcgagggtgcaggtatggtttaagaatcgaagagctaagtgccgccaacaacagcaacaacagcagaatggaggtcaaaacaaagtgagacctgccaaaaagaagacatctccagctcgggaagtgagttcagagagtggaacaagtggccaattcactcccccctctagcacctcagtcccgaccattgccagcagcagtgctcctgtgtctatctggagcccagcttccatctccccactgtcagatcccttgtccacctcctcttcctgcatgcagaggtcctatcccatgacctatactcaggcttcaggttatagtcaaggatatgctggctcaacttcctactttgggggcatggactgtggatcatatttgacccctatgcatcaccagcttcccggaccaggggccacactcagtcccatgggtaccaatgcagtcaccagccatctcaatcagtccccagcttctctttccacccagggatatggagcttcaagcttgggttttaactcaaccactgattgcttggattataaggaccaaactgcctcctggaagcttaacttcaatgctgactgcttggattataaagatcagacatcctcgtggaaattccaggttttgtgaagacc

SEQ ID NO: 21202 - DNA, 908 bp, Homo sapiens
  source 1..908: mol_type = unassigned DNA
tggaacgtggaagagctgctgcctccgaagcagtaaaccagcccctctgtttgtttgtttgctttgcccttagttccactgctccaaacccacccaccaaggactctgaacctgtccaccccgggcgcatcaagatcttccagctgggtacccccgatttgggccgactttgcacctccaaacaaccttagcatgatgtcttatcttaagcaaccgccttacgcagtcaatgggctgagtctgaccacttcgggtatggacttgctgcacccctccgtgggctacccggggccctgggcttcttgtcccgcagccaccccccggaaacagcgccgggagaggacgacgttcactcgggcgcagctagatgtgctggaagcactgtttgccaagacccggtacccagacatcttcatgcgagaggaggtggcactgaaaatcaacttgcccgagtcgagggtgcaggtatggtttaagaatcgaagagctaagtgccgccaacaacagcaacaacagcagaatggaggtcaaaacaaagtgagacctgccaaaaagaagacatctccagctcgggaagtgagttcagagagtggaacaagtggccaattcactcccccctctagcacctcagtcccgaccattgccagcagcagtgctcctgtgtctatctggagcccagcttccatctccccactgtcagatcccttgtccacctcctcttcctgcatgcagaggtcctatcccatgacctatactcaggcttcaggttatagtcaaggatatgctggctcaacttcctactttgggggcatggactgtggatcatatttgacccctatgcatcaccagcttcccggaccaggggccacactcagtcccatgggtaccaatgcagtcaccagccatct

SEQ ID NO: 21203 - DNA, 1279 bp, Homo sapiens
  source 1..1279: mol_type = unassigned DNA
agctccaacacagcctccactgtgattaaaaataaaaattgctagagcagccctcactcgccacatctactttgtatgtattgcagaggggcccacgcgtgtttagaactctagccgccttcctcattttcgttctttaaaaaaaattttttttggttgtgtttgacttttcatggaagggtgaagactgcaaggtttctaactcaatactcttgatttcttttaggatagctggctatttggaatttaaaggatatttgactttttctaacctcccatgaggctgtaagttccactgctccaaacccacccaccaaggactctgaacctgtccaccccgggcgcatcaagatcttccagctgggtacccccgatttgggccgactttgcacctccaaacaaccttagcatgatgtcttatcttaagcaaccgccttacgcagtcaatgggctgagtctgaccacttcgggtatggacttgctgcacccctccgtgggctacccggccaccccccggaaacagcgccgggagaggacgacgttcactcgggcgcagctagatgtgctggaagcactgtttgccaagacccggtacccagacatcttcatgcgagaggaggtggcactgaaaatcaacttgcccgagtcgagggtgcaggtatggtttaagaatcgaagagctaagtgccgccaacaacagcaacaacagcagaatggaggtcaaaacaaagtgagacctgccaaaaagaagacatctccagctcgggaagtgagttcagagagtggaacaagtggccaattcactcccccctctagcacctcagtcccgaccattgccagcagcagtgctcctgtgtctatctggagcccagcttccatctccccactgtcagatcccttgtccacctcctcttcctgcatgcagaggtcctatcccatgacctatactcaggcttcaggttatagtcaaggatatgctggctcaacttcctactttgggggcatggactgtggatcatatttgacccctatgcatcaccagcttcccggaccaggggccacactcagtcccatgggtaccaatgcagtcaccagccatctcaatcagtccccagcttctctttccacccagggatatggagcttcaagcttgggttttaactcaaccactgattgcttggattataaggaccaaactgcctcctggaagcttaacttcaatgctgactgcttggattataaagatcagacatcctcgtggaaattccaggttttgtga

SEQ ID NO: 21204 - DNA, 797 bp, Homo sapiens
  source 1..797: mol_type = unassigned DNA
agcaaatctccctgagagcgggaccggcctcagctccaacacagcctccactgtgattaaaaataaaaattgctagagcagccctcactcgccacatctactttgatagctggctatttggaatttaaaggatatttgactttttctaacctcccatgaggctgtaaggattgtaggaaacttgaaagttccactgctccaaacccacccaccaaggactctgaacctgtccaccccgggcgcatcaagatcttccagctgggtacccccgatttgggccgactttgcacctccaaacaaccttagcatgatgtcttatcttaagcaaccgccttacgcagtcaatgggctgagtctgaccacttcgggtatggacttgctgcacccctccgtgggctacccggccaccccccggaaacagcgccgggagaggacgacgttcactcgggcgcagctagatgtgctggaagcactgtttgccaagacccggtacccagacatcttcatgcgagaggaggtggcactgaaaatcaacttgcccgagtcgagggtgcaggtatggtttaagaatcgaagagctaagtgccgccaacaacagcaacaacagcagaatggaggtcaaaacaaagtgagacctgccaaaaagaagacatctccagctcgggaagtgagttcagagagtggaacaagtggccaattcactcccccctctagcacctcagtcccgaccattgccagcagcagtgctcctgtgtctatctggagcccagcttccatctccccactgtcagatccct

SEQ ID NO: 21205 - DNA, 3668 bp, Homo sapiens
  source 1..3668: mol_type = unassigned DNA
tactctggttagaaatatattactaatctaaactttgttgttggctggctctgaaaaatcagaacattagaaatggttcgcttcacttgtgcaaagcactttaaattgttcaagtagtttaacatattcaagaggaaaataaagagcatttaactttatttacagccttaagtggagttgggagccgagctgaacttagaaactttgaccaaaagagcgagttaggggcgaggatgcgggcgtgggccaagcggaagagcaggagccgggaagaagcccggtgagaagagtgcagagcgctcgaacccacactccgcgagggtccccaaagcagacagcgggcgctggcggtgccagggaagccgactcctctttgcgctctaggcccactgtggggttggggctcgtatagaccccagggcacagccagggcgcctggaccctaggcgcaggcctactgagccgcggcgaagtccaggcgttgtctgaaggccgcggtgtgccctcgtcgcgccctgggctggcgggccaatatgagcggcaggcccagagagcgcaggtgggggcgaccctcaggtcacgccagggtcatggcccgctctgacccctgctctgcccctgccctaggaagatgttagctcagaggcacagagctacgccttcgaagcgcgcagcgccggccaaggggaaggaaaggggagcctggagaaaatcgcagggaagaactagagggagccgggcccagaagctcagggcgaggccgaggcggctgaggctgctttagctcctgctccgggctggagctgccagggctgccgccgccgcctccttcaggcgggcgcaggcgagcgggcgggcggagtgggggactctccgggcgctgacatttgcaggctgccctcctgattggtcccctcgccgagctgctcacgggttcattcaactgttaagcacctccccgtctctctaaaggacattataatgcaagaagccccctttttaaccacaaaccgaattttctttcatttaggtgatctatatatatctatatcgtatagcttatagcttatatctattttaaataacttaaagccgctaaaatttgggggggaacagctttcgccctggagcggtgcgcgatgctgtctcatgccgacctcctggacgccaggctaggtatgaaagatgccgccgagcttctgggccaccgggaggcggtgaagtgtaggctgggcgtggggggctccgaccccgggggccatccgggggacctggcgcccaactctgacccagtggagggagccactctgctgcccggggaggacatcaccacagtgggctctactccggcctcgctggcggtgagcgccaaagacccggacaagcagcccgggccccagggcggcccgaaccccagccaagccggccagcagcagggccaacagaagcagaagcgccaccggacgcgcttcacccccgcacagctcaacgagttggagaggagcttcgccaagactcactaccccgacatctttatgcgtgaggagctggcactgcgtatcgggctgaccgagtcccgagtgcaggtctggttccagaaccgacgcgccaagtggaagaagcgcaaaaagacgaccaacgtgttccgtgcgcccggcacactgctgcccacgccaggcctgcctcagttcccgtcggctgccgccgccgctgccgccgccatgggcgacagcctgtgctctttccacgccaacgacacccgctgggcggcggccgccatgcctggcgtgtcacagctgcctctgccgccggcgctgggcaggcagcaggccatggcgcagtcgctgtcccagtgcagcctggcggccggtccgccgcccaactccatgggcctgtccaacagcctggcgggttccaacggcgcggggctgcagtcgcacctctaccagcccgccttccccggcatggtgcccgcctccctccccggccccagcaacgtctccggttcgccccagctctgcagctccccggacagcagcgacgtgtggcggggcaccagcatcgcctccctccgccgcaaggcgctagagcacacagtctctatgagcttcacttaatgcagccgcgccccggcccgctccgcccccagcaccgccccgggggccgccccgaggcccttccggcgcgcacccggaccccggcgccctgccccgtcccgccccggccttcgccccgtctcgtttcgtcctcgcctctctcctccactcgctcgggctcaccccaagccccagcccgcgaggcctcccctccgcctgatttcgatcgcccgcggtcccccgtctcccggccgcccctcttcccttcccacccagctgcgccctcggctcggtctccagcgcctcagcccacccttcccgccaccctggcctccctgcttgcgctggccgtgctcgcgccctcctcctggccttctgacgggcggcgttcccacccacaccttcgacgcgacgcctacgacccccctcgcccgccgcctcccctccggtcccctctttccccacacttcgcgaccctcctcccgcgcccggcaaaaagtatccttcccgccattttacgtaccagggagtcgactcaggatctgaaatcagacaccaatggactggtttgtgggcagaaacacacacactcgcactctcgctcacgctcagacgctacacacgcgcgcgcacagacacggtgcacctaggtcacacacggacgtgttcaagggacagcacaatgttagggatttttgtcttaaaggaggacaagcattgctaccaaccgcctcatctgagggcccaactgatatgatttgatttatccttgtactctccaagctcctgtctttctttcctctcccaccacgctacccttgcccagtccacccagtcacatccgtgcagccctctcttggcttgcaagataacgcttttatttttattttatcttattttcattttcttaagcacaactgtgtgagagtgtagaagggaaggcttctcaggaggaacgtgacagtggattgggtggctggagtagactaaagcagtcatgtgacgaggaagaggtgatctgacccattttgataagtctttataaggaagaataaaataaacgtgtaagcaaaattttcttttgtaaaagcaaaagccacatctcttttctggatccttcaggactggggtttgtttgcttccttttctgtttctgtcttctcgctgctctgtgcccttggttgttttgtggtggtcctgtcgtccctcgtgcccctcggccacctgctggcagccgatgggggcactcggacatctacaaccctgcaactttgtacagagaaacacaatcagctctttctgcatgtgctggtcaaatccaaacccagagaacagaagcgctttctaagaatgaacaaatatgtgaaataggatgttttgtgtagataaagcattcttgttacatactggtcaatttgtgatatgttttaacttaatgtctgtgtttatttatggaattcggttttcttaataaatgtttgagctaatataaagcatattatttgacttttccggacaagtttatatcaagttaaatgtaaatggataaaataaaatcattttcagtatgtg

SEQ ID NO: 21206 - DNA, 2002 bp, Homo sapiens
  source 1..2002: mol_type = unassigned DNA
ctcgcctccctcctctaattctctaggacacttaggtccccaaccctccctcgggctgtttatcgttgtgccagatgcacagcacattgtgtgacactgacttaagattctaactatgtgcaagagggaaaaaaacagtggagaaggctgggctggaccacgggaaagagataggaaaacggatacgaatgtaaggcacagagttggctcggcgtccctggcagttaggaagacaggtccctggaggggccttggcgggtctccgctcgcgggagttccgcggtgtctttcccagtgctatctgcaggctggccagcttcctctgcgctccggaaagctgcggcccagcgcggactagtgaggacctccacagctcctgacattgccaggagtcctgtcggcgttttctcccagcctccgccatgccggcggtgctgggttttgaaggcagcgccaataagattggcgtgggcgtggtgcgggatggcaaggtgctggcgaacccgcggcggacttacgtcacgcctcctggcacaggattccttccaggtgatacagccaggcatcaccgagctgttatcctagacctgctgcaggaggcactaacagagtctggattaacctcccaggatatcgactgcattgcatacaccaagggccctggcatgggtgccccactggtttctgtggctgttgtggcccgtactgtggcccaactgtggaataagccattggtgggtgtgaaccactgtataggccacattgagatgggccgcctcatcactggagccaccagcccaaccgtgttgtatgtgagtggaggaaatacgcaggtgattgcatactcggaacatcgttaccgtatctttggggaaaccatcgatattgcagtgggtaattgtctggatcgttttgctcgagtgctgaagatttctaacgacccaagtccaggatacaacattgaacagatggcaaagcgaggcaagaagctagttgagctgccatacactgtaaaggggatggacgtctcattctcagggatcctgtctttcattgaggatgtagcccatcggatgctggccacaggcgagtgtactcctgaggatctgtgtttctccctgcaggaaactgtgtttgcaatgctggtagagatcacagagcgagccatggcacattgtggctcccaggaggccctcattgtgggaggagtggggtgtaatgtgaggctacaggagatgatggcaacaatgtgccaggaacgtggagcccggctttttgctacagatgagagattctgtattgacaatggagcgatgatagcccaggctggctgggagatgtttcgggctggacacaggaccccactcagtgattctggggttacacagaggtatcggacagatgaagtagaggtgacctggagggactaataagatcaacagaatcagagtagatagttccttaatcggaacccaaaggaccccgtgcctcaatctctatcctgatgtcatgggagtcctagcaaagctatagactccaagcaaggcttggggtcctttatggaaccccaggatgactcagcaataaaatatttttggttttttggttttgtatgttggtgattggattgtgttgttcaggaccaatgtagatttggtgctggataaattcttgttggagcttgctgctgtggaaccaagaatgaggtatctttttttttttttttaagaaacggaatcttgctgtgtttcccaggctggtctcgaactgggctcaagcagtcttaccacctcagcctcctgagtaaggatgccattgtgcctggcaacaatagtagtatcataactattattatagcatcgggtcccgtgctaactgctttacattcattctctcatttaaattctttgaagtaggtgtgcaagacttctctcaaaatagcctggaggctcacacctgttatcccagtgctgtgggaggccaagtcaggaggatcccttga

SEQ ID NO: 21207 - DNA, 1892 bp, Homo sapiens
  source 1..1892: mol_type = unassigned DNA
gctctagcgggtatctgcccaccatggccctggtgctgatcctccagctgctgaccctctggcctctgtgtcacacagacatcactccgtctgtggccattatagtccccccagcttcataccaccctaagccatggctgggagctcagccggctacagttgtgacccctggggtcaacgtgaccttgagatgccgggcaccccaacccgcttggagatttggacttttcaagcctggagagatcgctccccttctcttccgggatgtgtcctccgagctggcagaattctttctggaggaggtgactccagcccaagggggaatttaccgctgctgctaccgaaggccagactgggggccgggtgtctggtcccagcccagcgatgtcctggagctgctggtgacagaggagctgccgcggccgtcgctggtggcgctgcccgggccggtggtgggtcctggcgccaacgtgagcctgcgctgcgcgggccgcctgcggaacatgagcttcgtgctgtaccgcgagggcgtggcggccccgctgcagtaccgccactccgcgcagccctgggccgacttcacgctgctgggcgcccgcgcccccggcacctacagctgctactatcacacgccctccgcgccctacgtgctgtcgcagcgcagcgaggtgctggtcatcagctgggaaggtgagggccctgaggcccggcccgcctcctccgccccaggaatgcaggccccaggacctccgccctcagacccaggagcccaggcccccagcctctcctccttcagacccaggggtctagtcctgcagcccctcctccctcagacccaggattcctgggacccagcccctcctccctcagatccaggagtctagtcctccagctcctcctccctcagacccaggattcccgggccccagtacctcctccctcagacccaggactccaggcccccagcccctccttcctggacccaggactccaggcccccagcccctccttcctgatccagcagtccaggccccagccccttcttcctggacccaggagttgaagcctccatcgactccccctcaactttgagactgtagagtcaggtccctaagtccaccccaggggctggaaacctggagttcagggcccagactttggggtccgggagctgatggcccctctctcccggctccgcccgcagactctggctcctccgactacacccgggggaacctagtccgcctggggctggccgggctggtcctcatctccctgggcgcgctggtcacttttgactggcgcagtcagaaccgcgctcctgctggtatccgcccctgagccccaggagcactgcagcccgagacttccaacctgagtggcggagaagctgggaccctgggctggactgtcctttcctgcagccccacagtcctgctggctgagctccgcggaacggtccttagaccccgctgtgccctgtgctgtagcttctttccaggcctttcccaaggagtagctgaaaggaagacgcgattagtggttaagacttccaagccagaagacagagggttcgaatcccagcactgccgtctactcactgtagtagtagcagctacagaaaggtagtagtgagacgtgaagccagctggacttcctgggttgaatggggacctggagaacttttctgtcttacaagaggattgtaaaatggaccaatcagcactctgtaagatggaccaatcagcgctctgtaaaatggaccaatcagcaggacatgggcggggacaataagggaataaaagctggcgagcgcggcaccccaccagagtctgcttccacgctgtgggagctttgttctcttgctctacacaataaatcttgctgctgct

SEQ ID NO: 21208 - DNA, 2055 bp, Homo sapiens
  source 1..2055: mol_type = unassigned DNA
gcgtgcgcactcgcgcagaacaaagatggagccgtggagtgccatagggctatgacacagtcacccacaggcccccacctcgatactctcttccgtaaatgaggatctgggtctggttttctgatgttgcctcatttcctgggaggggagagggtgcgaccaagccctggctccagctctagcgggtatctgcccaccatggccctggtgctgatcctccagctgctgaccctctggcctctgtgtcacacagacatcactccgtctgtccccccagcttcataccaccctaagccatggctgggagctcagccggctacagttgtgacccctggggtcaacgtgaccttgagatgccgggcaccccaacccgcttggagatttggacttttcaagcctggagagatcgctccccttctcttccgggatgtgtcctccgagctggcagaattctttctggaggaggtgactccagcccaagggggaatttaccgctgctgctaccgaaggccagactgggggccgggtgtctggtcccagcccagcgatgtcctggagctgctggtgacagaggagctgccgcggccgtcgctggtggcgctgcccgggccggtggtgggtcctggcgccaacgtgagcctgcgctgcgcgggccgcctgcggaacatgagcttcgtgctgtaccgcgagggcgtggcggccccgctgcagtaccgccactccgcgcagccctgggccgacttcacgctgctgggcgcccgcgcccccggcacctacagctgctactatcacacgccctccgcgccctacgtgctgtcgcagcgcagcgaggtgctggtcatcagctgggaaggtgagggccctgaggcccggcccgcctcctccgccccaggaatgcaggccccaggacctccgccctcagacccaggagcccaggcccccagcctctcctccttcagacccaggggtctagtcctgcagcccctcctccctcagacccaggattcctgggacccagcccctcctccctcagatccaggagtctagtcctccagctcctcctccctcagacccaggattcccgggccccagtacctcctccctcagacccaggactccaggcccccagcccctccttcctggacccaggactccaggcccccagcccctccttcctgatccagcagtccaggccccagccccttcttcctggacccaggagttgaagcctccatcgactccccctcaactttgagactgtagagtcaggtccctaagtccaccccaggggctggaaacctggagttcagggcccagactttggggtccgggagctgatggcccctctctcccggctccgcccgcagactctggctcctccgactacacccgggggaacctagtccgcctggggctggccgggctggtcctcatctccctgggcgcgctggtcacttttgactggcgcagtcagaaccgcgctcctgctggtatccgcccctgagccccaggagcactgcagcccgagacttccaacctgagtggcggagaagctgggaccctgggctggactgtcctttcctgcagccccacagtcctgctggctgagctccgcggaacggtccttagaccccgctgtgccctgtgctgtagcttctttccaggcctttcccaaggagtagctgaaaggaagacgcgattagtggttaagacttccaagccagaagacagagggttcgaatcccagcactgccgtctactcactgtagtagtagcagctacagaaaggtagtagtgagacgtgaagccagctggacttcctgggttgaatggggacctggagaacttttctgtcttacaagaggattgtaaaatggaccaatcagcactctgtaagatggaccaatcagcgctctgtaaaatggaccaatcagcaggacatgggcggggacaataagggaataaaagctggcgagcgcggcaccccaccagagtctgcttccacgctgtgggagctttgttctcttgctctacacaataaatcttgctgctgct

SEQ ID NO: 21209 - DNA, 1375 bp, Homo sapiens
  source 1..1375: mol_type = unassigned DNA
atttcctgggaggggagagggtgcgaccaagccctggctccagctctagcgggtatctgcccaccatggccctggtgctgatcctccagctgctgaccctcttccccccagcttcataccaccctaagccatggctgggagctcagccggctacagttgtgacccctggggtcaacgtgaccttgagatgccgggcaccccaacccgcttggagatttggacttttcaagcctggagagatcgctccccttctcttccgggatgtgtcctccgagctggcagaattctttctggaggaggtgactccagcccaagggggaatttaccgctgctgctaccgaaggccagactgggggccgggtgtctggtcccagcccagcgatgtcctggagctgctggtgacagaggagctgccgcggccgtcgctggtggcgctgcccgggccggtggtgggtcctggcgccaacgtgagcctgcgctgcgcgggccgcctgcggaacatgagcttcgtgctgtaccgcgagggcgtggcggccccgctgcagtaccgccactccgcgcagccctgggccgacttcacgctgctgggcgcccgcgcccccggcacctacagctgctactatcacacgccctccgcgccctacgtgctgtcgcagcgcagcgaggtgctggtcatcagctgggaagactctggctcctccgactacacccgggggaacctagtccgcctggggctggccgggctggtcctcatctccctgggcgcgctggtcacttttgactggcgcagtcagaaccgcgctcctgctggtatccgcccctgagccccaggagcactgcagcccgagacttccaacctgagtggcggagaagctgggaccctgggctggactgtcctttcctgcagccccacagtcctgctggctgagctccgcggaacggtccttagaccccgctgtgccctgtgctgtagcttctttccaggcctttcccaaggagtagctgaaaggaagacgcgattagtggttaagacttccaagccagaagacagagggttcgaatcccagcactgccgtctactcactgtagtagtagcagctacagaaaggtagtagtgagacgtgaagccagctggacttcctgggttgaatggggacctggagaacttttctgtcttacaagaggattgtaaaatggaccaatcagcactctgtaagatggaccaatcagcgctctgtaaaatggaccaatcagcaggacatgggcggggacaataagggaataaaagctggcgagcgcggcaccccaccagagtctgcttccacgctgtgggagctttgttctcttgctctacacaataaatcttgctgctgct

SEQ ID NO: 21210 - DNA, 1355 bp, Homo sapiens
  source 1..1355: mol_type = unassigned DNA
atggccctggtgctgatcctccagctgctgaccctctggcctctgtgtcacacagacatcactccgtctgtggccattatagtccccccagcttcataccaccctaagccatggctgggagctcagccggctacagttgtgacccctggggtcaacgtgaccttgagatgccgggcaccccaacccgcttggagatttggacttttcaagcctggagagatcgctccccttctcttccgggatgtgtcctccgagctggcagaattctttctggaggaggtgactccagcccaagggggaatttaccgctgctgctaccgaaggccagactgggggccgggtgtctggtcccagcccagcgatgtcctggagctgctggtgacagaggagctgccgcggccgtcgctggtggcgctgcccgggccggtggtgggtcctggcgccaacgtgagcctgcgctgcgcgggccgcctgcggaacatgagcttcgtgctgtaccgcgagggcgtggcggccccgctgcagtaccgccactccgcgcagccctgggccgacttcacgctgctgggcgcccgcgcccccggcacctacagctgctactatcacacgccctccgcgccctacgtgctgtcgcagcgcagcgaggtgctggtcatcagctgggaagactctggctcctccgactacacccgggggaacctagtccgcctggggctggccgggctggtcctcatctccctgggcgcgctggtcacttttgactggcgcagtcagaaccgcgctcctgctggtatccgcccctgagccccaggagcactgcagcccgagacttccaacctgagtggcggagaagctgggaccctgggctggactgtcctttcctgcagccccacagtcctgctggctgagctccgcggaacggtccttagaccccgctgtgccctgtgctgtagcttctttccaggcctttcccaaggagtagctgaaaggaagacgcgattagtggttaagacttccaagccagaagacagagggttcgaatcccagcactgccgtctactcactgtagtagtagcagctacagaaaggtagtagtgagacgtgaagccagctggacttcctgggttgaatggggacctggagaacttttctgtcttacaagaggattgtaaaatggaccaatcagcactctgtaagatggaccaatcagcgctctgtaaaatggaccaatcagcaggacatgggcggggacaataagggaataaaagctggcgagcgcggcaccccaccagagtctgcttccacgctgtgggagctttgttctcttgctctacacaataaatcttgctgctgct

SEQ ID NO: 21211 - DNA, 1389 bp, Homo sapiens
  source 1..1389: mol_type = unassigned DNA
ggtgcgaccaagccctggctccagctctagcgggtatctgcccaccatggccctggtgctgatcctccagctgctgaccctctggcctctgtgtcacacagacatcactccgtctgtccccccagcttcataccaccctaagccatggctgggagctcagccggctacagttgtgacccctggggtcaacgtgaccttgagatgccgggcaccccaacccgcttggagatttggacttttcaagcctggagagatcgctccccttctcttccgggatgtgtcctccgagctggcagaattctttctggaggaggtgactccagcccaagggggaatttaccgctgctgctaccgaaggccagactgggggccgggtgtctggtcccagcccagcgatgtcctggagctgctggtgacagaggagctgccgcggccgtcgctggtggcgctgcccgggccggtggtgggtcctggcgccaacgtgagcctgcgctgcgcgggccgcctgcggaacatgagcttcgtgctgtaccgcgagggcgtggcggccccgctgcagtaccgccactccgcgcagccctgggccgacttcacgctgctgggcgcccgcgcccccggcacctacagctgctactatcacacgccctccgcgccctacgtgctgtcgcagcgcagcgaggtgctggtcatcagctgggaagactctggctcctccgactacacccgggggaacctagtccgcctggggctggccgggctggtcctcatctccctgggcgcgctggtcacttttgactggcgcagtcagaaccgcgctcctgctggtatccgcccctgagccccaggagcactgcagcccgagacttccaacctgagtggcggagaagctgggaccctgggctggactgtcctttcctgcagccccacagtcctgctggctgagctccgcggaacggtccttagaccccgctgtgccctgtgctgtagcttctttccaggcctttcccaaggagtagctgaaaggaagacgcgattagtggttaagacttccaagccagaagacagagggttcgaatcccagcactgccgtctactcactgtagtagtagcagctacagaaaggtagtagtgagacgtgaagccagctggacttcctgggttgaatggggacctggagaacttttctgtcttacaagaggattgtaaaatggaccaatcagcactctgtaagatggaccaatcagcgctctgtaaaatggaccaatcagcaggacatgggcggggacaataagggaataaaagctggcgagcgcggcaccccaccagagtctgcttccacgctgtgggagctttgttctcttgctctacacaataaatcttgctgctgct

SEQ ID NO: 21212 - DNA, 1319 bp, Homo sapiens
  source 1..1319: mol_type = unassigned DNA
ctcttcccgcagccaagggtgggcgccggtcctaggaggcgcacggttgtaagccagacaaaaagaactggggtgcccggagtgccaggtggcgggcaagcggtgggcttttcggcggggtctttaggatttgcagctccaggaagcgagatgtcgaagccgccacccaaaccagtcaaaccagggcaagttaaagtcttcagagccctgtatacgtttgaacccagaactccagatgaattatactttgaggaaggtgatattatctacattactgacatgagcgataccaattggtggaaaggcacctccaaaggcaggactggactaattccaagcaactatgtggctgagcaggcagaatccattgacaatccattgcatgaagcagcaaaaagaggcaacttgagctggttgagagagtgtttggacaacagagtgggtgttaatggcttagacaaagctggaagcactgccttatactgggcttgccacgggggccacaaagatatagtggaaatgctatttactcaaccaaatattgaactgaaccagcagaacaagttgggagatacagctttgcatgctgctgcctggaagggttatgcagatatcgtccagttgcttctggcaaaaggtgctagaacagacttaagaaacattgagaagaagctggccttcgacatggctaccaatgctgcctgtgcatctctcctgaaaaagaaacagggaacagatgcagttcgaacattaagcaatgccgaggactatctcgatgatgaagactcagattaattcctttctggagctttgagatctaaaacttctgttgcttttgccattccaaaactttgtctttgccagaaaagtgttggtaactataaagaaaattatatatgaacacggcagtgttgcactgtgtttgagtagaacgtgtaaatgaattgttcccacctttggtttgccagtaagtgactggattcttggcacatttatgttcaccaaagtagaacaagaagatattatttctatttatcaagcaaaaggaattttaagatttttttttttctttaaaaacaaattaggattttttttttttttttttttttagttaaaatgctttacctcaatggttgagatattttgaatggatttttcaagggggggaaatgcttattataataataaaccaaaatacttaacagaaaattgtcagctattctgacaaaaataaacattttgagagactttatttcttttgtccgtttctgtggtatcactcattgtcgttaagtaagtaaagctttttatatttaggt

SEQ ID NO: 21213 - DNA, 2971 bp, Homo sapiens
  source 1..2971: mol_type = unassigned DNA
gctaatgcacagacatgaacatctattgaggaaaaccacaaaaaacttcaaaacagctacaacggtatcctaagaatatttcaattaaatattagtatgtctgctgaaggcacttaattattaagaaacttaaaattatcaatctttcttgaatttctgatagagaagtaaaactattttccaaaactatttttcagaatgttcactgatacataaaaactgctagcatctaattaaagatcactaagggttaaatactgttctctggcccttactgcgcacaccctgccaaaacatcctctaagcttttaaatattgcttcgatggtctgaatttttatttccagggaaaaagagagttttgtcccacagtcagcaggccactagtttattaacttccagtcaccttgatttttgctaaaatgaagactctgcagtctacacttctcctgttactgcttgtgcctctgataaagccagcaccaccaacccagcaggactcacgcattatctatgattatggaacagataattttgaagaatccatatttagccaagattatgaggataaatacctggatggaaaaaatattaaggaaaaagaaactgtgataatacccaatgagaaaagtcttcaattacaaaaagatgaggcaataacaccattacctcccaagaaagaaaatgatgaaatgcccacgtgtctgctgtgtgtttgtttaagtggctctgtatactgtgaagaagttgacattgatgctgtaccacccttaccaaaggaatcagcctatctttacgcacgattcaacaaaattaaaaagctgactgccaaagattttgcagacatacctaacttaagaagactcgattttacaggaaatttgatagaagatatagaagatggtactttttcaaaactttctctgttagaagaactttcacttgctgaaaatcaactactaaaacttccagttcttcctcccaagctcactttatttaatgcaaaatacaacaaaatcaagagtaggggaatcaaagcaaatgcattcaaaaaactgaataacctcaccttcctctacttggaccataatgccctggaatccgtgcctcttaatttaccagaaagtctacgtgtaattcatcttcagttcaacaacatagcttcaattacagatgacacattctgcaaggctaatgacaccagttacatccgggaccgcattgaagagatacgcctggagggcaatccaatcgtcctgggaaagcatccaaacagttttatttgcttaaaaagattaccgatagggtcatacttttaacctctattggtacaacatataaatgaaagtacacctacactaatagtctgtctcaacaatgagtaaaggaacttaagtattggtttaatattaaccttgtatctcattttgaaggaatttaatattttaagcaaggatgttcaaaatcttacatataataagtaaaaagtaagactgaatgtctacgttcgaaacaaagtaatatgaaaatatttaaacagcattacaaaatcctagtttatactagactaccatttaaaaatcatgtttttatataaatgcccaaatttgagatgcattattcctattactaatgatgtaagtacgaggataaatccaagaaactttcaactctttgcctttcctggcctttactggatcccaaaagcatttaaggtacatgttccaaaaactttgaaaagctaaatgtttcccatgatcgctcattcttcttttatgattcatacgttattccttataaagtaagaactttgttttcctcctatcaaggcagctattttattaaatttttcacttagtctgagaaatagcagatagtctcatatttaggaaaactttccaaataaaataaatgttattctctgataaagagctaatacagaaatgttcaagttattttactttctggtaatgtcttcagtaaaatattttctttatctaaatattaacattctaagtctaccaaaaaaagttttaaactcaagcaggccaaaaccaatatgcttataagaaataatgaaaagttcatccatttctgataaagttctctatggcaaagtctttcaaatacgagataactgcaaaatattttccttttatactacagaaatgagaatctcatcaataaattagttcaagcataagatgaaaacagaatattctgtggtgccagtgcacactaccttcccacccatacacatccatgttcactgtaacaaactgaatattcacaataaagcttctgagtaacactttctgattactcatgataaactgacatggctaactgcaagaattaaatcttctatctgagagtaataatttatgatgactcagtggtgccagagtaaagtttctaaaataacattcctctcacttgtaccccactaaaagtattagactacacattacattgaagttaaacacaaaattatcagtgttttagaaacatgagtccggactgtgtaagtaaaagtacaaacattatttccaccataaagtatgtattgaaatcaagttgtctctgtgtacagaatacatacttattcccatttttaagcatttgcttctgttttccctacctagaatgtcagatgtttttcagttatctccccatttgtcaaagttgacctcaagataacatttttcattaaagcatctgagatctaagaacacaattattattctaacaatgattattagctcattcacttattttgataactaatgatcacagctattatactactttctcgttattttgtgtgcatgcctcatttccctgacttaaacctcactgagagcgcaaaatgcagctttatactttttactttcaattgcctagcacaatagtgagtacatttgaattgaatatataataaatattgcaaaataaaatccatctaaatagaa

SEQ ID NO: 21214 - DNA, 2743 bp, Homo sapiens
  source 1..2743: mol_type = unassigned DNA
actcagcagtttgaaatcaagacatagcttttctcattcaccctcccacttggggctaatgcacagacatgaacatctattgaggaaaaccacaaaaaacttcaaaacagctacaacgggaaaaagagagttttgtcccacagtcagcaggccactagtttattaacttccagtcaccttgatttttgctaaaatgaagactctgcagtctacacttctcctgttactgcttgtgcctctgataaagccagcaccaccaacccagcaggactcacgcattatctatgattatggaacagataattttgaagaatccatatttagccaagattatgaggataaatacctggatggaaaaaatattaaggaaaaagaaactgtgataatacccaatgagaaaagtcttcaattacaaaaagatgaggcaataacaccattacctcccaagaaagaaaatgatgaaatgcccacgtgtctgctgtgtgtttgtttaagtggctctgtatactgtgaagaagttgacattgatgctgtaccacccttaccaaaggaatcagcctatctttacgcacgattcaacaaaattaaaaagctgactgccaaagattttgcagacatacctaacttaagaagactcgattttacaggaaatttgatagaagatatagaagatggtactttttcaaaactttctctgttagaagaactttcacttgctgaaaatcaactactaaaacttccagttcttcctcccaagctcactttatttaatgcaaaatacaacaaaatcaagagtaggggaatcaaagcaaatgcattcaaaaaactgaataacctcaccttcctctacttggaccataatgccctggaatccgtgcctcttaatttaccagaaagtctacgtgtaattcatcttcagttcaacaacatagcttcaattacagatgacacattctgcaaggctaatgacaccagttacatccgggaccgcattgaagagatacgcctggagggcaatccaatcgtcctgggaaagcatccaaacagttttatttgcttaaaaagattaccgatagggtcatacttttaacctctattggtacaacatataaatgaaagtacacctacactaatagtctgtctcaacaatgagtaaaggaacttaagtattggtttaatattaaccttgtatctcattttgaaggaatttaatattttaagcaaggatgttcaaaatcttacatataataagtaaaaagtaagactgaatgtctacgttcgaaacaaagtaatatgaaaatatttaaacagcattacaaaatcctagtttatactagactaccatttaaaaatcatgtttttatataaatgcccaaatttgagatgcattattcctattactaatgatgtaagtacgaggataaatccaagaaactttcaactctttgcctttcctggcctttactggatcccaaaagcatttaaggtacatgttccaaaaactttgaaaagctaaatgtttcccatgatcgctcattcttcttttatgattcatacgttattccttataaagtaagaactttgttttcctcctatcaaggcagctattttattaaatttttcacttagtctgagaaatagcagatagtctcatatttaggaaaactttccaaataaaataaatgttattctctgataaagagctaatacagaaatgttcaagttattttactttctggtaatgtcttcagtaaaatattttctttatctaaatattaacattctaagtctaccaaaaaaagttttaaactcaagcaggccaaaaccaatatgcttataagaaataatgaaaagttcatccatttctgataaagttctctatggcaaagtctttcaaatacgagataactgcaaaatattttccttttatactacagaaatgagaatctcatcaataaattagttcaagcataagatgaaaacagaatattctgtggtgccagtgcacactaccttcccacccatacacatccatgttcactgtaacaaactgaatattcacaataaagcttctgagtaacactttctgattactcatgataaactgacatggctaactgcaagaattaaatcttctatctgagagtaataatttatgatgactcagtggtgccagagtaaagtttctaaaataacattcctctcacttgtaccccactaaaagtattagactacacattacattgaagttaaacacaaaattatcagtgttttagaaacatgagtccggactgtgtaagtaaaagtacaaacattatttccaccataaagtatgtattgaaatcaagttgtctctgtgtacagaatacatacttattcccatttttaagcatttgcttctgttttccctacctagaatgtcagatgtttttcagttatctccccatttgtcaaagttgacctcaagataacatttttcattaaagcatctgagatctaagaacacaattattattctaacaatgattattagctcattcacttattttgataactaatgatcacagctattatactactttctcgttattttgtgtgcatgcctcatttccctgacttaaacctcactgagagcgcaaaatgcagctttatactttttactttcaattgcctagcacaatagtgagtacatttgaattgaatatataataaatattgcaaaataaaatccatctaaatagaa

SEQ ID NO: 21215 - DNA, 825 bp, Homo sapiens
  source 1..825: mol_type = unassigned DNA
gcatttcaccctagagaaagaatgctggcaaagatctctaccacatggaaactgttcttaaagctgctgggccctgaaattttactcagcagtttgaaatcaagacatagcttttctcattcaccctcccacttggggctaatgcacagacatgaacatctattgaggaaaaccacaaaaaacttcaaaacagctacaacgactctgcagtctacacttctcctgttactgcttgtgcctctgataaagccagcaccaccaacccagcaggactcacgcattatctatgattatggaacagataattttgaagaatccatatttagccaagattatgaggataaatacctggatggaaaaaatattaaggaaaaagaaactgtgataatacccaatgagaaaagtcttcaattacaaaaagatgaggcaataacaccattacctcccaagaaagaaaatgatgaaatgcccacgtgtctgctgtgtgtttgtttaagtggctctgtatactgtgaagaagttgacattgatgctgtaccacccttaccaaaggaatcagcctatctttacgcacgattcaacaaaattaaaaagctgactgccaaagattttgcagacatacctaacttaagaagactcgattttacaggaaatttgatagaagatatagaagatggtactttttcaaaactttctctgttagaagaactttcacttgctgaaaatcaactactaaaacttccagttcttcctcccaagctcactttatttaatgcaaaatacaacaaaatcaagagtaggggaatcaaagcaaatgcattcaaa

SEQ ID NO: 21216 - DNA, 2505 bp, Homo sapiens
  source 1..2505: mol_type = unassigned DNA
aagaaggggaacgaaagatggcggcggaaacgctgctgtccagtttgttaggactgctgcttctgggactcctgttacccgcaagtctgaccggcggtgtcgggagcctgaacctggaggagctgagtgagatgcgttatgggatcgagatcctgccgttgcctgtcatgggagggcagagccaatcttcggacgtggtgattgtctcctctaagtacaaacagcgctatgagtgtcgcctgccagctggagctattcacttccagcgtgaaagggaggaggaaacacctgcttaccaagggcctgggatccctgagttgttgagcccaatgagagatgctccctgcttgctgaagacaaaggactggtggacatatgaattctgttatggacgccacatccagcaataccacatggaagattcagagatcaaaggtgaagtcctctatctcggctactaccaatcagccttcgactgggatgatgaaacagccaaggcctccaagcagcatcgtcttaaacgctaccacagccagacctatggcaatgggtccaagtgcgaccttaatgggaggccccgggaggccgaggttcggttcctctgtgacgagggtgcaggtatctctggggactacatcgatcgcgtggacgagcccttgtcctgctcttatgtgctgaccattcgcactcctcggctctgcccccaccctctcctccggcccccacccagtgctgcaccgcaggccatcctctgtcacccttccctacagcctgaggagtacatggcctacgttcagaggcaagccgtagactcaaagcagtatggagataaaatcatagaggagctgcaagatctaggcccccaagtgtggagtgagaccaagtctggggtggcaccccaaaagatggcaggtgcgagcccgaccaaggatgacagtaaggactcagatttctggaagatgcttaatgagccagaggaccaggccccaggaggggaggaggtgccggctgaggagcaggacccaagccctgaggcagcagattcagcttctggtgctcccaatgattttcagaacaacgtgcaggtcaaagtcattcgaagccctgcggatttgattcgattcatagaggagctgaaaggtggaacaaaaaaggggaagccaaatataggccaagagcagcctgtggatgatgctgcagaagtccctcagagggaaccagagaaggaaaggggtgatccagaacggcagagagagatggaagaagaggaggatgaggatgaggatgaggatgaagatgaggatgaacggcagttactgggagaatttgagaaggaactggaagggatcctgcttccgtcagaccgagaccggctccgttcggaggtgaaggctggcatggagcgggaactggaaaacatcatccaggagacagagaaagagctggacccagatgggctgaagaaggagtcagagcgggatcgggcaatgctggctctcacatccactctcaacaaactcatcaaaagactggaggaaaaacagagtccagagctggtgaagaagcacaagaaaaagagggttgtccccaaaaagcctcccccatcaccccaacctacagggaaaattgagatcaaaattgtccgcccatgggctgaagggactgaagagggtgcacgttggctgactgatgaggacacgagaaacctcaaggagatcttcttcaatatcttggtgccgggagctgaagaggcccagaaggaacgccagcggcagaaagagctggagagcaattaccgccgggtgtggggctctccaggtggggagggcacaggggacctggacgaatttgacttctgagaccaacactacacttgacccttcacggaatccagactcttcctggactggcttgcctcctccccacctccccaccctggaacccctgagggccaaacagcagagtggagctgagctgtggacctctcgggcaactctgtgggtgtgggggccctgggtgaatgctgctgcccctgctggcagccaccttgagacctcaccgggcctgtgatatttgctctcctgaactctcactcaatcctcttcctctcctctgtggcttttcctgttattgtcccctaatgataggatattccctgctgcctacctggagattcagtaggatcttttgagtggaggtgggtagagagagcaaggagggcaggacacttagcaggcactgagcaagcaggcccccacctgcccttagtgatgtttggagtcgttttaccctcttctattgaattgccttgggatttccttctccctttccctgcccaccctgtcccctacaatttgtgcttctgagttgaggagccttcacctctgttgctgaggaaatggtagaatgctgcctatcacctccagcacaatcccagtgaaaaaggtgtgaagcacccaccatgttcttgaacaatcaggtttctaaataaacaactggaccatc

SEQ ID NO: 21217 - DNA, 2091 bp, Homo sapiens
  source 1..2091: mol_type = unassigned DNA
aagaaggggaacgaaagatggcggcggaaacgctgctgtccagtttgttaggactgctgcttctgggactcctgttacccgcaagtctgaccggcggtgtcgggagcctgaacctggaggagctgagtgagatgcgttatgggatcgagatcctgccgttgcctgtcatgggagggcagagccaatcttcggacgtggtgattgtctcctctaagtacaaacagcgctatgagtgtcgcctgccagctggagctattcacttccagcgtgaaagggaggaggaaacacctgcttaccaagggcctgggatccctgagttgttgagcccaatgagagatgctccctgcttgctgaagacaaaggactggtggacatatgaattctgttatggacgccacatccagcaataccacatggaagattcagagatcaaaggtgaagtcctctatctcggctactaccaatcagccttcgactgggatgatgaaacagccaaggcctccaagcagcatcgtcttaaacgctaccacagccagacctatggcaatgggtccaagtgcgaccttaatgggaggccccgggaggccgaggttcggttcctctgtgacgagggtgcaggtatctctggggactacatcgatcgcgtggacgagcccttgtcctgctcttatgtgctgaccattcgcactcctcggctctgcccccaccctctcctccggcccccacccagtgctgcaccgcaggccatcctctgtcacccttccctacagcctgaggagtacatggcctacgttcagaggcaagccgactcaaagcagtatggagataaaatcatagaggagctgcaagatctaggcccccaagtgtggagtgagaccaagtctggggtggcaccccaaaagatggcaggtgcgagcccgaccaaggatgacagtaaggactcagatttctggaagatgcttaatgagccagaggaccaggccccaggaggggaggaggtgccggctgaggagcaggacccaagccctgaggcagcagattcagcttctggtgctcccaatgattttcagaacaacgtgcaggtcaaagtcattcgaagccctgcggatttgattcgattcatagaggagctgaaaggtggaacaaaaaaggggaagccaaatataggccaagagcagcctgtggatgatgctgcagaagtccctcagagggaaccagagaaggaaaggggtgatccagaacggcagagagagatggaagaagaggaggatgaggatgaggatgaggatgaagatgaggatgaacggcagttactgggagaatttgagaaggaactggaagggatcctgcttccgtcagaccgagaccggctccgttcggagacagagaaagagctggacccagatgggctgaagaaggagtcagagcgggatcgggcaatgctggctctcacatccactctcaacaaactcatcaaaagactggaggaaaaacagagtccagagctggtgaagaagcacaagaaaaagagggttgtccccaaaaagcctcccccatcaccccaacctacagaggaggatcctgagcacagagtccgggtccgggtcaccaagctccgtctcggaggccctaatcaggatctgactgtcctcgagatgaaacgggaaaacccacagctgaaacaaatcgaggggctggtgaaggagctgctggagagggagggactcacagctgcagggaaaattgagatcaaaattgtccgcccatgggctgaagggactgaagagggtgcacgttggctgactgatgaggacacgagaaacctcaaggagatcttcttcaatatcttggtgccgggagctgaagaggcccagaaggaacgccagcggcagaaagagctggagagcaattaccgccgggtgtggggctctccaggtggggagggcacaggggacctggacgaatttgacttctgagaccaacactacacttgacccttcacggaatccagactcttcctggactggcttgcctcctccccacctccccaccctggaacccctgagggccaaacagcagagtggagctgag

SEQ ID NO: 21218 - DNA, 2346 bp, Homo sapiens
  source 1..2346: mol_type = unassigned DNA
aagaaggggaacgaaagatggcggcggaaacgctgctgtccagtttgttaggactgctgcttctgggactcctgttacccgcaagtctgaccggcggtgtcgggagcctgaacctggaggagctgagtgagatgcgttatgggatcgagatcctgccgttgcctgtcatgggagggcagagccaatcttcggacgtggtgattgtctcctctaagtacaaacagcgctatgagtgtcgcctgccagctggagctattcacttccagcgtgaaagggaggaggaaacacctgcttaccaagggcctgggatccctgagttgttgagcccaatgagagatgctccctgcttgctgaagacaaaggactggtggacatatgaattctgttatggacgccacatccagcaataccacatggaagattcagagatcaaaggtgaattcctctgtgacgagggtgcaggtatctctggggactacatcgatcgcgtggacgagcccttgtcctgctcttatgtgctgaccattcgcactcctcggctctgcccccaccctctcctccggcccccacccagtgctgcaccgcaggccatcctctgtcacccttccctacagcctgaggagtacatggcctacgttcagaggcaagccgactcaaagcagtatggagataaaatcatagaggagctgcaagatctaggcccccaagtgtggagtgagaccaagtctggggtggcaccccaaaagatggcaggtgcgagcccgaccaaggatgacagtaaggactcagatttctggaagatgcttaatgagccagaggaccaggccccaggaggggaggaggtgccggctgaggagcaggacccaagccctgaggcagcagattcagcttctggtgctcccaatgattttcagaacaacgtgcaggtcaaagtcattcgaagccctgcggatttgattcgattcatagaggagctgaaaggtggaacaaaaaaggggaagccaaatataggccaagagcagcctgtggatgatgctgcagaagtccctcagagggaaccagagaaggaaaggggtgatccagaacggcagagagagatggaagaagaggaggatgaggatgaggatgaggatgaagatgaggatgaacggcagttactgggagaatttgagaaggaactggaagggatcctgcttccgtcagaccgagaccggctccgttcggaggtgaaggctggcatggagcgggaactggaaaacatcatccaggagacagagaaagagctggacccagatgggctgaagaaggagtcagagcgggatcgggcaatgctggctctcacatccactctcaacaaactcatcaaaagactggaggaaaaacagagtccagagctggtgaagaagcacaagaaaaagagggttgtccccaaaaagcctcccccatcaccccaacctacagggaaaattgagatcaaaattgtccgcccatgggctgaagggactgaagagggtgcacgttggctgactgatgaggacacgagaaacctcaaggagatcttcttcaatatcttggtgccgggagctgaagaggcccagaaggaacgccagcggcagaaagagctggagagcaattaccgccgggtgtggggctctccaggtggggagggcacaggggacctggacgaatttgacttctgagaccaacactacacttgacccttcacggaatccagactcttcctggactggcttgcctcctccccacctccccaccctggaacccctgagggccaaacagcagagtggagctgagctgtggacctctcgggcaactctgtgggtgtgggggccctgggtgaatgctgctgcccctgctggcagccaccttgagacctcaccgggcctgtgatatttgctctcctgaactctcactcaatcctcttcctctcctctgtggcttttcctgttattgtcccctaatgataggatattccctgctgcctacctggagattcagtaggatcttttgagtggaggtgggtagagagagcaaggagggcaggacacttagcaggcactgagcaagcaggcccccacctgcccttagtgatgtttggagtcgttttaccctcttctattgaattgccttgggatttccttctccctttccctgcccaccctgtcccctacaatttgtgcttctgagttgaggagccttcacctctgttgctgaggaaatggtagaatgctgcctatcacctccagcacaatcccagtgaaaaaggtgtgaagcacccaccatgttcttgaacaatcaggtttctaaataaacaactggaccatc

SEQ ID NO: 21219 - DNA, 2246 bp, Homo sapiens
  source 1..2246: mol_type = unassigned DNA
aagaaggggaacgaaagatggcggcggaaacgctgctgtccagtttgttaggactgctgcttctgggactcctgttacccgcaagtctgaccggcggtgtcgggagcctgaacctggaggagctgagtgagatgcgttatgggatcgagatcctgccgttgcctgtcatgggagggcagagccaatcttcggacgtggtgattgtctcctctaagtacaaacagcgctatgagtgtcgcctgccagctggagctattcacttccagcgtgaaagggaggaggaaacacctgcttaccaagggcctgggatccctgagttgttgagcccaatgagagatgctccctgcttgctgaagacaaaggactggtggacatatgaattctgttatggacgccacatccagcaataccacatggaagattcagagatcaaaggtgaagtcctctatctcggctactaccaatcagccttcgactgggatgatgaaacagccaagttcctctgtgacgagggtgcaggtatctctggggactacatcgatcgcgtggacgagcccttgtcctgctcttatgtgctgaccattcgcactcctcggctctgcccccaccctctcctccggcccccacccagtgctgcaccgcaggccatcctctgtcacccttccctacagcctgaggagtacatggcctacgttcagaggcaagccgtagactcaaagcagtatggagataaaatcatagaggagctgcaagatctaggcccccaagtgtggagtgagaccaagtctggggtggcaccccaaaagatggcaggtgcgagcccgaccaaggatgacagtaaggactcagatttctggaagatgcttaatgagccagaggaccaggccccaggaggggaggaggtgccggctgaggagcaggacccaagccctgaggcagcagattcagcttctggtgctcccaatgattttcagaacaacgtgcaggtcaaagtcattcgaagccctgcggatttgattcgattcatagaggagctgaaaggtggaacaaaaaaggggaagccaaatataggccaagagcagcctgtggatgatgctgcagaagtccctcagagggaaccagagaaggaaaggggtgatccagaacggcagagagagatggaagaagaggaggatgaggatgaggatgaggatgaagatgaggatgaacggcagttactgggagaatttgagaaggaactggaagggatcctgcttccgtcagaccgagaccggctccgttcggaggtgaaggctggcatggagcgggaactggaaaacatcatccaggagacagagaaagagctggacccagatgggctgaagaaggagtcagagcgggatcgggcaatgctggctctcacatccactctcaacaaactcatcaaaagactggaggaaaaacagagtccagagctggtgaagaagcacaagaaaaagagggttgtccccaaaaagcctcccccatcaccccaacctacagggaaaattgagatcaaaattgtccgcccatgggctgaagggactgaagagggtgcacgttggctgactgatgaggacacgagaaacctcaaggagatcttcttcaatatcttggtgccgggagctgaagaggcccagaaggaacgccagcggcagaaagagctggagagcaattaccgccgggtgtggggctctccaggtggggagggcacaggggacctggacgaatttgacttctgagaccaacactacacttgacccttcacggaatccagactcttcctggactggcttgcctcctccccacctccccaccctggaacccctgagggccaaacagcagagtggagctgagctgtggacctctcgggcaactctgtgggtgtgggggccctgggtgaatgctgctgcccctgctggcagccaccttgagacctcaccgggcctgtgatatttgctctcctgaactctcactcaatcctcttcctctcctctgtggcttttcctgttattgtcccctaatgataggatattccctgctgcctacctggagattcagtaggatcttttgagtggaggtgggtagagagagcaaggagggcaggacacttagcaggcactgagcaagcaggcccccacctgcccttagtgatgtttggagtcgttttaccctcttctattgaattgccttgggatttccttctccctttccctgcccaccctgtc

SEQ ID NO: 21220 - DNA, 2691 bp, Homo sapiens
  source 1..2691: mol_type = unassigned DNA
agggcggaaacagattctctgcataagaaggggaacgaaagatggcggcggaaacgctgctgtccagtttgttaggactgctgcttctgggactcctgttacccgcaagtctgaccggcggtgtcgggagcctgaacctggaggagctgagtgagatgcgttatgggatcgagatcctgccgttgcctgtcatgggagggcagagccaatcttcggacgtggtgattgtctcctctaagtacaaacagcgctatgagtgtcgcctgccagctggagctattcacttccagcgtgaaagggaggaggaaacacctgcttaccaagggcctgggatccctgagttgttgagcccaatgagagatgctccctgcttgctgaagacaaaggactggtggacatatgaattctgttatggacgccacatccagcaataccacatggaagattcagagatcaaaggtgaagtcctctatctcggctactaccaatcagccttcgactgggatgatgaaacagccaaggcctccaagcagcatcgtcttaaacgctaccacagccagacctatggcaatgggtccaagtgcgaccttaatgggaggccccgggaggccgaggttcggttcctctgtgacgagggtgcaggtatctctggggactacatcgatcgcgtggacgagcccttgtcctgctcttatgtgctgaccattcgcactcctcggctctgcccccaccctctcctccggcccccacccagtgctgcaccgcaggccatcctctgtcacccttccctacagcctgaggagtacatggcctacgttcagaggcaagccgactcaaagcagtatggagataaaatcatagaggagctgcaagatctaggcccccaagtgtggagtgagaccaagtctggggtggcaccccaaaagatggcaggtgcgagcccgaccaaggatgacagtaaggactcagatttctggaagatgcttaatgagccagaggaccaggccccaggaggggaggaggtgccggctgaggagcaggacccaagccctgaggcagcagattcagcttctggtgctcccaatgattttcagaacaacgtgcaggtcaaagtcattcgaagccctgcggatttgattcgattcatagaggagctgaaaggtggaacaaaaaaggggaagccaaatataggccaagagcagcctgtggatgatgctgcagaagtccctcagagggaaccagagaaggaaaggggtgatccagaacggcagagagagatggaagaagaggaggatgaggatgaggatgaggatgaagatgaggatgaacggcagttactgggagaatttgagaaggaactggaagggatcctgcttccgtcagaccgagaccggctccgttcggaggtgaaggctggcatggagcgggaactggaaaacatcatccaggagacagagaaagagctggacccagatgggctgaagaaggagtcagagcgggatcgggcaatgctggctctcacatccactctcaacaaactcatcaaaagactggaggaaaaacagagtccagagctggtgaagaagcacaagaaaaagagggttgtccccaaaaagcctcccccatcaccccaacctacagaggaggatcctgagcacagagtccgggtccgggtcaccaagctccgtctcggaggccctaatcaggatctgactgtcctcgagatgaaacgggaaaacccacagctgaaacaaatcgaggggctggtgaaggagctgctggagagggagggactcacagctgcagggaaaattgagatcaaaattgtccgcccatgggctgaagggactgaagagggtgcacgttggctgactgatgaggacacgagaaacctcaaggagatcttcttcaatatcttggtgccgggagctgaagaggcccagaaggaacgccagcggcagaaagagctggagagcaattaccgccgggtgtggggctctccaggtggggagggcacaggggacctggacgaatttgacttctgagaccaacactacacttgacccttcacggaatccagactcttcctggactggcttgcctcctccccacctccccaccctggaacccctgagggccaaacagcagagtggagctgagctgtggacctctcgggcaactctgtgggtgtgggggccctgggtgaatgctgctgcccctgctggcagccaccttgagacctcaccgggcctgtgatatttgctctcctgaactctcactcaatcctcttcctctcctctgtggcttttcctgttattgtcccctaatgataggatattccctgctgcctacctggagattcagtaggatcttttgagtggaggtgggtagagagagcaaggagggcaggacacttagcaggcactgagcaagcaggcccccacctgcccttagtgatgtttggagtcgttttaccctcttctattgaattgccttgggatttccttctccctttccctgcccaccctgtcccctacaatttgtgcttctgagttgaggagccttcacctctgttgctgaggaaatggtagaatgctgcctatcacctccagcacaatcccagtgaaaaaggtgtgaagcacccaccatgttcttgaacaatcaggtttctaaataaacaactggaccatc

SEQ ID NO: 21221 - DNA, 2457 bp, Homo sapiens
  source 1..2457: mol_type = unassigned DNA
gaaggggaacgaaagatggcggcggaaacgctgctgtccagtttgttaggactgctgcttctgggactcctgttacccgcaagtctgaccggcggtgtcgggagcctgaacctggaggagctgagtgagatgcgttatgggatcgagatcctgccgttgcctgtcatgggagggcagagccaatcttcggacgtggtgattgtctcctctaagtacaaacagcgctatgagtgtcgcctgccagctggagctattcacttccagcgtgaaagggaggaggaaacacctgcttaccaagggcctgggatccctgagttgttgagcccaatgagagatgctccctgcttgctgaagacaaaggactggtggacatatgaattctgttatggacgccacatccagcaataccacatggaagattcagagatcaaaggtgaagtcctctatctcggctactaccaatcagccttcgactgggatgatgaaacagccaaggcctccaagcagcatcgtcttaaacgctaccacagccagacctatggcaatgggtccaagtgcgaccttaatgggaggccccgggaggccgaggttcggttcctctgtgacgagggtgcaggtatctctggggactacatcgatcgcgtggacgagcccttgtcctgctcttatgtgctgaccattcgcactcctcggctctgcccccaccctctcctccggcccccacccagtgctgcaccgcaggccatcctctgtcacccttccctacagcctgaggagtacatggcctacgttcagaggcaagccgactcaaagcagtatggagataaaatcatagaggagctgcaagatctaggcccccaagtgtggagtgagaccaagtctggggtggcaccccaaaagatggcaggtgcgagcccgaccaaggatgacagtaaggactcagatttctggaagatgcttaatgagccagaggaccaggccccaggaggggaggaggtgccggctgaggagcaggacccaagccctgaggcagcagattcagcttctggtgctcccaatgattttcagaacaacgtgcaggtcaaagtcattcgaagccctgcggatttgattcgattcatagaggagctgaaaggtggaacaaaaaaggggaagccaaatataggccaagagcagcctgtggatgatgctgcagaagtccctcagagggaaccagagaaggaaaggggtgatccagaacggcagagagagatggaagaagaggaggatgaggatgaggatgaggatgaagatgaggatgaacggcagttactgggagaatttgagaaggaactggaagggatcctgcttccgtcagaccgagaccggctccgttcggagacagagaaagagctggacccagatgggctgaagaaggagtcagagcgggatcgggcaatgctggctctcacatccactctcaacaaactcatcaaaagactggaggaaaaacagagtccagagctggtgaagaagcacaagaaaaagagggttgtccccaaaaagcctcccccatcaccccaacctacagggaaaattgagatcaaaattgtccgcccatgggctgaagggactgaagagggtgcacgttggctgactgatgaggacacgagaaacctcaaggagatcttcttcaatatcttggtgccgggagctgaagaggcccagaaggaacgccagcggcagaaagagctggagagcaattaccgccgggtgtggggctctccaggtggggagggcacaggggacctggacgaatttgacttctgagaccaacactacacttgacccttcacggaatccagactcttcctggactggcttgcctcctccccacctccccaccctggaacccctgagggccaaacagcagagtggagctgagctgtggacctctcgggcaactctgtgggtgtgggggccctgggtgaatgctgctgcccctgctggcagccaccttgagacctcaccgggcctgtgatatttgctctcctgaactctcactcaatcctcttcctctcctctgtggcttttcctgttattgtcccctaatgataggatattccctgctgcctacctggagattcagtaggatcttttgagtggaggtgggtagagagagcaaggagggcaggacacttagcaggcactgagcaagcaggcccccacctgcccttagtgatgtttggagtcgttttaccctcttctattgaattgccttgggatttccttctccctttccctgcccaccctgtcccctacaatttgtgcttctgagttgaggagccttcacctctgttgctgaggaaatggtagaatgctgcctatcacctccagcacaatcccagtgaaaaaggtgtgaagcacccaccatgttcttgaacaatcaggtttctaaataaacaactggaccatcaa

SEQ ID NO: 21222 - DNA, 2135 bp, Homo sapiens
  source 1..2135: mol_type = unassigned DNA
ctgaccaatcacggacagcgattgatatttctaatcgtcgtgatccacctccccaggaccttggagccacgtttacaaataggaatagggtacgtgggagggatagaacgtacagccaataaaatcatgtggcgccgatgggcgtgttgaggccgctgcctggcttagggcggaaacagattctctgcataagaaggggaacgaaagatggcggcggaaacgctgctgtccagtttgttaggactgctgcttctgggactcctgttacccgcaagtctgaccggcggtgtcgggagcctgaacctggaggagctgagtgagatgcgttatgggatcgagatcctgccgttgcctgtcatgggagggcagagccaatcttcggacgtggtgattgtctcctctaagtacaaacagcgctatgagtgtcgcctgccagctggagctattcacttccagcgtgaaagggaggaggaaacacctgcttaccaagggcctgggatccctgagttgttgagcccaatgagagatgctccctgcttgctgaagacaaaggactggtggacatatgaattctgttatggacgccacatccagcaataccacatggaagattcagagatcaaaggtgaagtcctctatctcggctactaccaatcagccttcgactgggatgatgaaacagccaaggcctccaagcagcatcgtcttaaacgctaccacagccagacctatggcaatgggtccaagtgcgaccttaatgggaggccccgggaggccgaggttcggttcctctgtgacgagggtgcaggtatctctggggactacatcgatcgcgtggacgagcccttgtcctgctcttatgtgctgaccattcgcactcctcggctctgcccccaccctctcctccggcccccacccagtgctgcaccgcaggccatcctctgtcacccttccctacagcctgaggagtacatggcctacgttcagaggcaagccgactcaaagcagtatggagataaaatcatagaggagctgcaagatctaggcccccaagtgtggagtgagaccaagtctggggtggcaccccaaaagatggcaggtgcgagcccgaccaaggatgacagtaaggactcagatttctggaagatgcttaatgagccagaggaccaggccccaggaggggaggaggtgccggctgaggagcaggacccaagccctgaggcagcagattcagcttctggtgctcccaatgattttcagaacaacgtgcaggtcaaagtcattcgaagccctgcggatttgattcgattcatagaggagctgaaaggtggaacaaaaaaggggaagccaaatataggccaagagcagcctgtggatgatgctgcagaagtccctcagagggaaccagagaaggaaaggggtgatccagaacggcagagagagatggaagaagaggaggatgaggatgaggatgaggatgaagatgaggatgaacggcagttactgggagaatttgagaaggaactggaagggatcctgcttccgtcagaccgagaccggctccgttcggaggtgaaggctggcatggagcgggaactggaaaacatcatccaggagacagagaaagagctggacccagatgggctgaagaaggagtcagagcgggatcgggcaatgctggctctcacatccactctcaacaaactcatcaaaagactggaggaaaaacagagtccagagctggtgaagaagcacaagaaaaagagggttgtccccaaaaagcctcccccatcaccccaacctacagggaaaattgagatcaaaattgtccgcccatgggctgaagggactgaagagggtgcacgttggctgactgatgaggacacgagaaacctcaaggagatcttcttcaatatcttggtgccgggagctgaagaggcccagaaggaacgccagcggcagaaagagctggagagcaattaccgccgggtgtggggctctccaggtggggagggcacaggggacctggacgaatttgacttctgagaccaacactacacttgacccttcacggaatccagactcttcctggactggcttgcctcctccccacctccccaccctggaacccctga

SEQ ID NO: 21223 - DNA, 3651 bp, Homo sapiens
  source 1..3651: mol_type = unassigned DNA
aatgtctcaggaacctacgacatactcccttttcctattcctttttctgagccatggagtgtcgagttatacagtgccaaattccaggcaggatttgcatccattgttgcaaaacatggcggaagaaataatagatggaagctatctgaatgcactgctggatctcatacagtttcaaagctcccacgtgtggacggatgacctgtcccacagagtcctggcctatctgaattcccggaatgttgccttcaccatccccagcctgcaggcagccgtggaaaaccacctggagcagcgtctgcaccagccccagaagctgctggaggacctgaggaagacagacgcccagcagttccgcactgccatgaaatgcctcttagaagacaagaaggacggcttggacctgaaagacatcatcatcgacttaggagagattcgagaacgagccttgcagagccctggcgtgaaccgcagcctgtttctcatcacactggagaggtgtttccagatgctgaactccctggagtgtgtggagatcctgggcaaggtgctgagggggtcctcagggagctttctccagccagacatcacagagcggctccctcgggacctgcgcgaggatgcctttaagaacctatctgcagtgttcaaagatctctacgacaaaacctcggctcattcccagagagctctctattcctggatgactggaatactgcagacatcctccaatgccactgatgactctgcttcatgggtcagtgcggaacacttatgggttttgggcagatacatggttcacctatcgtttgaagaaattacgaaaattagtcctatagaaattgggctgtttatcagctatgacaacgccaccaagcagctggacatggtctatgacatcacacctgagctggcccaggcgtttctggagaggatcagctcctccaactttaacatgaggaatacctccaccatccacaggcaagcgcatgagctctgggccttggagccctttcccaagatgctggggctgctggtttgtttctacaatgacctggaattgctggatgccactgtggctcaagtcctgctttaccagatgatcaagtgcagccacctgaggggcttccaggctggcgtccagaagctcaaagcagaactcctggacattgccatggagaaccagaccctcaatgagaccctgggttctttgtcggatgcagttgtaggtttgacctacagccaactggaatccctctcccccgaggctgtgcacggagccatctccaccctcaaccaggtctcaggttgggccaagagccaggtcatcatcttgtctgccaaatacttggcccatgagaaggtgctgtctttctacaatgtcagccagatgggcgcactgctggctggggtcagcacccaggccttctgcagcatgaaacgcaaggacatctcgcaggtcctgagaagtgccgtctcccagtatgtatccgacttgtcacctgcccagcagcaaggtatcctcagcaagatggtccaagcggaagacactgccccaggcatcgtggagatacaaggggctttctttaaggaagtgtctctctttgatttaaggaggcaacctggattcaactctacagtcctgaaggataaggaacttggaaggagccaggctctgttcctgtatgagcttctgttaaagaccaccagaaggcctgaggagcttttgagtgctgggcagctggtcaaaggcgtgacctgctcacacattgatgccatgagcactgacttctttctggcccatttccaggattttcagaacaacttcgccctgctttcaccctatcaggttaattgtttggcgtggaaatactgggaagtttccagattgtctatgccacctttcctcttggctgcactcccggcccgctacctggcttctgtcccagcctcccagtgtgtgccctttctgatcagcctggggaagagctggttggactccttggttttagattcccacaaaaagacttcagtcctcaggaaagtgcagcagtgcctggacgactccattgctgatgagtacactgtggacatcatggggaacctgctgtgtcacttgccggcagccatcatcgacagggggatctcccccagggcttgggcgactgctctacacggcctcagagactgcccagacctcaaccctgagcaaaaggctgcagtgaggctcaagctcctgggacagtatggactccctcagcactggacagccgagaccacgaaggacttgggaccctttctagtacttttctcaggagatgaattaagctctatagccacaaagtttcctgagatccttctgcaagcagcttccaagatggccaggaccctgcccactaaagaattcctctgggctgtctttcagtctgttcggaacagcagtgataagatccccagctatgaccctatgcctggttgccatggagtcgtggccccctcttctgatgacatcttcaagttggccgaagccaacgcctgctgggccctggaggacctgcggtgcatggaggaagacacattcatcaggaccgtggaactgctgggagctgtccagggtttcagccggcctcagctgatgaccctgaaggagaaagcaatacaggtttgggacatgccatcttactggagagaacaccatatcgtctccctggggcgcattgctctggctcttaatgagagtgagctggagcagctggacctcagctccatagacactgtggcttccctaagctggcaaacagaatggaccccgggacaggctgaatccattttgcaagggtacctggatgattcaggatacagtatccaggacctgaagagctttcatttggtaggacttggtgcaaccctgtgtgctataaacatcactgaaatcccacttataaagatctcagaattcagggtggtagtggccagaattgggaccctgctctgcagcacacatgtcttagccgagtttaagaggaaggctgaagttgtgtttggggatcccactgagtggaccagttctgtcttgcaggagcttgggaccattgcagctggattaactaaggcagagctccggatgcttgacaaggatttgatgccatatttccagccatcagcaataaaatgccttcctgatgagatattcaaagagctgtccgcggagcagatcgcctccctgggtccggagaacgccgcggcggtgacccacgcccagcgccggcggctcagtccactgcagctgcagagcctccagcaggcgctagatggcgccaagactcactcctggcaggacgcgcccgctagcgccggtcccactagaacctcatcctcgcgttctcccgcaggagctctccagtcgtggggtctttggcttggttgtcccctgctggttctaatggccaagctcctgtggtgagtggcctgagcgcatcgtcctgtgttgccccaagcagctggccaacatgtgtagagacaggatgctccagatggtgggacacccttccctggatccagaccctcatctagggcagggaaaccctggggccttgatggtgaaaatgcaccccaaatgaaaaataattattaaaaatgatcttgcaaatt

SEQ ID NO: 21224 - DNA, 1835 bp, Homo sapiens
  source 1..1835: mol_type = unassigned DNA
cccagagcagtttgggtagaggccaggggtggagctcaacatcctacaatgcgtaggacagcaccactacacagaggtacctggtcgaaaatgtcaataatactgagggcccgctacctggcttctgtcccagcctcccagtgtgtgccctttctgatcagcctggggaagagctggttggactccttggttttagattcccacaaaaagacttcagtcctcaggaaagtgcagcagtgcctggacgactccattgctgatgagtacactgtggacatcatggggaacctgctgtgtcacttgccggcagccatcatcgacagggggatctcccccagggcttgggcgactgctctacacggcctcagagactgcccagacctcaaccctgagcaaaaggctgcagtgaggctcaagctcctgggacagtatggactccctcagcactggacagccgagaccacgaaggacttgggaccctttctagtacttttctcaggagatgaattaagctctatagccacaaagtttcctgagatccttctgcaagcagcttccaagatggccaggaccctgcccactaaagaattcctctgggctgtctttcagtctgttcggaacagcagtgataagatccccagctatgaccctatgcctggttgccatggagtcgtggccccctcttctgatgacatcttcaagttggccgaagccaacgcctgctgggccctggaggacctgcggtgcatggaggaagacacattcatcaggaccgtggaactgctgggagctgtccagggtttcagccggcctcagctgatgaccctgaaggagaaagcaatacaggtttgggacatgccatcttactggagagaacaccatatcgtctccctggggcgcattgctctggctcttaatgagagtgagctggagcagctggacctcagctccatagacactgtggcttccctaagctggcaaacagaatggaccccgggacaggctgaatccattttgcaagggtacctggatgattcaggatacagtatccaggacctgaagagctttcatttggtaggacttggtgcaaccctgtgtgctataaacatcactgaaatcccacttataaagatctcagaattcagggtggtagtggccagaattgggaccctgctctgcagcacacatgtcttagccgagtttaagaggaaggctgaagttgtgtttggggatcccactgagtggaccagttctgtcttgcaggagcttgggaccattgcagctggattaactaaggcagagctccggatgcttgacaaggatttgatgccatatttccagccatcagcaataaaatgccttcctgatgagatattcaaagagctgtccgcggagcagatcgcctccctgggtccggagaacgccgcggcggtgacccacgcccagcgccggcggctcagtccactgcagctgcagagcctccagcaggcgctagatggcgccaagactcactcctggcaggacgcgcccgctagcgccggtcccactagaacctcatcctcgcgttctcccgcaggagctctccagtcgtggggtctttggcttggttgtcccctgctggttctaatggccaagctcctgtggtgagtggcctgagcgcatcgtcctgtgttgccccaagcagctggccaacatgtgtagagacaggatgctccagatggtgggacacccttccctggatccagaccctcatctagggcagggaaaccctggggccttgatggtgaaaatgcaccccaaatgaaaaataattattaaaaatgatcttgcaaatt

SEQ ID NO: 21225 - DNA, 3466 bp, Homo sapiens
  source 1..3466: mol_type = unassigned DNA
ttcgcctgtattttgctcctgcgctggtagcttgggtttgggcacagtgccatctggggttctaaacttcctggacaaaggccagctgctgctgatgggaaactcaatcacctacagggaccaggcagccgtggaaaaccacctggagcagcgtctgcaccagccccagaagctgctggaggacctgaggaagacagacgcccagcagttccgcactgccatgaaatgcctcttagaagacaagaaggacggcttggacctgaaagacatcatcatcgacttaggagagattcgagaacgagccttgcagagccctggcgtgaaccgcagcctgtttctcatcacactggagaggtgtttccagatgctgaactccctggagtgtgtggagatcctgggcaaggtgctgagggggtcctcagggagctttctccagccagacatcacagagcggctccctcgggacctgcgcgaggatgcctttaagaacctatctgcagtgttcaaagatctctacgacaaaacctcggctcattcccagagagctctctattcctggatgactggaatactgcagacatcctccaatgccactgatgactctgcttcatgggtcagtgcggaacacttatgggttttgggcagatacatggttcacctatcgtttgaagaaattacgaaaattagtcctatagaaattgggctgtttatcagctatgacaacgccaccaagcagctggacatggtctatgacatcacacctgagctggcccaggcgtttctggagaggatcagctcctccaactttaacatgaggaatacctccaccatccacaggctggggctgctggtttgtttctacaatgacctggaattgctggatgccactgtggctcaagtcctgctttaccagatgatcaagtgcagccacctgaggggcttccaggctggcgtccagaagctcaaagcagaactcctggacattgccatggagaaccagaccctcaatgagaccctgggttctttgtcggatgcagttgtaggtttgacctacagccaactggaatccctctcccccgaggctgtgcacggagccatctccaccctcaaccaggtctcaggttgggccaagagccaggtcatcatcttgtctgccaaatacttggcccatgagaaggtgctgtctttctacaatgtcagccagatgggcgcactgctggctggggtcagcacccaggccttctgcagcatgaaacgcaaggacatctcgcaggtcctgagaagtgccgtctcccagtatgtatccgacttgtcacctgcccagcagcaaggtatcctcagcaagatggtccaagcggaagacactgccccaggcatcgtggagatacaaggggctttctttaaggaagtgtctctctttgatttaaggaggcaacctggattcaactctacagtcctgaaggataaggaacttggaaggagccaggctctgttcctgtatgagcttctgttaaagaccaccagaaggcctgaggagcttttgagtgctgggcagctggtcaaaggcgtgacctgctcacacattgatgccatgagcactgacttctttctggcccatttccaggattttcagaacaacttcgccctgctttcaccctatcaggttaattgtttggcgtggaaatactgggaagtttccagattgtctatgccacctttcctcttggctgcactcccggcccgctacctggcttctgtcccagcctcccagtgtgtgccctttctgatcagcctggggaagagctggttggactccttggttttagattcccacaaaaagacttcagtcctcaggaaagtgcagcagtgcctggacgactccattgctgatgagtacactgtggacatcatggggaacctgctgtgtcacttgccggcagccatcatcgacagggggatctcccccagggcttgggcgactgctctacacggcctcagagactgcccagacctcaaccctgagcaaaaggctgcagtgaggctcaagctcctgggacagtatggactccctcagcactggacagccgagaccacgaaggacttgggaccctttctagtacttttctcaggagatgaattaagctctatagccacaaagtttcctgagatccttctgcaagcagcttccaagatggccaggaccctgcccactaaagaattcctctgggctgtctttcagtctgttcggaacagcagtgataagatccccagctatgaccctatgcctggttgccatggagtcgtggccccctcttctgatgacatcttcaagttggccgaagccaacgcctgctgggccctggaggacctgcggtgcatggaggaagacacattcatcaggaccgtggaactgctgggagctgtccagggtttcagccggcctcagctgatgaccctgaaggagaaagcaatacaggtttgggacatgccatcttactggagagaacaccatatcgtctccctggggcgcattgctctggctcttaatgagagtgagctggagcagctggacctcagctccatagacactgtggcttccctaagctggcaaacagaatggaccccgggacaggctgaatccattttgcaagggtacctggatgattcaggatacagtatccaggacctgaagagctttcatttggtaggacttggtgcaaccctgtgtgctataaacatcactgaaatcccacttataaagatctcagaattcagggtggtagtggccagaattgggaccctgctctgcagcacacatgtcttagccgagtttaagaggaaggctgaagttgtgtttggggatcccactgagtggaccagttctgtcttgcaggagcttgggaccattgcagctggattaactaaggcagagctccggatgcttgacaaggatttgatgccatatttccagccatcagcaataaaatgccttcctgatgagatattcaaagagctgtccgcggagcagatcgcctccctgggtccggagaacgccgcggcggtgacccacgcccagcgccggcggctcagtccactgcagctgcagagcctccagcaggcgctagatggcgccaagactcactcctggcaggacgcgcccgctagcgccggtcccactagaacctcatcctcgcgttctcccgcaggagctctccagtcgtggggtctttggcttggttgtcccctgctggttctaatggccaagctcctgtggtgagtggcctgagcgcatcgtcctgtgttgccccaagcagctggccaacatgtgtagagacaggatgctccagatggtgggacacccttccctggatccagaccctcatctagggcagggaaaccctggggccttgatggtgaaaatgcaccccaaatgaaaaataattattaaaaatgatcttgcaaatta

SEQ ID NO: 21226 - DNA, 2703 bp, Homo sapiens
  source 1..2703: mol_type = unassigned DNA
ccccattccttggtctcgtctgagcagttaggttccgcctgtggttgcacatttggttcatctgaggatgttcaggctggggctgctggtttgtttctacaatgacctggaattgctggatgccactgtggctcaagtcctgctttaccagatgatcaagtgcagccacctgaggggcttccaggctggcgtccagaagctcaaagcagaactcctggacattgccatggagaaccagaccctcaatgagaccctgggttctttgtcggatgcagttgtaggtttgacctacagccaactggaatccctctcccccgaggctgtgcacggagccatctccaccctcaaccaggtctcaggttgggccaagagccaggtcatcatcttgtctgccaaatacttggcccatgagaaggtgctgtctttctacaatgtcagccagatgggcgcactgctggctggggtcagcacccaggccttctgcagcatgaaacgcaaggacatctcgcaggtcctgagaagtgccgtctcccagtatgtatccgacttgtcacctgcccagcagcaaggtatcctcagcaagatggtccaagcggaagacactgccccaggcatcgtggagatacaaggggctttctttaaggaagtgtctctctttgatttaaggaggcaacctggattcaactctacagtcctgaaggataaggaacttggaaggagccaggctctgttcctgtatgagcttctgttaaagaccaccagaaggcctgaggagcttttgagtgctgggcagctggtcaaaggcgtgacctgctcacacattgatgccatgagcactgacttctttctggcccatttccaggattttcagaacaacttcgccctgctttcaccctatcaggttaattgtttggcgtggaaatactgggaagtttccagattgtctatgccacctttcctcttggctgcactcccggcccgctacctggcttctgtcccagcctcccagtgtgtgccctttctgatcagcctggggaagagctggttggactccttggttttagattcccacaaaaagacttcagtcctcaggaaagtgcagcagtgcctggacgactccattgctgatgagtacactgtggacatcatggggaacctgctgtgtcacttgccggcagccatcatcgacagggggatctcccccagggcttgggcgactgctctacacggcctcagagactgcccagacctcaaccctgagcaaaaggctgcagtgaggctcaagctcctgggacagtatggactccctcagcactggacagccgagaccacgaaggacttgggaccctttctagtacttttctcaggagatgaattaagctctatagccacaaagtttcctgagatccttctgcaagcagcttccaagatggccaggaccctgcccactaaagaattcctctgggctgtctttcagtctgttcggaacagcagtgataagatccccagctatgaccctatgcctggttgccatggagtcgtggccccctcttctgatgacatcttcaagttggccgaagccaacgcctgctgggccctggaggacctgcggtgcatggaggaagacacattcatcaggaccgtggaactgctgggagctgtccagggtttcagccggcctcagctgatgaccctgaaggagaaagcaatacaggtttgggacatgccatcttactggagagaacaccatatcgtctccctggggcgcattgctctggctcttaatgagagtgagctggagcagctggacctcagctccatagacactgtggcttccctaagctggcaaacagaatggaccccgggacaggctgaatccattttgcaagggtacctggatgattcaggatacagtatccaggacctgaagagctttcatttggtaggacttggtgcaaccctgtgtgctataaacatcactgaaatcccacttataaagatctcagaattcagggtggtagtggccagaattgggaccctgctctgcagcacacatgtcttagccgagtttaagaggaaggctgaagttgtgtttggggatcccactgagtggaccagttctgtcttgcaggagcttgggaccattgcagctggattaactaaggcagagctccggatgcttgacaaggatttgatgccatatttccagccatcagcaataaaatgccttcctgatgagatattcaaagagctgtccgcggagcagatcgcctccctgggtccggagaacgccgcggcggtgacccacgcccagcgccggcggctcagtccactgcagctgcagagcctccagcaggcgctagatggcgccaagactcactcctggcaggacgcgcccgctagcgccggtcccactagaacctcatcctcgcgttctcccgcaggagctctccagtcgtggggtctttggcttggttgtcccctgctggttctaatggccaagctcctgtggtgagtggcctgagcgcatcgtcctgtgttgccccaagcagctggccaacatgtgtagagacaggatgctccagatggtgggacacccttccctggatccagaccctcatctagggcagggaaaccctggggccttgatggtgaaaatgcaccccaaatgaaaaataattattaaaaatgatcttgcaaatt

SEQ ID NO: 21227 - DNA, 3610 bp, Homo sapiens
  source 1..3610: mol_type = unassigned DNA
aatgtctcaggaacctacgacatactcccttttcctattcctttttctgagccatggagtgtcgagttatacagtgccaaattccaggcaggatttgcatccattgttgcaaaacatggcggaagaaataatagatggaagctatctgaatgcactgctggatctcatacagtttcaaagctcccacgtgtggacggatgacctgtcccacagagtcctggcctatctgaattcccggaatgttgccttcaccatccccagcctgcaggcagccgtggaaaaccacctggagcagcgtctgcaccagccccagaagctgctggaggacctgaggaagacagacgcccagcagttccgcactgccatgaaatgcctcttagaagacaagaaggacggcttggacctgaaagacatcatcatcgacttaggagagattcgagaacgagccttgcagagccctggcgtgaaccgcagcctgtttctcatcacactggagaggtgtttccagatgctgaactccctggagtgtgtggagatcctgggcaaggtgctgagggggtcctcagggagctttctccagccagacatcacagagcggctccctcgggacctgcgcgaggatgcctttaagaacctatctgcagtgttcaaagatctctacgacaaaacctcggctcattcccagagagctctctattcctggatgactggaatactgcagacatcctccaatgccactgatgactctgcttcatgggtcagtgcggaacacttatgggttttgggcagatacatggttcacctatcgtttgaagaaattacgaaaattagtcctatagaaattgggctgtttatcagctatgacaacgccaccaagcagctggacatggtctatgacatcacacctgagctggcccaggcgtttctggagaggatcagctcctccaactttaacatgaggaatacctccaccatccacaggctggggctgctggtttgtttctacaatgacctggaattgctggatgccactgtggctcaagtcctgctttaccagatgatcaagtgcagccacctgaggggcttccaggctggcgtccagaagctcaaagcagaactcctggacattgccatggagaaccagaccctcaatgagaccctgggttctttgtcggatgcagttgtaggtttgacctacagccaactggaatccctctcccccgaggctgtgcacggagccatctccaccctcaaccaggtctcaggttgggccaagagccaggtcatcatcttgtctgccaaatacttggcccatgagaaggtgctgtctttctacaatgtcagccagatgggcgcactgctggctggggtcagcacccaggccttctgcagcatgaaacgcaaggacatctcgcaggtcctgagaagtgccgtctcccagtatgtatccgacttgtcacctgcccagcagcaaggtatcctcagcaagatggtccaagcggaagacactgccccaggcatcgtggagatacaaggggctttctttaaggaagtgtctctctttgatttaaggaggcaacctggattcaactctacagtcctgaaggataaggaacttggaaggagccaggctctgttcctgtatgagcttctgttaaagaccaccagaaggcctgaggagcttttgagtgctgggcagctggtcaaaggcgtgacctgctcacacattgatgccatgagcactgacttctttctggcccatttccaggattttcagaacaacttcgccctgctttcaccctatcaggttaattgtttggcgtggaaatactgggaagtttccagattgtctatgccacctttcctcttggctgcactcccggcccgctacctggcttctgtcccagcctcccagtgtgtgccctttctgatcagcctggggaagagctggttggactccttggttttagattcccacaaaaagacttcagtcctcaggaaagtgcagcagtgcctggacgactccattgctgatgagtacactgtggacatcatggggaacctgctgtgtcacttgccggcagccatcatcgacagggggatctcccccagggcttgggcgactgctctacacggcctcagagactgcccagacctcaaccctgagcaaaaggctgcagtgaggctcaagctcctgggacagtatggactccctcagcactggacagccgagaccacgaaggacttgggaccctttctagtacttttctcaggagatgaattaagctctatagccacaaagtttcctgagatccttctgcaagcagcttccaagatggccaggaccctgcccactaaagaattcctctgggctgtctttcagtctgttcggaacagcagtgataagatccccagctatgaccctatgcctggttgccatggagtcgtggccccctcttctgatgacatcttcaagttggccgaagccaacgcctgctgggccctggaggacctgcggtgcatggaggaagacacattcatcaggaccgtggaactgctgggagctgtccagggtttcagccggcctcagctgatgaccctgaaggagaaagcaatacaggtttgggacatgccatcttactggagagaacaccatatcgtctccctggggcgcattgctctggctcttaatgagagtgagctggagcagctggacctcagctccatagacactgtggcttccctaagctggcaaacagaatggaccccgggacaggctgaatccattttgcaagggtacctggatgattcaggatacagtatccaggacctgaagagctttcatttggtaggacttggtgcaaccctgtgtgctataaacatcactgaaatcccacttataaagatctcagaattcagggtggtagtggccagaattgggaccctgctctgcagcacacatgtcttagccgagtttaagaggaaggctgaagttgtgtttggggatcccactgagtggaccagttctgtcttgcaggagcttgggaccattgcagctggattaactaaggcagagctccggatgcttgacaaggatttgatgccatatttccagccatcagcaataaaatgccttcctgatgagatattcaaagagctgtccgcggagcagatcgcctccctgggtccggagaacgccgcggcggtgacccacgcccagcgccggcggctcagtccactgcagctgcagagcctccagcaggcgctagatggcgccaagactcactcctggcaggacgcgcccgctagcgccggtcccactagaacctcatcctcgcgttctcccgcaggagctctccagtcgtggggtctttggcttggttgtcccctgctggttctaatggccaagctcctgtggtgagtggcctgagcgcatcgtcctgtgttgccccaagcagctggccaacatgtgtagagacaggatgctccagatggtgggacacccttccctggatccagaccctcatctagggcagggaaaccctggggccttgatggtgaaaatgcaccccaaatgaaaaataattattaaaaatgatcttgcaaatta

SEQ ID NO: 21228 - DNA, 1782 bp, Homo sapiens
  source 1..1782: mol_type = unassigned DNA
agcatcattcatccagctgcactccagtggagccttcacggagtccgttccagttgctgcctaagccccatcctttgttctcctgctatgattgcgtttctcctcaccagtgtgctgatgatcccccatgccggaggccatcctctggacactccacatcttccacaggagctgcctccaggactcccaaacaatatcaatatcactttcttcagtgggatgtttaaaaatgtggaaagtgtggctgaaatttttgattgcctgggcccccacttcacctggctgcaggctgtcttcaccaatttccctgtgctgatccagtttgtcaatggtatgaagtgtgtggctggtctctgcccccgagactttgaagactatggttgcacctgcaggtttgagatggaagggttgcctgtggatgaatctgacagctgctgcttccagcaccgcaggtgctatgaggaggccgctgagatggactgtctccaagaccccgccaaacttagcacagaggtcaattgtgtcagcaagaagatcatatgtgagtccaaggacaactgtgagcacctgctgtgtacctgtgataaggctgccatagagtgcttggctcgatccagcctcaactcttccctgaaccttctggacacctccttctgcctggctcagactccagagacaaccatcaaggaagacttgacaacacttctgcccagagtggttcctgtggagcccacagacaccagcctgacagccctttcaggagaagaagcaggccacgatcaggaaggagtgggagctgctagggctacgtcccctccaggatctgcagagatagttgcaacaagggttacagctaaaattgtaacccttgtccctgctggcattaaatctctggggctggcagtgtcatctgttgaaaatgatcctgaggagaccactgaaaaagcctgtgacagattcaccttcctgcacctgggaagtggggacaacatgcaggtgatgccacagcttggagagatgctcttttgtctgacatcccggtgcccggaggaatttgagtcttatggctgttactgtggacaagaaggaagaggcgagccaagggatgacctagacaggtgctgcttgtcccatcactgctgcctagagcaagtgagaaggctgggctgcctgcttgagaggcttccttggtcaccggtggtgtgtgtggatcatacgcccaagtgtgggggccaaagcctgtgtgagaagttgctctgtgcctgtgaccagacggcagctgagtgcatgacctctgcctcctttaaccaaagcctcaagtccccaagcagactcgggtgccctgggcagccagcagcctgtgaagacagcctgcaccctgtgcccgcagcccccaccctgggctccagctctgaggaggacagcgaggaggaccctccacaggaggacctcggcagagccaagaggtttctgcggaagtcactgggtcccttggggatcgggcctcttcatggaagatagatgcccagagaaaatggctaacaccttcagtagcgtggctcctgctccaccttcagctctttatctctcagcctcctctgtcccttggagccttcttcccttcctttaactcagaggcggggagggaacagaggccgtgagccctgcccatgcctcatcagctgtggtcacctcacaagccaatgtacacttggagaaggcacaccatggtacctccatgctcctttagtgcactgtggaagctcaataaatactccaatc

SEQ ID NO: 21229 - DNA, 1830 bp, Homo sapiens
  source 1..1830: mol_type = unassigned DNA
agcatcattcatccagctgcactccagtggagccttcacggagtccgttccagttgctgcctaagccccatcctttgttctcctgctatgattgcgtttctcctcaccagtgtgctgatgatcccccatgccggaggccatcctctggacactccacatcttccacaggagctgcctccaggactcccaaacaatatcaatatcactttcttcagtgggatgtttaaaaatgtggaaagtgtggctgaaatttttgattgcctgggcccccacttcacctggctgcaggctgtcttcaccaatttccctgtgctgatccagtttgtcaatggtatgaagtgtgtggctggtctctgcccccgagactttgaagactatggttgcacctgcaggtttgagatggaagggttgcctgtggatgaatctgacagctgctgcttccagcaccgcaggtgctatgaggaggccgctgagatggactgtctccaagaccccgccaaacttagcacagaggtcaattgtgtcagcaagaagatcatatgtgagtccaaggacaactgtgagcacctgctgtgtacctgtgataaggctgccatagagtgcttggctcgatccagcctcaactcttccctgaaccttctggacacctccttctgcctggctcagactccagagacaaccatcaaggaagacttgacaacacttctgcccagagtggttcctgtggagcccacagacaccagcctgacagccctttcaggagaagtggctgcagagactgaggctgacagactgatcactctctccaagaaaaaagcaggccacgatcaggaaggagtgggagctgctagggctacgtcccctccaggatctgcagagatagttgcaacaagggttacagctaaaattgtaacccttgtccctgctggcattaaatctctggggctggcagtgtcatctgttgaaaatgatcctgaggagaccactgaaaaagcctgtgacagattcaccttcctgcacctgggaagtggggacaacatgcaggtgatgccacagcttggagagatgctcttttgtctgacatcccggtgcccggaggaatttgagtcttatggctgttactgtggacaagaaggaagaggcgagccaagggatgacctagacaggtgctgcttgtcccatcactgctgcctagagcaagtgagaaggctgggctgcctgcttgagaggcttccttggtcaccggtggtgtgtgtggatcatacgcccaagtgtgggggccaaagcctgtgtgagaagttgctctgtgcctgtgaccagacggcagctgagtgcatgacctctgcctcctttaaccaaagcctcaagtccccaagcagactcgggtgccctgggcagccagcagcctgtgaagacagcctgcaccctgtgcccgcagcccccaccctgggctccagctctgaggaggacagcgaggaggaccctccacaggaggacctcggcagagccaagaggtttctgcggaagtcactgggtcccttggggatcgggcctcttcatggaagatagatgcccagagaaaatggctaacaccttcagtagcgtggctcctgctccaccttcagctctttatctctcagcctcctctgtcccttggagccttcttcccttcctttaactcagaggcggggagggaacagaggccgtgagccctgcccatgcctcatcagctgtggtcacctcacaagccaatgtacacttggagaaggcacaccatggtacctccatgctcctttagtgcactgtggaagctcaataaatactccaatc

SEQ ID NO: 21230 - DNA, 7156 bp, Homo sapiens
  source 1..7156: mol_type = unassigned DNA
atcggaggggggtcgggaggaggaggaggaggcagcggcagagaagagagaggcgtgtgagccgtgctccaccggctagctccttcccgctgctcctgcctggcagtgccaggcagcccacaccagcatggccttgctcatccacctcaagacagtctcggagctgcggggcaggggcgaccggatcgccaaagtgactttccgagggcaatccttctactctcgggtcctggagaactgtgaggatgtggctgactttgatgagacatttcggtggccggtggccagcagcatcgacagaaatgagatgctggagattcaggttttcaactacagcaaagtcttcagcaacaagctcatcgggaccttccgcatggtgctgcagaaggtggtagaggagagccatgtggaggtgactgacacgctgattgatgacaacaatgctatcatcaagaccagcctgtgcgtggaggtccggtatcaggccactgacggcacagtgggctcctgggacgatggggacttcctgggagatgagtctcttcaagaggaagagaaggacagccaagagacggatggactgctcccaggctcccggcccagctcccggcccccaggagagaagagcttccggagagccgggaggagcgtgttctccgccatgaagctcggcaaaaaccggtctcacaaggaggagccccaaagaccagatgaaccggcggtgctggagatggaagaccttgaccatctggccattcggctaggagatggactggatcccgactcggtgtctctagcctcagtcacagctctcaccactaatgtctccaacaagcgatctaagccagacattaagatggagccaagtgctgggcggcccatggattaccaggtcagcatcacggtgatcgaggcccggcagctggtgggcttgaacatggaccctgtggtgtgcgtggaggtgggtgacgacaagaagtacacatccatgaaggagtccactaactgcccctattacaacgagtacttcgtcttcgacttccatgtctctccggatgtcatgtttgacaagatcatcaagatttcggtgattcactccaagaacctgctgcgcagtggcaccctggtgggctccttcaaaatggacgtgggaaccgtgtactcgcagccagagcaccagttccatcacaagtgggccatcctgtctgaccccgatgacatctcctcggggctgaagggctacgtgaagtgtgacgttgccgtggtgggcaaaggggacaacatcaagacgccccacaaggccaatgagaccgacgaagatgacattgaggggaacttgctgctccccgagggggtgccccccgaacgccagtgggcccggttctatgtgaaaatttaccgagcagaggggctgccccgtatgaacacaagcctcatggccaatgtaaagaaggctttcatcggtgaaaacaaggacctcgtggacccctacgtgcaagtcttctttgctggccagaagggcaagacttcagtgcagaagagcagctatgagcccctgtggaatgagcaggtcgtctttacagacctcttccccccactctgcaaacgcatgaaggtgcagatccgagactcggacaaggtcaacgacgtggccatcggcacccacttcattgacctgcgcaagatttctaatgacggagacaaaggcttcctgcccacactgggcccagcctgggtgaacatgtacggctccacacgtaactacacgctgctggatgagcatcaggacctgaacgagggcctgggggagggtgtgtccttccgggcccggctcctgctgggcctggctgtggagatcgtagacacctccaaccctgagctcaccagctccacagaggtgcaggtggagcaggccacgcccatctcggagagctgtgcaggtaaaatggaagaattctttctctttggagccttcctggaggcctcaatgatcgaccggagaaacggagacaagcccatcacctttgaggtcaccataggcaactatgggaacgaagttgatggcctgtcccggccccagcggcctcggccccggaaggagccgggggatgaggaagaagtagacctgattcagaacgcaagtgatgacgaggccggtgatgccggggacctggcctcagtctcctccactccaccaatgcggccccaggtcaccgacaggaactacttccatctgccctacctggagcgaaagccctgcatctacatcaagagctggtggccggaccagcgccgccgcctctacaatgccaacatcatggaccacattgccgacaagctggaagaaggcctgaacgacatacaggagatgatcaaaacggagaagtcctaccctgagcgtcgcctgcggggcgtcctggaggagctgagctgtggctgctgccgcttcctctccctcgctgacaaggaccagggccactcatcccgcaccaggcttgaccgggagcgcctcaagtcctgcatgagggagctggaaaacatggggcagcaggccaggatgctgcgggcccaggtgaagcggcacacggtgcgggacaagctgaggctgtgccagaacttcctgcagaagctgcgcttcctggcggacgagccccagcacagcattcccgacatcttcatctggatgatgagcaacaacaagcgtgtcgcctatgcccgtgtgccctccaaggacctgctcttctccatcgtggaggaggagactggcaaggactgcgccaaggtcaagacgctcttccttaagctgccagggaagcggggcttcggctcggcaggctggacagtgcaggccaaggtggagctgtacctgtggctgggcctcagcaaacagcgcaaggagttcctgtgcggcctgccctgtggcttccaggaggtcaaggcagcccagggcctgggcctgcatgccttcccacccgtcagcctggtctacaccaagaagcaggcgttccagctccgagcgcacatgtaccaggcccgcagcctctttgccgccgacagcagcggactctcagacccctttgcccgcgtcttcttcatcaatcagagtcagtgcacagaggtgctgaatgagaccctgtgtcccacctgggaccagatgctggtgttcgacaacctggagctctatggtgaagctcatgagctgagggacgatccgcccatcattgtcattgaaatctatgaccaggattccatgggcaaagctgacttcatgggccggaccttcgccaaacccctggtgaagatggcagacgaggcgtactgcccaccccgcttcccacctcagctcgagtactaccagatctaccgtggcaacgccacagctggagacctgctggcggccttcgagctgctgcagattggaccagcagggaaggctgacctgccccccatcaatggcccggtggacgtggaccgaggtcccatcatgcccgtgcccatgggcatccggcccgtgctcagcaagtaccgagtggaggtgctgttctggggcctacgggacctaaagcgggtgaacctggcccaggtggaccggccacgggtggacatcgagtgtgcagggaagggggtgcagtcgtccctgatccacaattataagaagaaccccaacttcaacaccctcgtcaagtggtttgaagtggacctcccagagaacgagctgctgcacccgcccttgaacatccgtgtggtggactgccgggccttcggtcgctacacactggtgggctcccatgccgtcagctccctgcgacgcttcatctaccggcccccagaccgctcggcccccagctggaacaccacggtcaggcttctccggcgctgccgtgtgctgtgcaatgggggctcctcctctcactccacaggggaggttgtggtgactatggagccagaggtacccatcaagaaactggagaccatggtgaagctggacgcgacttctgaagctgttgtcaaggtggatgtggctgaggaggagaaggagaagaagaagaagaagaagggcactgcggaggagccagaggaggaggagccagacgagagcatgctggactggtggtccaagtactttgcctccattgacaccatgaaggagcaacttcgacaacaagagccctctggaattgacttggaggagaaggaggaagtggacaataccgagggcctgaaggggtcaatgaagggcaaggagaaggcaagggctgccaaagaggagaagaagaagaaaactcagagctctggctctggccaggggtccgaggcccccgagaagaagaaacccaagattgatgagcttaaggtataccccaaagagctggagtccgagtttgataactttgaggactggctgcacactttcaacttgcttcggggcaagaccggggatgatgaggatggctccaccgaggaggagcgcattgtgggacgcttcaagggctccctctgcgtgtacaaagtgccactcccagaggacgtgtcccgggaagccggctacgactccacctacggcatgttccagggcatcccgagcaatgaccccatcaatgtgctggtccgagtctatgtggtccgggccacggacctgcaccctgctgacatcaacggcaaagctgacccctacatcgccatccggctaggcaagactgacatccgcgacaaggagaactacatctccaagcagctcaaccctgtctttgggaagtcctttgacatcgaggcctccttccccatggaatccatgctgacggtggctgtgtatgactgggacctggtgggcactgatgacctcattggggaaaccaagatcgacctggagaaccgcttctacagcaagcaccgcgccacctgcggcatcgcccagacctactccacacatggctacaatatctggcgggaccccatgaagcccagccagatcctgacccgcctctgcaaagacggcaaagtggacggcccccactttgggccccctgggagagtgaaggtggccaaccgcgtcttcactgggccctctgagattgaggacgagaacggtcagaggaagcccacagacgagcatgtggcgctgttggccctgaggcactgggaggacatcccccgcgcaggctgccgcctggtgccagagcatgtggagacgaggccgctgctcaaccccgacaagccgggcatcgagcagggccgcctggagctgtgggtggacatgttccccatggacatgccagcccctgggacgcctctggacatctcacctcggaagcccaagaagtacgagctgcgggtcatcatctggaacacagatgaggtggtcttggaggacgacgacttcttcacaggggagaagtccagtgacatcttcgtgagggggtggctgaagggccagcaggaggacaagcaggacacagacgtccactaccactccctcactggcgagggcaacttcaactggcgctacctgttccccttcgactacctggcggcggaggagaagatcgtcatctccaagaaggagtccatgttctcctgggacgagaccgagtacaagatccccgcgcggctcaccctgcagatctgggatgcggaccacttctccgctgacgacttcctgggggccatcgagctggacctgaaccggttcccgcggggcgcaaagacagccaagcagtgcaccatggagatggccaccggggaggtggacgtgcccctcgtgtccatcttcaagcaaaagcgcgtcaaaggctggtggcccctcctggcccgcaatgagaacgatgagtttgagctcacgggcaaggtggaggctgagctgcatttactgacagcagaggaggcagagaagaacccagtgggcctggcccgcaatgaacctgaccccctagagaaacccaaccggcccgacacgagcttcatctggttcctgaaccctctcaagtcggctcgctacttcttgtggcacacgtatcgctggctgctcctcaaactgttgctgctcctgctgctgctcctcctcctcgccctgttcctctactctgtgcctggctacctggtcaagaaaatcctcggggcctgagcccagtggcctcctggccggcccgacacggccttcgtctggttcctcaaccctctcaagtccatcaagtacctcatctgcacccggtacaagtggctcatcatcaagatcgtgctggcgctgttggggctgctcatgttggggctcttcctctacagcctccctggctacatggtcaaaaagctccttggggcatgaaggccgccagctcccgccagccgctccccagccctgccgcatttcctttcagtggcttggactctttcccatctcccctggggagcctgaggagcccagcgtccactcttcatgccttgggccgagcctgcctcctgcttgcgggggccgcctgtcctcactgccccaggctgcggcttgcccagtcccgcccctctgacccctgcctgtgggctggggagccttggatggggtggggacctggaatgggtctctcttgccccacctggctgaggcgccacccttcttcaggcccaggctccagaggaagactcctgaaaccctccccaggtcttccaagtacaggattgaagctttagtgaaattaaccaaggaccatgggtcagtgcccagggctttaaaaagaatgaacgagcaaaaggtatccccgccgtgacccctgcagatagcaccggtctttgatccgcagcaggggccagaccctgcccacaagtcccagcgcggctgcttctgccactgctgggctccacttggctcctctcacttcccagggggtcgcctgtcctgcctgtgggtttccatggcttcccagagctccctctgccccagccagcgcctccaggcccagctgaggagctgtgagaagcagcagaggggactccccatcccgggcacaccctgtcctcccacccctgcccccttgcccttccagccctttcagctgcagctgggagctggcccgtcaagtgctgcccctgcctgtgtctgggtttctgttggctgtttttcttttcttgagtggtgatttttctctaaataaaagaagtcaagcactga

SEQ ID NO: 21231 - DNA, 4954 bp, Homo sapiens
  source 1..4954: mol_type = unassigned DNA
ccgtgagttctgcccaggccctgtgagctcaccagagccacagactcacagcccagaggtggcttcttccttcaggaactgaagaacccccatgaacaccaacatctccaggttctgagaacagaacctgggaaattgatgacttcctcatgatgaccgatactcaggatggccctagcgagagctcccagatcatgaggaagaaggcctgaacgacatacaggagatgatcaaaacggagaagtcctaccctgagcgtcgcctgcggggcgtcctggaggagctgagctgtggctgctgccgcttcctctccctcgctgacaaggaccagggccactcatcccgcaccaggcttgaccgggagcgcctcaagtcctgcatgagggagctggaaaacatggggcagcaggccaggatgctgcgggcccaggtgaagcggcacacggtgcgggacaagctgaggctgtgccagaacttcctgcagaagctgcgcttcctggcggacgagccccagcacagcattcccgacatcttcatctggatgatgagcaacaacaagcgtgtcgcctatgcccgtgtgccctccaaggacctgctcttctccatcgtggaggaggagactggcaaggactgcgccaaggtcaagacgctcttccttaagctgccagggaagcggggcttcggctcggcaggctggacagtgcaggccaaggtggagctgtacctgtggctgggcctcagcaaacagcgcaaggagttcctgtgcggcctgccctgtggcttccaggaggtcaaggcagcccagggcctgggcctgcatgccttcccacccgtcagcctggtctacaccaagaagcaggcgttccagctccgagcgcacatgtaccaggcccgcagcctctttgccgccgacagcagcggactctcagacccctttgcccgcgtcttcttcatcaatcagagtcagtgcacagaggtgctgaatgagaccctgtgtcccacctgggaccagatgctggtgttcgacaacctggagctctatggtgaagctcatgagctgagggacgatccgcccatcattgtcattgaaatctatgaccaggattccatgggcaaagctgacttcatgggccggaccttcgccaaacccctggtgaagatggcagacgaggcgtactgcccaccccgcttcccacctcagctcgagtactaccagatctaccgtggcaacgccacagctggagacctgctggcggccttcgagctgctgcagattggaccagcagggaaggctgacctgccccccatcaatggcccggtggacgtggaccgaggtcccatcatgcccgtgcccatgggcatccggcccgtgctcagcaagtaccgagtggaggtgctgttctggggcctacgggacctaaagcgggtgaacctggcccaggtggaccggccacgggtggacatcgagtgtgcagggaagggggtgcagtcgtccctgatccacaattataagaagaaccccaacttcaacaccctcgtcaagtggtttgaagtggacctcccagagaacgagctgctgcacccgcccttgaacatccgtgtggtggactgccgggccttcggtcgctacacactggtgggctcccatgccgtcagctccctgcgacgcttcatctaccggcccccagaccgctcggcccccagctggaacaccacgggggaggttgtggtgactatggagccagaggtacccatcaagaaactggagaccatggtgaagctggacgcgacttctgaagctgttgtcaaggtggatgtggctgaggaggagaaggagaagaagaagaagaagaagggcactgcggaggagccagaggaggaggagccagacgagagcatgctggactggtggtccaagtactttgcctccattgacaccatgaaggagcaacttcgacaacaagagccctctggaattgacttggaggagaaggaggaagtggacaataccgagggcctgaaggggtcaatgaagggcaaggagaaggcaagggctgccaaagaggagaagaagaagaaaactcagagctctggctctggccaggggtccgaggcccccgagaagaagaaacccaagattgatgagcttaaggtataccccaaagagctggagtccgagtttgataactttgaggactggctgcacactttcaacttgcttcggggcaagaccggggatgatgaggatggctccaccgaggaggagcgcattgtgggacgcttcaagggctccctctgcgtgtacaaagtgccactcccagaggacgtgtcccgggaagccggctacgactccacctacggcatgttccagggcatcccgagcaatgaccccatcaatgtgctggtccgagtctatgtggtccgggccacggacctgcaccctgctgacatcaacggcaaagctgacccctacatcgccatccggctaggcaagactgacatccgcgacaaggagaactacatctccaagcagctcaaccctgtctttgggaagtcctttgacatcgaggcctccttccccatggaatccatgctgacggtggctgtgtatgactgggacctggtgggcactgatgacctcattggggaaaccaagatcgacctggagaaccgcttctacagcaagcaccgcgccacctgcggcatcgcccagacctactccacacatggctacaatatctggcgggaccccatgaagcccagccagatcctgacccgcctctgcaaagacggcaaagtggacggcccccactttgggccccctgggagagtgaaggtggccaaccgcgtcttcactgggccctctgagattgaggacgagaacggtcagaggaagcccacagacgagcatgtggcgctgttggccctgaggcactgggaggacatcccccgcgcaggctgccgcctggtgccagagcatgtggagacgaggccgctgctcaaccccgacaagccgggcatcgagcagggccgcctggagctgtgggtggacatgttccccatggacatgccagcccctgggacgcctctggacatctcacctcggaagcccaagaagtacgagctgcgggtcatcatctggaacacagatgaggtggtcttggaggacgacgacttcttcacaggggagaagtccagtgacatcttcgtgagggggtggctgaagggccagcaggaggacaagcaggacacagacgtccactaccactccctcactggcgagggcaacttcaactggcgctacctgttccccttcgactacctggcggcggaggagaagatcgtcatctccaagaaggagtccatgttctcctgggacgagaccgagtacaagatccccgcgcggctcaccctgcagatctgggatgcggaccacttctccgctgacgacttcctgggggccatcgagctggacctgaaccggttcccgcggggcgcaaagacagccaagcagtgcaccatggagatggccaccggggaggtggacgtgcccctcgtgtccatcttcaagcaaaagcgcgtcaaaggctggtggcccctcctggcccgcaatgagaacgatgagtttgagctcacgggcaaggtggaggctgagctgcatttactgacagcagaggaggcagagaagaacccagtgggcctggcccgcaatgaacctgaccccctagagaaacccaaccggcccgacacgagcttcatctggttcctgaaccctctcaagtcggctcgctacttcttgtggcacacgtatcgctggctgctcctcaaactgttgctgctcctgctgctgctcctcctcctcgccctgttcctctactctgtgcctggctacctggtcaagaaaatcctcggggcctgagcccagtggcctcctggccggcccgacacggccttcgtctggttcctcaaccctctcaagtccatcaagtacctcatctgcacccggtacaagtggctcatcatcaagatcgtgctggcgctgttggggctgctcatgttggggctcttcctctacagcctccctggctacatggtcaaaaagctccttggggcatgaaggccgccagctcccgccagccgctccccagccctgccgcatttcctttcagtggcttggactctttcccatctcccctggggagcctgaggagcccagcgtccactcttcatgccttgggccgagcctgcctcctgcttgcgggggccgcctgtcctcactgccccaggctgcggcttgcccagtcccgcccctctgacccctgcctgtgggctggggagccttggatggggtggggacctggaatgggtctctcttgccccacctggctgaggcgccacccttcttcaggcccaggctccagaggaagactcctgaaaccctccccaggtcttccaagtacaggattgaagctttagtgaaattaaccaaggaccatgggtcagtgcccagggctttaaaaagaatgaacgagcaaaaggtatccccgccgtgacccctgcagatagcaccggtctttgatccgcagcaggggccagaccctgcccacaagtcccagcgcggctgcttctgccactgctgggctccacttggctcctctcacttcccagggggtcgcctgtcctgcctgtgggtttccatggcttcccagagctccctctgccccagccagcgcctccaggcccagctgaggagctgtgagaagcagcagaggggactccccatcccgggcacaccctgtcctcccacccctgcccccttgcccttccagccctttcagctgcagctgggagctggcccgtcaagtgctgcccctgcctgtgtctgggtttctgttggctgtttttcttttcttgagtggtgatttttctctaaataaaagaagtcaagcactga

SEQ ID NO: 21232 - DNA, 4756 bp, Homo sapiens
  source 1..4756: mol_type = unassigned DNA
ccgtgagttctgcccaggccctgtgagctcaccagagccacagactcacagcccagaggtggcttcttccttcaggaactgaagaacccccatgaacaccaacatctccaggttctgagaacagaacctgggaaattgatgacttcctcatgatgaccgatactcaggatggccctagcgagagctcccagatcatgaggaagaaggcctgaacgacatacaggagatgatcaaaacggagaagtcctaccctgagcgtcgcctgcggggcgtcctggaggagctgagctgtggctgctgccgcttcctctccctcgctgacaaggaccagggccactcatcccgcaccaggcttgaccgggagcgcctcaagtcctgcatgagggagctggaaaacatggggcagcaggccaggatgctgcgggcccaggtgaagcggcacacggtgcgggacaagctgaggctgtgccagaacttcctgcagaagctgcgcttcctggcggacgagccccagcacagcattcccgacatcttcatctggatgatgagcaacaacaagcgtgtcgcctatgcccgtgtgccctccaaggacctgctcttctccatcgtggaggaggagactggcaaggactgcgccaaggtcaagacgctcttccttaagctgccagggaagcggggcttcggctcggcaggctggacagtgcaggccaaggtggagctgtacctgtggctgggcctcagcaaacagcgcaaggagttcctgtgcggcctgccctgtggcttccaggaggtcaaggcagcccagggcctgggcctgcatgccttcccacccgtcagcctggtctacaccaagaagcaggcgttccagctccgagcgcacatgtaccaggcccgcagcctctttgccgccgacagcagcggactctcagacccctttgcccgcgtcttcttcatcaatcagagtcagtgcacagaggtgctgaatgagaccctgtgtcccacctgggaccagatgctggtgttcgacaacctggagctctatggtgaagctcatgagctgagggacgatccgcccatcattgtcattgaaatctatgaccaggattccatgggcaaagctgacttcatgggccggaccttcgccaaacccctggtgaagatggcagacgaggcgtactgcccaccccgcttcccacctcagctcgagtactaccagatctaccgtggcaacgccacagctggagacctgctggcggccttcgagctgctgcagattggaccagcagggaaggctgacctgccccccatcaatggcccggtggacgtggaccgaggtcccatcatgcccgtgcccatgggcatccggcccgtgctcagcaagtaccgagtggaggtgctgttctggggcctacgggacctaaagcgggtgaacctggcccaggtggaccggccacgggtggacatcgagtgtgcagggaagggggtgcagtcgtccctgatccacaattataagaagaaccccaacttcaacaccctcgtcaagtggtttgaagtggacctcccagagaacgagctgctgcacccgcccttgaacatccgtgtggtggactgccgggccttcggtcgctacacactggtgggctcccatgccgtcagctccctgcgacgcttcatctaccggcccccagaccgctcggcccccagctggaacaccacgggggaggttgtggtgactatggagccagaggtacccatcaagaaactggagaccatggtgaagctggacgcgacttctgaagctgttgtcaaggtggatgtggctgaggaggagaaggagaagaagaagaagaagaagggcactgcggaggagccagaggaggaggagccagacgagagcatgctggactggtggtccaagtactttgcctccattgacaccatgaaggagcaacttcgacaacaagagccctctggaattgacttggaggagaaggaggaagtggacaataccgagggcctgaaggggtcaatgaagggcaaggagaaggcaagggctgccaaagaggagaagaagaagaaaactcagagctctggctctggccaggggtccgaggcccccgagaagaagaaacccaagattgatgagcttaaggtataccccaaagagctggagtccgagtttgataactttgaggactggctgcacactttcaacttgcttcggggcaagaccggggatgatgaggatggctccaccgaggaggagcgcattgtgggacgcttcaagggctccctctgcgtgtacaaagtgccactcccagaggacgtgtcccgggaagccggctacgactccacctacggcatgttccagggcatcccgagcaatgaccccatcaatgtgctggtccgagtctatgtggtccgggccacggacctgcaccctgctgacatcaacggcaaagctgacccctacatcgccatccggctaggcaagactgacatccgcgacaaggagaactacatctccaagcagctcaaccctgtctttgggaagtcctttgacatcgaggcctccttccccatggaatccatgctgacggtggctgtgtatgactgggacctggtgggcactgatgacctcattggggaaaccaagatcgacctggagaaccgcttctacagcaagcaccgcgccacctgcggcatcgcccagacctactccacacatggctacaatatctggcgggaccccatgaagcccagccagatcctgacccgcctctgcaaagacggcaaagtggacggcccccactttgggccccctgggagagtgaaggtggccaaccgcgtcttcactgggccctctgagattgaggacgagaacggtcagaggaagcccacagacgagcatgtggcgctgttggccctgaggcactgggaggacatcccccgcgcaggctgccgcctggtgccagagcatgtggagacgaggccgctgctcaaccccgacaagccgggcatcgagcagggccgcctggagctgtgggtggacatgttccccatggacatgccagcccctgggacgcctctggacatctcacctcggaagcccaagaagtacgagctgcgggtcatcatctggaacacagatgaggtggtcttggaggacgacgacttcttcacaggggagaagtccagtgacatcttcgtgagggggtggctgaagggccagcaggaggacaagcaggacacagacgtccactaccactccctcactggcgagggcaacttcaactggcgctacctgttccccttcgactacctggcggcggaggagaagatcgtcatctccaagaaggagtccatgttctcctgggacgagaccgagtacaagatccccgcgcggctcaccctgcagatctgggatgcggaccacttctccgctgacgacttcctgggggccatcgagctggacctgaaccggttcccgcggggcgcaaagacagccaagcagtgcaccatggagatggccaccggggaggtggacgtgcccctcgtgtccatcttcaagcaaaagcgcgtcaaaggctggtggcccctcctggcccgcaatgagaacgatgagtttgagctcacgggcaaggtggaggctgagctgcatttactgacagcagaggaggcagagaagaacccagtgggcctggcccgcaatgaacctgaccccctagagaaacccaaccggcccgacacggccttcgtctggttcctcaaccctctcaagtccatcaagtacctcatctgcacccggtacaagtggctcatcatcaagatcgtgctggcgctgttggggctgctcatgttggggctcttcctctacagcctccctggctacatggtcaaaaagctccttggggcatgaaggccgccagctcccgccagccgctccccagccctgccgcatttcctttcagtggcttggactctttcccatctcccctggggagcctgaggagcccagcgtccactcttcatgccttgggccgagcctgcctcctgcttgcgggggccgcctgtcctcactgccccaggctgcggcttgcccagtcccgcccctctgacccctgcctgtgggctggggagccttggatggggtggggacctggaatgggtctctcttgccccacctggctgaggcgccacccttcttcaggcccaggctccagaggaagactcctgaaaccctccccaggtcttccaagtacaggattgaagctttagtgaaattaaccaaggaccatgggtcagtgcccagggctttaaaaagaatgaacgagcaaaaggtatccccgccgtgacccctgcagatagcaccggtctttgatccgcagcaggggccagaccctgcccacaagtcccagcgcggctgcttctgccactgctgggctccacttggctcctctcacttcccagggggtcgcctgtcctgcctgtgggtttccatggcttcccagagctccctctgccccagccagcgcctccaggcccagctgaggagctgtgagaagcagcagaggggactccccatcccgggcacaccctgtcctcccacccctgcccccttgcccttccagccctttcagctgcagctgggagctggcccgtcaagtgctgcccctgcctgtgtctgggtttctgttggctgtttttcttttcttgagtggtgatttttctctaaataaaagaagtcaagcactga

SEQ ID NO: 21233 - DNA, 231 bp, Homo sapiens
  source 1..231: mol_type = unassigned DNA
gaggcagagaagaacccagtgggcctggcccgcaatgaacctgaccccctagagaaacccaaccggcccgacacggccttcgtctggttcctcaaccctctcaagtccatcaagtacctcatctgcacccggtacaagtggctcatcatcaagatcgtgctggcgctgggctgctcatgttggggccctctacagcctccctggctacatggtcaaaaagctccttggggc

SEQ ID NO: 21234 - DNA, 340 bp, Homo sapiens
  source 1..340: mol_type = unassigned DNA
ggacttcctgggagatgagtctcttcaagaggaagagaaggacagccaagagacggatggactgctcccaggctcccggcccagctcccggcccccaggagagaagagcttccggagcaaaggcagagagaagaccaagggaggcagagatgacgagcacaaagccgggaggagcgtgttctccgccatgaagctcggcaaaaaccggtctcacaaggaggagccccaaagaccagatgaaccggcggtgctggagatggaagaccttgaccatctggccattcggctaggagatggactggatcccgactcggtgtctctagcctcagtcacagctctc

SEQ ID NO: 21235 - DNA, 5108 bp, Homo sapiens
  source 1..5108: mol_type = unassigned DNA
ccgtgagttctgcccaggccctgtgagctcaccagagccacagactcacagcccagaggtggcttcttccttcaggaactgaagaacccccatgaacaccaacatctccaggttctgagaacagaacctgggaaattgatgacttcctcatgatgaccgatactcaggatggccctagcgagagctcccagatcatgaggtccctcactcccctgatcaacagggaggaggcatttggggaggctggggaggcggggctgtggcccagcatcacccacactcctgattcacaggaagaaggcctgaacgacatacaggagatgatcaaaacggagaagtcctaccctgagcgtcgcctgcggggcgtcctggaggagctgagctgtggctgctgccgcttcctctccctcgctgacaaggaccagggccactcatcccgcaccaggcttgaccgggagcgcctcaagtcctgcatgagggagctggaaaacatggggcagcaggccaggatgctgcgggcccaggtgaagcggcacacggtgcgggacaagctgaggctgtgccagaacttcctgcagaagctgcgcttcctggcggacgagccccagcacagcattcccgacatcttcatctggatgatgagcaacaacaagcgtgtcgcctatgcccgtgtgccctccaaggacctgctcttctccatcgtggaggaggagactggcaaggactgcgccaaggtcaagacgctcttccttaagctgccagggaagcggggcttcggctcggcaggctggacagtgcaggccaaggtggagctgtacctgtggctgggcctcagcaaacagcgcaaggagttcctgtgcggcctgccctgtggcttccaggaggtcaaggcagcccagggcctgggcctgcatgccttcccacccgtcagcctggtctacaccaagaagcaggcgttccagctccgagcgcacatgtaccaggcccgcagcctctttgccgccgacagcagcggactctcagacccctttgcccgcgtcttcttcatcaatcagagtcagtgcacagaggtgctgaatgagaccctgtgtcccacctgggaccagatgctggtgttcgacaacctggagctctatggtgaagctcatgagctgagggacgatccgcccatcattgtcattgaaatctatgaccaggattccatgggcaaagctgacttcatgggccggaccttcgccaaacccctggtgaagatggcagacgaggcgtactgcccaccccgcttcccacctcagctcgagtactaccagatctaccgtggcaacgccacagctggagacctgctggcggccttcgagctgctgcagattggaccagcagggaaggctgacctgccccccatcaatggcccggtggacgtggaccgaggtcccatcatgcccgtgcccatgggcatccggcccgtgctcagcaagtaccgagtggaggtgctgttctggggcctacgggacctaaagcgggtgaacctggcccaggtggaccggccacgggtggacatcgagtgtgcagggaagggggtgcagtcgtccctgatccacaattataagaagaaccccaacttcaacaccctcgtcaagtggtttgaagtggacctcccagagaacgagctgctgcacccgcccttgaacatccgtgtggtggactgccgggccttcggtcgctacacactggtgggctcccatgccgtcagctccctgcgacgcttcatctaccggcccccagaccgctcggcccccagctggaacaccacggtcaggcttctccggcgctgccgtgtgctgtgcaatgggggctcctcctctcactccacaggggaggttgtggtgactatggagccagaggtacccatcaagaaactggagaccatggtgaagctggacgcgacttctgaagctgttgtcaaggtggatgtggctgaggaggagaaggagaagaagaagaagaagaagggcactgcggaggagccagaggaggaggagccagacgagagcatgctggactggtggtccaagtactttgcctccattgacaccatgaaggagcaacttcgacaacaagagccctctggaattgacttggaggagaaggaggaagtggacaataccgagggcctgaaggggtcaatgaagggcaaggagaaggcaagggctgccaaagaggagaagaagaagaaaactcagagctctggctctggccaggggtccgaggcccccgagaagaagaaacccaagattgatgagcttaaggtataccccaaagagctggagtccgagtttgataactttgaggactggctgcacactttcaacttgcttcggggcaagaccggggatgatgaggatggctccaccgaggaggagcgcattgtgggacgcttcaagggctccctctgcgtgtacaaagtgccactcccagaggacgtgtcccgggaagccggctacgactccacctacggcatgttccagggcatcccgagcaatgaccccatcaatgtgctggtccgagtctatgtggtccgggccacggacctgcaccctgctgacatcaacggcaaagctgacccctacatcgccatccggctaggcaagactgacatccgcgacaaggagaactacatctccaagcagctcaaccctgtctttgggaagtcctttgacatcgaggcctccttccccatggaatccatgctgacggtggctgtgtatgactgggacctggtgggcactgatgacctcattggggaaaccaagatcgacctggagaaccgcttctacagcaagcaccgcgccacctgcggcatcgcccagacctactccacacatggctacaatatctggcgggaccccatgaagcccagccagatcctgacccgcctctgcaaagacggcaaagtggacggcccccactttgggccccctgggagagtgaaggtggccaaccgcgtcttcactgggccctctgagattgaggacgagaacggtcagaggaagcccacagacgagcatgtggcgctgttggccctgaggcactgggaggacatcccccgcgcaggctgccgcctggtgccagagcatgtggagacgaggccgctgctcaaccccgacaagccgggcatcgagcagggccgcctggagctgtgggtggacatgttccccatggacatgccagcccctgggacgcctctggacatctcacctcggaagcccaagaagtacgagctgcgggtcatcatctggaacacagatgaggtggtcttggaggacgacgacttcttcacaggggagaagtccagtgacatcttcgtgagggggtggctgaagggccagcaggaggacaagcaggacacagacgtccactaccactccctcactggcgagggcaacttcaactggcgctacctgttccccttcgactacctggcggcggaggagaagatcgtcatctccaagaaggagtccatgttctcctgggacgagaccgagtacaagatccccgcgcggctcaccctgcagatctgggatgcggaccacttctccgctgacgacttcctgggggccatcgagctggacctgaaccggttcccgcggggcgcaaagacagccaagcagtgcaccatggagatggccaccggggaggtggacgtgcccctcgtgtccatcttcaagcaaaagcgcgtcaaaggctggtggcccctcctggcccgcaatgagaacgatgagtttgagctcacgggcaaggtggaggctgagctgcatttactgacagcagaggaggcagagaagaacccagtgggcctggcccgcaatgaacctgaccccctagagaaacccaaccggcccgacacgagcttcatctggttcctgaaccctctcaagtcggctcgctacttcttgtggcacacgtatcgctggctgctcctcaaactgttgctgctcctgctgctgctcctcctcctcgccctgttcctctactctgtgcctggctacctggtcaagaaaatcctcggggcctgagcccagtggcctcctggccggcccgacacggccttcgtctggttcctcaaccctctcaagtccatcaagtacctcatctgcacccggtacaagtggctcatcatcaagatcgtgctggcgctgttggggctgctcatgttggggctcttcctctacagcctccctggctacatggtcaaaaagctccttggggcatgaaggccgccagctcccgccagccgctccccagccctgccgcatttcctttcagtggcttggactctttcccatctcccctggggagcctgaggagcccagcgtccactcttcatgccttgggccgagcctgcctcctgcttgcgggggccgcctgtcctcactgccccaggctgcggcttgcccagtcccgcccctctgacccctgcctgtgggctggggagccttggatggggtggggacctggaatgggtctctcttgccccacctggctgaggcgccacccttcttcaggcccaggctccagaggaagactcctgaaaccctccccaggtcttccaagtacaggattgaagctttagtgaaattaaccaaggaccatgggtcagtgcccagggctttaaaaagaatgaacgagcaaaaggtatccccgccgtgacccctgcagatagcaccggtctttgatccgcagcaggggccagaccctgcccacaagtcccagcgcggctgcttctgccactgctgggctccacttggctcctctcacttcccagggggtcgcctgtcctgcctgtgggtttccatggcttcccagagctccctctgccccagccagcgcctccaggcccagctgaggagctgtgagaagcagcagaggggactccccatcccgggcacaccctgtcctcccacccctgcccccttgcccttccagccctttcagctgcagctgggagctggcccgtcaagtgctgcccctgcctgtgtctgggtttctgttggctgtttttcttttcttgagtggtgatttttctctaaataaaagaagtcaagcactga

SEQ ID NO: 21236 - DNA, 4992 bp, Homo sapiens
  source 1..4992: mol_type = unassigned DNA
aggagacttccgagcccgtctctccctccatcctccagctgctgcccctgtagcccaggagcccatactgaggccccagggcctccgctcccatcttcttctcttccagctgctgcctgcccagcaggccaggtcttcgtgaactgcagcgacctgcacacggacctggagctgagcagggagaggacgtgtgagcagcaactgctgaacctgagcgtgtcagcccgtggcccctgcctctcgggctgcgcctgtccccagggtctgctcagacacggggatgcatgtttcctgccagaggagtgcccctgcacttggaaggggaaggagtatttccctggggaccaggtgatgtctccttgccatacctgagcacatcagatgtcagcttctctgtgattgtagagaatgtgaactgctacagctctggcatgatctgcaggaaatttatttccatcaacgttgggaactcactcattgtctttgatgatgactccggaaatcctagtccagagagcttcctggatgacaagcaggaggtccacacatggcgagtgggatttttcacactggtgcatttcccacaggagcacatcaccctcttgtgggaccagagaaccacagtgcacgtccaggctgggcctcagtggcagggccagctggcgggcctctgtgggaactttgacttaaaaaccatcaatgagatgaggaccccggagaacctagagctaactaacccccaggagtttggcagcagttgggctgcagttgagtgcccagacaccctcgatcctcgggatatgtgtgtcctgaatcctctccgagaaccatttgccaagaaggagtgcagcatcctgctcagtgaggtgtttgagatctgccaccctgtggttgatgtcacttggttttactcaaactgcctgacagacacatgtggctgcagccagggtggtgactgtgagtgcttctgtgccagcgtctccgcttatgcccaccagtgttgccagcatggggtggctgttgactggcgaaccccccgcctctgcctgctaggtaagggcccctatcagctatccagcttggcagccggtggtgctctggtgggcatgaaggcggtgggcgatgacatagtcctagtgaggacagaggatgtggcgccagcagacattgtgagcttcctgctgacagctgctctgtacaaggccaaggcccatgacccagatgtggtgtccctggaggcagcagacagacccaacttcttccttcacgtcacagccaacgggtctctggagctggctaagtggcagggccgtgacaccttccaacagcatgcctccttcttgctgcaccgggggacacggcaggcaggcctggtggccctggagtccctggccaagcccagctccttcctctatgtgtcgggcgcggtgctggccctgcggctgtacgaacacacagaggtgttccgccggggcacactcttccgccttctggatgccaagccctcgggggctgcctaccccatctgcgagtggcgctacgatgcctgtgccagcccctgcttccaaacctgccgggacccacgggcagccagctgccgggacgtacccagggtagaaggctgtgtccctgtgtgccccaccccccaggtcctggatgaagtcacacagagatgtgtctacttggaggactgtgtggagccagcagtttgggttcccacagaggcccttggcaatgagaccctccctcccagtcaagggttgcccactcccagtgatgaggagccacagctgtcacaggaaagccccaggacccccacccacaggccagccctcaccccagctgccccactcaccacagccctgaacccaccagtgacagccactgaggagccagtggtgtctccaggccccacccagaccaccctgcagcagccactggagctcactgcatctcaactccccgccggccccacggagtccccagccagcaagggagtgactgccagcctcctggccatcccccatacaccagagtcctcatccctccctgttgcactgcagacacccacacctggcatggtgtcaggtgccatggagacaacaagggtgactgtgatctttgcaggaagccctaacatcacagtctcctcccggtcgccccctgcccctcgcttcccgctcatgaccaaggctgtgacagtccgaggccatggctccttgcctgttaggacgacacccccacagccctccttgacagcaagtccctcctccagacctgtggcttcccctggagccatctccaggtcccccacctcctcgggatcccacaaggctgtgctgacacctgcagtaactaaggtcataagcaggacaggggtcccccagcccacccaggcccagagtgcttcaagtcccagcacccctctaactgtggctggaacagcagcagaacaggttcctgtcagtccccttgcaaccaggagcttggagatagtgctatccacagagaagggcgaagccgggcacagccagcccatgggctcgcctgcctccccacagccacacccactcccctctgcaccaccccgcccagcccagcataccaccatggccaccaggtctccagctctgcccccagagaccccagctgccgccagcctgtcaacagccactgatgggctggcagccacacccttcatgtcccttgagtcaactcgtccctcccagctcctctctggcctgcctcccgacaccagcctgcccctggccaaggtgggcacatctgccccagtggccacacccggccccaaagcctctgtcatcaccactccactccagccacaggccacgactctgcctgctcagacacttagcccagtactgcctttcactccagcagcaatgacccaggcgcacccacccactcacatagcacccccagcagcaggcacagctccaggcctgctgctgggagccacattgccaacctctggagtcctgcctgtggctgagggcacggcctccatggtatctgttgtcccacgaaagagcaccacagggaaggtggccatcctatccaagcaagtgtctctgcccacttccatgtatggttctgcagagggtgggcccacagagctcacgcctgctacgagccaccctctcacgcccttggtggctgagcccgagggagcccaggcaggcacagctctgccagtgcccacatcctatgccctgagccgtgtctcagccaggacggccccccaagacagcatgctggttctgttgcctcagctggctgaggcccatggaacctcggcagggcctcacctggcagcagagccggtggacgaggccaccacagaaccatctgggcgctcagccccagccctgagcatcgtagagggtttggcggaggctttggcaactaccactgaggccaatacatccaccacctgtgttccaatcgccgagcaggactgcgtccgccacatctgcctggagggccagctgattcgcgtgaatcagtcccagcactgtccccagggtgctgctccccctcgctgtgggatcctgggcctcgccgtgcgggtgggtggggaccgctgctgcccactctgggagtgtgcctgccggtgctcaatcttccctgacctgagcttcgtgaccttcgatgggagccacgtagctctgttcaaggaggccatctacatcctcagccagagcccagatgaaatgctcaccgtccatgtactggactgcaaaagtgccaacctggggcacctgaactggcccccgttctgtctggtgatgttgaacatgactcacttggcccatcaggtcactattgatcgcttcaaccgaaaggtgactgtggacttgcagcctgtgtggccaccggtgagcaggtatggattcagaattgaggacacaggccacatgtacatgatcctgactccctcagacatccagatccagtggctccacagctcaggactcatgatcgtggaggccagcaaaaccagcaaggcccagggccatggcctgtgcggtatctgtgatggagatgcagccaatgaccttaccctgaaggatggctcagtggtgggtggggctgaggaccctgctccctttctggacagctggcaggtgcccagctccctgacctcagtgggccagacccgcttccgcccagacagctgcgccacaactgactgctcgccctgccttcgcatggtgtccaaccgcaccttcagtgcctgccaccgctttgtgcctccggagtcattctgtgagctgtggatccgggacaccaagtacgtgcagcagccctgcgtggccctgactgtgtacgtggccatgtgccacaaatttcatgtgtgcatcgagtggcggcgctctgactactgccccttcctgtgctccagcgactccacataccaggcatgtgtgacagcctgtgagccacccaagacatgccaggatgggatactagggcctctggacccagagcactgccaggtgctgggcgagggctgcgtctgctccgagggcaccatcttacaccggcgccactctgcactctgcatcccggaggccaagtgcgcctgtggtgactgtccagactccatccccgaatgtcaagaaggggaggcgctcactgtgcacaggaataccacggaactctgctgccctctgtaccagtgtgtgtgtgagaacttccgctgtccccaagtgcagtgtggcctgggcactgccctggtggaggtgtggagccccgaccgctgctgcccctacaaatcctgtggataaaagaaggaaaaagcaagtttcccattccaaagagggtttccgtcttaaaaagtccttactgcggccgggcacggtggctcacacctgtaatcccagcactttgagaggccaaggcgggtggatcatgaggtcaggagttcaagaccagcctggccaagacggtgaaaccctgtgtctactg

SEQ ID NO: 21237 - DNA, 8778 bp, Homo sapiens
  source 1..8778: mol_type = unassigned DNA
atgggagtcctggcgtctgcgctctgctggctgctttgtgtctggctgccctggggtgagcaggcagccgagtccctgcgggtgcagcgcctcggtgagagggttgtggactcagggaggtcgggggctcgaggaatgagaaacgttaaaggaatgaggaatgggcccgcgcagactcgtgtttcctccagcagcagccaccaggaggcgacccttgccatgggggacaaggctacagtcgtgggaggccagcaggctgaagccccagactccgtggccatgtcttcctgggaaaggcggctccatcgggccaagtgtgcaccatcctacttgttctcctgcttcaatggaggcgagtgtgtgcacccagccttctgtgactgcagacgcttcaatgccactggaccgcgctgccagatggtgtacaatgccggccctgagagggacagcatttgccgggcgtgggggcagcaccacgtggagacatttgatgggctctactactacctctccggaaagggcagctacaccctggtgggtcgccatgagcccgagggacagagcttctccatccaggtacacaatgacccgcagtgtggctcttcaccctacacctgctccagggctgtcagcctcttctttgtgggtgagcaggagatccatctggccaaggaggtcacccatggaggcatgagggtccaactgccacatgtcatggggagcgcgcgtctgcagcagcttgccggctatgtcatcgtgcggcatcagtcagccttcacactggcctgggatggtgcctcggctgtctacatcaagatgagtccagagcttctgggctggacccatgggctgtgtgggaacaacaatgctgaccccaaggatgatctggtgaccagctctgggaagctgactgacgacgtggttgagtttgtgcacagctggcaggagcaggcccctaaccagcctccagggcccacaacttcctccctgcctcgcccaccgtgcctacagcagaacccaggaaccatgcagggcgtgtacgagcagtgtgaggctctactgcggcccccctttgacgcctgccacgcctacgtcagccctctgcccttcacagccagttgtaccagtgatctctgccaatcaatgggtgatgtagccacctggtgccgggcactggcggagtatgcccgggcgtgtgcccaggcagggcggcccttgcaaggctggaggacccagctccggcaatgcactgtgcactgcaaggagaaggcctttacctacaatgagtgcatcgcctgctgccctgcctcctgccatccccgggcatcctgtgtggacagtgagatcgcctgtgtggacggctgctattgccccaatgggctcatcttcgaggatgggggctgcgtggcaccagctgagtgtccctgtgagtttcacgggactctgtacccacctggctctgtggtgaaggaagactgcaatacttgcacatgcacctcaggcaagtgggagtgcagcacagctgtctgcccagctgagtgctcagtgactggtgacattcacttcacaacctttgatggccgccggtacacgttccccgccacatgtcagtacatcctggccaagagccgctcttcgggcaccttcaccgtgacattgcagaatgccccatgtggcctgaaccaagatggagcctgtgtccagtcagtgtcagtgattctgcaccaggaccctcggaggcaggtgaccctgacccaggcaggggatgtccttctgtttgaccagtacaagatcatcccgccatacacagatgatgcctttgagatccgtaggctgtcctccgtgttcctgcgggtgaggacgaacgtgggcgtgcgggtgctctacgaccgtgaagggctccgactgtacctgcaagtggaccagcgatgggtggaggataccgtgggcctctgcggcaccttcaatggcaacacgcaggatgacttcctgtctccagtgggtgtacctgagagcaccccacaactttttggcaattcctggaaaacactttctgcttgctccccgctggtctctggctcccctctggacccctgcgatgtgcacctgcaagccgcctcctactcagtgcaggcctgcagcgtgctcacgggggagatgtttgcgccctgctctgcgttcctgagccccgtgccctactttgagcagtgccgcagggatgcctgccgctgcgggcagccctgcctgtgcgccacactggcccactacgcccacctgtgccggcgccatgggctccccgttgatttccgcgcccgcctgccagcctgtgcactgtcctgtgaggcctccaaggagtatagcccctgcgtggccccgtgtggacgtacctgccaggacctggccagccctgaggcctgtggggttgatggtggcgatgacctgagcagagacgagtgtgtggagggctgtgcctgcccaccggacacctatctggacacccaggctgacctctgtgtcccccggaaccagtgctcctgccacttccagggagtggactatccccccggagacagtgacatcccatccctgggccactgccactgcaaagatggagtcatgagctgtgatagcagagccccagctgctgcctgcccagcaggccaggtcttcgtgaactgcagcgacctgcacacggacctggagctgagcagggagaggacgtgtgagcagcaactgctgaacctgagcgtgtcagcccgtggcccctgcctctcgggctgcgcctgtccccagggtctgctcagacacggggatgcatgtttcctgccagaggagtgcccctgcacttggaaggggaaggagtatttccctggggaccaggtgatgtctccttgccatacctgtgtgtgccagcggggctcattccagtgcaccctgcacccttgcgcctccacctgcactgcctatggggaccggcattaccgcacgtttgatgggctcccgtttgacttcgtgggggcatgcaaagtgcacctggtcaagagcacatcagatgtcagcttctctgtgattgtagagaatgtgaactgctacagctctggcatgatctgcaggaaatttatttccatcaacgttgggaactcactcattgtctttgatgatgactccggaaatcctagtccagagagcttcctggatgacaagcaggaggtccacacatggcgagtgggatttttcacactggtgcatttcccacaggagcacatcaccctcttgtgggaccagagaaccacagtgcacgtccaggctgggcctcagtggcagggccagctggcgggcctctgtgggaactttgacttaaaaaccatcaatgagatgaggaccccggagaacctagagctaactaacccccaggagtttggcagcagttgggctgcagttgagtgcccagacaccctcgatcctcgggatatgtgtgtcctgaatcctctccgagaaccatttgccaagaaggagtgcagcatcctgctcagtgaggtgtttgagatctgccaccctgtggttgatgtcacttggttttactcaaactgcctgacagacacatgtggctgcagccagggtggtgactgtgagtgcttctgtgccagcgtctccgcttatgcccaccagtgttgccagcatggggtggctgttgactggcgaaccccccgcctctgcccgtatgactgtgacttctttaacaaagtgctaggtaagggcccctatcagctatccagcttggcagccggtggtgctctggtgggcatgaaggcggtgggcgatgacatagtcctagtgaggacagaggatgtggcgccagcagacattgtgagcttcctgctgacagctgctctgtacaaggccaaggcccatgacccagatgtggtgtccctggaggcagcagacagacccaacttcttccttcacgtcacagccaacgggtctctggagctggctaagtggcagggccgtgacaccttccaacagcatgcctccttcttgctgcaccgggggacacggcaggcaggcctggtggccctggagtccctggccaagcccagctccttcctctatgtgtcgggcgcggtgctggccctgcggctgtacgaacacacagaggtgttccgccggggcacactcttccgccttctggatgccaagccctcgggggctgcctaccccatctgcgagtggcgctacgatgcctgtgccagcccctgcttccaaacctgccgggacccacgggcagccagctgccgggacgtacccagggtagaaggctgtgtccctgtgtgccccaccccccaggtcctggatgaagtcacacagagatgtgtctacttggaggactgtgtggagccagcagtttgggttcccacagaggcccttggcaatgagaccctccctcccagtcaagggttgcccactcccagtgatgaggagccacagctgtcacaggaaagccccaggacccccacccacaggccagccctcaccccagctgccccactcaccacagccctgaacccaccagtgacagccactgaggagccagtggtgtctccaggccccacccagaccaccctgcagcagccactggagctcactgcatctcaactccccgccggccccacggagtccccagccagcaagggagtgactgccagcctcctggccatcccccatacaccagagtcctcatccctccctgttgcactgcagacacccacacctggcatggtgtcaggtgccatggagacaacaagggtgactgtgatctttgcaggaagccctaacatcacagtctcctcccggtcgccccctgcccctcgcttcccgctcatgaccaaggctgtgacagtccgaggccatggctccttgcctgttaggacgacacccccacagccctccttgacagcaagtccctcctccagacctgtggcttcccctggagccatctccaggtcccccacctcctcgggatcccacaaggctgtgctgacacctgcagtaactaaggtcataagcaggacaggggtcccccagcccacccaggcccagagtgcttcaagtcccagcacccctctaactgtggctggaacagcagcagaacaggttcctgtcagtccccttgcaaccaggagcttggagatagtgctatccacagagaagggcgaagccgggcacagccagcccatgggctcgcctgcctccccacagccacacccactcccctctgcaccaccccgcccagcccagcataccaccatggccaccaggtctccagctctgcccccagagaccccagctgccgccagcctgtcaacagccactgatgggctggcagccacacccttcatgtcccttgagtcaactcgtccctcccagctcctctctggcctgcctcccgacaccagcctgcccctggccaaggtgggcacatctgccccagtggccacacccggccccaaagcctctgtcatcaccactccactccagccacaggccacgactctgcctgctcagacacttagcccagtactgcctttcactccagcagcaatgacccaggcgcacccacccactcacatagcacccccagcagcaggcacagctccaggcctgctgctgggagccacattgccaacctctggagtcctgcctgtggctgagggcacggcctccatggtatctgttgtcccacgaaagagcaccacagggaaggtggccatcctatccaagcaagtgtctctgcccacttccatgtatggttctgcagagggtgggcccacagagctcacgcctgctacgagccaccctctcacgcccttggtggctgagcccgagggagcccaggcaggcacagctctgccagtgcccacatcctatgccctgagccgtgtctcagccaggacggccccccaagacagcatgctggttctgttgcctcagctggctgaggcccatggaacctcggcagggcctcacctggcagcagagccggtggacgaggccaccacagaaccatctgggcgctcagccccagccctgagcatcgtagagggtttggcggaggctttggcaactaccactgaggccaatacatccaccacctgtgttccaatcgccgagcaggactgcgtccgccacatctgcctggagggccagctgattcgcgtgaatcagtcccagcactgtccccagggtgctgctccccctcgctgtgggatcctgggcctcgccgtgcgggtgggtggggaccgctgctgcccactctgggagtgtgcctgccggtgctcaatcttccctgacctgagcttcgtgaccttcgatgggagccacgtagctctgttcaaggaggccatctacatcctcagccagagcccagatgaaatgctcaccgtccatgtactggactgcaaaagtgccaacctggggcacctgaactggcccccgttctgtctggtgatgttgaacatgactcacttggcccatcaggtcactattgatcgcttcaaccgaaaggtgactgtggacttgcagcctgtgtggccaccggtgagcaggtatggattcagaattgaggacacaggccacatgtacatgatcctgactccctcagacatccagatccagtggctccacagctcaggactcatgatcgtggaggccagcaaaaccagcaaggcccagggccatggcctgtgcggtatctgtgatggagatgcagccaatgaccttaccctgaaggatggctcagtggtgggtggggctgaggaccctgctccctttctggacagctggcaggtgcccagctccctgacctcagtgggccagacccgcttccgcccagacagctgcgccacaactgactgctcgccctgccttcgcatggtgtccaaccgcaccttcagtgcctgccaccgctttgtgcctccggagtcattctgtgagctgtggatccgggacaccaagtacgtgcagcagccctgcgtggccctgactgtgtacgtggccatgtgccacaaatttcatgtgtgcatcgagtggcggcgctctgactactgccccttcctgtgctccagcgactccacataccaggcatgtgtgacagcctgtgagccacccaagacatgccaggatgggatactagggcctctggacccagagcactgccaggtgctgggcgagggctgcgtctgctccgagggcaccatcttacaccggcgccactctgcactctgcatcccggaggccaagtgcgcctgcactgacagcatgggggtgccgagggccctgggggagacctggaacagctccctcagcggctgctgccagcaccagtgccaagccccagacaccattgtcccggtggatctgggctgccccagtccccgccctgagagctgcctgcgattcggggaggtggccttgctcctacccaccaaggacccctgctgcctggggactgtctgtgtgtgtaaccagactctgtgtgagggtctcgcccccacatgccgcccaggccaccgcctcctcacccacttccaggaggactcctgctgccccagctacagctgtgagtgtgacccagatctctgtgaggcagagctggtccccagctgccgacaggaccagatcctgatcacgggccgcctgggggactcctgctgcacctcctacttctgcgcctgtggtgactgtccagactccatccccgaatgtcaagaaggggaggcgctcactgtgcacaggaataccacggaactctgctgccctctgtaccagtgtgtgtgtgagaacttccgctgtccccaagtgcagtgtggcctgggcactgccctggtggaggtgtggagccccgaccgctgctgcccctacaaatcctgtgaatgtgactgtgacacaatcccggtgccccggtgccatctgtgggagaaatcccagctggatgaggagttcatgcacagcgtggagaatgtgtgtggctgcgccaagtacgagtgtgtgaaggccccggtgtgtctgagccgcgagctgggtgtgatgcagcccggccagacagtggtggagctctcagcagatggcgtgtgccacacctcccgctgcaccaccgtgctcgaccctctcaccaacttctaccagatcaacaccacctccgtgctctgtgacatccactgtgaggcgaaccaggagtacgagcacccgcgggacctcgctgcctgctgcggctcctgcaggaacgtgtcctgtctcttcaccttccccaatggcaccacctccctgttcttgcccggggcatcctggatcgcagactgcgcccgccaccactgcagcagcacgcccctgggtgccgtgctggtccgctctcccataagctgcccaccgctcaatgagactgagtgtgccaaggttgggggttccgtggtaccttccttggaaggatgctgcaggacctgtaaggaggatgggcgctcctgcaagaaggtgaccatccgcatgaccatccgcaagaatgaatgcaggagcagcacccctgtgaacctagtgtcctgcgatgggaggtgcccatccgccagcatctacaactacaacatcaacacctatgcccgattctgcaagtgctgccgtgaggtgggcctgcagcggcgctctgtgcagctcttctgtgccaccaatgccacctgggtgccctatacagtgcaggagcccaccgactgtgcctgccagtggtcctga

SEQ ID NO: 21238 - DNA, 1477 bp, Homo sapiens
  source 1..1477: mol_type = unassigned DNA
ccccgcttccagtcagagttcaagttaaaacagaaaaaaggaagatggcaagaatattgttacttttcctcccgggtcttgtggctgtatgtgctgtgcatggaatatttatggaccgtctagcttccaagaagctctgtgcagatgatgagtgtgtctatactatttctctggctagtgctcaagaagattataatgccccggactgtagattcattaacgttaaaaaagggcagcagatctatgtgtactcaaagctggtaaaagaaaatggagctggagaattttgggctggcagtgtttatggtgatggccaggacgagatgggagtcgtgggttatttccccaggaacttggtcaaggaacagcgtgtgtaccaggaagctaccaaggaagttcccaccacggatattgacttcttctgcgagtaataaattagttaaaactgcaaatagaaagaaaacaccaaaaataaagaaaagagcaaaagtggccaaaaaatgcatgtctgtaattttggactgacgttttaagaatttgttaccttacagaagagcaagggcttaggggttggaggtggcagataaaagaggattttcaactcaaatcttgtttcctgctggcctggtctgcccacgagctagagcggggaaatgttgagctcaaatgggtaaattgagaccagaaaattattttttcaacctagagaatctcctcttacagggggatgcatataacagatcatgtatgtgtagttatttctaagtagtaattcttcccagctctttgatttgccatatataaaataggtgggtcgtatgtcttccctttagacatgatgttttctactcatttgtctctctggccaattgaattattaataaaaggtctgtattatcaaagagtattctagtatttttgttacttttaatatttgatgccttttggaggtaaagctgttgggggaagaagagtttttggacccatagatgtttggatgatgtctctaatttgtcatttagaaaaatctcaaaaatgatttcagttgaataacttgccttctaaatgatcaatttacttctcccccaattttaaagaagtatgtgtatatttaataggggaaggtagtttatggaaatatttttaatggaatagttttcccttaatatgtatccttgctggatattattcaagctgcaagtcatcaaaagacccagaaaaaaaaaagtctgtaggttattttctctacttctatttcaactttgaatttcctcttcctgtgcaaattcctctagtcaagtgtgatatatcaagaaatctgaggaggatgcaggttttgtggtcctgatgggcccacaagtttttctatatttaactggaaatatgctttgattttgtgttattaatataattcttttgatgtagtcatgagtttttctttgtttgcatataattaaaatgcctctacttaatgtca

SEQ ID NO: 21239 - DNA, 3111 bp, Homo sapiens
  source 1..3111: mol_type = unassigned DNA
aggaatttggccgggacccgggcgctattcgcggctgctgactcgcggcggccggctgcctttcgctcatctctattctggggccgttgggtcaccgcgctccgccggccccctcccccgggcccggagggtgtgtcccccgctccggggctcgccgcgcctataaggggccgagcggcgggcagggacatgcagctctacagcagcgtctgcacccactaccccgccggggccccgggtcccacggccgccgcccccgcgccacccgccgccgctacccccttcaaggtctcgctgcagcccccgggagccgccggcgccgcgcccgagcccgagaccggtgagtgccagcccgccgcggccgccgagcaccgggaagccgccgctgtccccgccgccaagatgcccgccttctcctcctgcttcgaggtggtgtccggggccgccgcgcccgcctccgccgccgccggcccgcccggcgcgtcctgcaagccgccgctgccgccgcactacacgtccaccgcacagatcaccgtgcgggccctgggcgccgacaggctcctgctgcacgggcccgatcccgttcccggcgccgcgggctccgccgctgccccgcgcggccgctgcctcctgctcgccccggcgcccgcagccccggtcccgccgcggcggggctcctcggcctggctcctggaggagctgctgcggcccgactgccccgagcccgcgggcttggacgcgacacgggaggggcccgatcggaacttccgactgagcgagcaccgccaggccctggccgccgccaagcaccgaggccccgcggcgaccccggggagccccgatcccggccccggtccgtggggcgaagagcacttggcggagaggggccccaggggctgggagaggggcggcgatcgctgcgacgcgcccggtggggacgcggcgcggaggcccgacccagaggccgaggcaccccccgccgggagcatcgaggccgccccgagtagtgcggcggagccggtgatcgtctccaggtcggatcccagagacgagaagctggccctatacctggccgaggtggagaagcaggacaagtatctgcggcagaggaataagtaccgattccacatcattccagacggcaactgcctctaccgagctgtcagcaagacggtgtatggggaccagagcctgcaccgggagttgagggagcagacggtgcactacatcgccgaccatctcgaccacttcagccccctgattgagggcgacgtgggggagtttatcatcgctgctgcccaagacggggcatgggccgggtacccggagttgctggccatggggcagatgctgaatgtgaatatccatttaactactggagggaggctggagagtcccacggtgtctaccatgattcattatttgggcccagaggattccctgaggcctagtatttggctcagttggctcagtaacggacactatgatgctgtatttgatcactcctatcctaacccagagtacgacaactggtgcaaacaaactcaagtgcaaaggaaacgcgacgaagaacttgccaaatctatggccatatccttgtctaaaatgtatattgaacaaaatgcatgctcttgaaatgtctcaaaaccttacaccctgggaataattgcatatataacttgtgtttggagaatcacatgaactttaatcagggtaatagcactttcaaacttgctagtagattttactgtaggtgtaatgccttaatcatctttttgaatgttttctcagagctggaggttgctgggcacctaaatgatgtttcatgatagctttgggtgattttactgctatttataatttgctgtataaagtgagcattacttaatttgcaagctgatttctcacagtgtaaatttgttcattcctggtagtctattttctataaaaatgtatttttgcacaacatttttaaaaactggtgtaccttcatctatgacgtgttccattttgacaaacagctttcaggcgtaaatccagagaagtgctttatatgaaatgtattattttgaacagagtttgtgatttggtagttattttatgttgttgaaatttgaatttcacaattcttagataattatttcaaatggatattgatgcattcttgttaccagatgtttggcccattccattttgatgaaacagagctgttgttttggaagtcattatttttctagaaatggcgaatcttttaaagaaaattacttaatggaaggttgtgggaaggtgtttttttgtgttttttttttggtttttgttttgtttttcctcttttaagggatagtagcaggtcttacttgaatgaaagtctgatatttgctgatggcagaatgattattctgtaccctggttgatgtgtagagtagattgtctggtgctctcagttgtttttatttacatttgtcacgttgttgtaagagaatgttaacatggtataaaactctgtgacaagataagcctcctgctttatataacttcttgaatccagctaagagatttataaactaatggcataaatgtctggagccaaccttggcagttatagcaggagaacactgtcttaatatttctttacattctttcaaaaggcaaaataggattgccctgtattgatgtagaaatgtctgtaaacagagcttgtatggtttgctgggtcaaacaatgtttccaacttaaaatcaatctcattgccactttaactacttttagtcatatttattaagtaatgcagtttgtactttttttattttgtaacattttgtgatttttttgtacaaaactgtatttgtacaatagagcaattcccagctgatggaatgaatgaataaaatgcaaaattatacttttacaatgcctttttggatagagtggtttttaaattgtgatgtttgtaggaaactttcttgcatgtatgcatgtacacaattttttttttccataaagatgccacagcaatagagaggtttcctaaattatcacatgaagaggataggctaatcatgagtaatttcaaaggataagtctgaataaaatataatttaaaagtggagt

SEQ ID NO: 21240 - DNA, 6397 bp, Homo sapiens
  source 1..6397: mol_type = unassigned DNA
catgtcccgaaagcaggcggcgaagagccggccgggcagcggcagccggaaagccgaggccgagcgcaagcgggacgagcgggcggcgcgccgggccctggccaaggagcggcggaatcggccggagtctggcggcggcggcggctgcgaggaggagttcgtcagcttcgccaaccagctgcaggccctggggctgaagctgcgggaggtgccgggggacggcaattgcttgttcagagctcttggtgatcaattggagggacactcacgaaatcatctcaagcacagacaggagacagtggactacatgataaagcagcgggaagattttgaaccctttgtagaagatgacattccttttgagaagcatgtggccagtttggcaaagcctggtacttttgctggcaatgatgcaattgtagcctttgcaagaaatcatcagttgaatgtagtgattcatcaacttaatgcccctttgtggcagattcgtggtacagagaaaagcagcgtgagggagttacacatcgcatatcggtatggagagcactacgacagtgttcggaggatcaatgacaactcagaggcacctgcacatctccagacggattttcagatgcttcatcaagatgaatcaaataaaagagaaaagatcaagacaaagggaatggactctgaagacgacctgagagatgaagtagaggatgctgtccagaaagtttgtaatgcaactggatgttcagattttaatttaatagtccagaacctggaagctgaaaattataatattgaatctgcaataattgccgtgcttcggatgaaccaagggaagagaaataatgcagaagagaatcttgagcccagtggtcgagtgctgaagcagtgtggccctttgtgggaggagggtggcagtggtgccagaatctttggaaatcagggcttaaatgaaggcaggaccgaaaacaataaggcacaggccagccctagtgaagaaaacaaagcaaataaaaaccagctcgcaaaggtcacaaacaaacagaggcgagaacagcagtggatggagaagaagaagcggcaggaggagaggcaccgccacaaagccctggagagcagaggtagccacagggacaataacagaagcgaagcagaggcgaacacgcaggtcaccttggtgaagaccttcgccgctctcaacatctgactctttggcctcttgggagttgtaagaagcggctggaaaaggattgctgtgtgctagactttccagtgaggccgtccttttataaaacgcaacacaaccaacgaagcccacacatgagctcacacactgagttagtttcgttcaagctgcctctttttttgttcgaagttttattagtgatatgttggtgttttatgaaaatgcagtgaggccattcatattctgtaatacaaaattaaaatactgagttttaggggcagatagttaggtcaggaaaaaccttttaagtggtggctttatttgccctgaaaatcagacttcagtgaccctaggatctttccttaacatttggggtgagttttgctgtaattgttcatgagtagtttagaataattgttagaaattcagaatgacaagtttccttagtttctctttcattctcaaacagatatatagggtagcttataaatgatctccaactcaggaatatgctttgatttacttctaatccaagttactcagaaaataattcaggaattgttttcccaaagttacgtgagggttgtggcctgcagtcaggatggaaattaaccgcatttctctccttcctgattctgatgttatttcagatgggatgcaggtgctgttagttcatttgcactcaagccatatgataaatgcagctgactgttaattaggcctggccttgttgggaagttgatagtggtgttgggtttttggtatttgtttcctgacagtggggagatggcatgttactgcttgtgatacagttctggaattctgatagtgtgtagagcagggtctatagttgtaacaggagacgaactcctggggttttgcctaagaggagtctaaagaattatgtttttataggagaagcctggaagaataaggtttttcatgttcgcattttaaataacgattttcttcccttctgttgtagacttagatgccttcagagagatacgtggtaacttgaccttataggtcgctaaacttagtattgtggaaattaaatcttataaaatgctacatttatttctttttatttaagccctgtttggcatttcaaagttgggaaaactccagcatctgctggaagttgttggaccagcagggttggttgacttaggttggaccagcagagaagagaacatactttggttgaggccttcgaatcactcttcagttctgaaatagacagacttgagcagtggagagacgtctttcctaaaactgagttaggtggatgtgaacttaagaactataacgtatgaggcagcccatcttggatcatctttgtcttttgggacctaatacttgggcaaataattgatgctgagttgaaaggtaaattattagttatcttccccacccctcgcatttcagaattataaaaattcggaggcaaattgaaaactaaaatgtttggtaggccctggagtcgccagattgtctttatcaccaggcctttggctttcttcagtttcactggtatcttttggttttgtttttgactttggtggctttttgtagttggagcatcagtagtctcttggaattgctcctaggacattgtggtttaggtttcttcctgggtacagtacattgtaaaatttagcagattaaaaaaagtacacagcattttttttctgtgcacgtcgcagagtcctgagcttgaggctgtgttactctactcattccaaacgaatgaaagatctctgttgccttactctaaggaagtgggatcgagtgcgttaggatctatggttgtcttggttttcaactctgggcagattcctgactggctgagtgtttctgaatgaagatgttttcctgtctgttttgtactgcttgagtgcagaggccagatcctctcagaaagataagattgtatgccagaaattcagattagcagtcagcttaagagagacttattgtcagaagtagtagaattgctttatttacttggttaatgaaggtggccttgggccctattgggttttagaagttttagaagctgctaaaaagttattaaagaatattgggaacatttattttttaaattacctaattctggtaataggcttcagcatttctggagtataataatggtggtttaaaaaactaatcaaacggctttagtaattttactactggtttcacagcttttcagttacagttggtctgtttagtgtgttaattattaggaatcgggtacatgcatccaacttcagtgataccttctagctaatggtttcaatttagacttcactgcctcagtctcactgggtacatgagaaggttggaatcaacatgcttagttgcctcagtgggcacttgaaaattccttcactggcagcccgagtggaggcccagtatgtctagtcctgggatgactgttgtcagcagctgttactctagtacaggtgctcctgtgaactctttattaggaactgaatgtgtcttaacctctgtgttacatcttggctggcagagatttatgttacatgagattgtcttggtagcttgtagtgtggtcaggagaaaggggatggagcagtggtgcatagctgcttactgctcttataaacggtatataaaggttttacggattttgaaaatatttttttttagaggtcaaaataaataccattttagtggcaacagctttgaactagagaggtagatgtattaaagcagcatagaaccataacttctagataatgtagttgccactaggagatattagaaagttagaatgtatgtgtgtatttagtttttcaataataatgaacatacactttcaggagcaaagtatggttgagaaattgtggcagaaagaattttaaatgttagtcgaagttgtctgtagtttctttattaagctctgaaaacacttccaatgccagtttgattctgagggcttgggaagtgggatctcccttgtggagcagctggagctggctgggagggagcctctccatgggtaatttattatgcctgccctgcttcccccagggagctgcttcagtgtgaaatgatgtgattgtcgggggtggggtgggaggagggccaccttcagtcggggagttgctcacatattacacaggtagcatcaggtggacttcagcgctgaactgtactagtagtgagtccctgtagtcaatgtgcaatttctctaattctgagaaactctgtagactctgcctgggttttactgggtcagcatagaatgctatcagtttacctctgtgaaatattcagtcagttgaaggaaacttggattcctagtcagaggtgactaaaagttaccctgaccaaaaggatctctgcggggggaagagaatggagcttcctgattttaatgtgttgcgtcagtggccctcttcgactcccgttttgggtagatgcgtagctcttcactttcttacctcaaggctctgtctagccatgttaaatctttagactcagtctgatgccgtttttctgttttgccattctcattattcacagctttcagaacaagtgttgctaaaactccggggcctttgacagttgttctgaggtgatttaataatggactttttataagttatgttttcctggctctaaagtaaatttttttttttttttttttgagacagagtcttgctttgttgcccaggctggagtgtggtggggcaatctcggctcactgcaacctccacctcccgggttcaagcgattctcctgcctcagcctcctgagtagctgggattacaggtgtgtgccaccatgcttggctaatttttgtatttttagtagagacggggtttcaccatgttagccaggctggtctcaaactcctgaccttgtgatctgcccgcctcagcctcccaaagtgctaggattacgggtgtgagcaaccctgcccggccagtaaattgtatttttttaatgacatcattgatttgaagatctagatggcataaattacgacgtctgccatcgcatattagaaaggggacagtcatatttgtaacgtggagagaacacggagcaccagtcaccacgtgcacttaggatgcagagcttaccgcacaccgctgatggggacctccggaaagagcggtgccttgtggttggcctggaagttctctcccaaggtgaaattcctttaaaacctcaggctctgacctatgtctttgaagcagctgctttgtagagtccctctctttactgtcctcgttaggactgttttgtggttccatgaaaatgtttagcatccttgcagaattacttgagaaggggctggtaccagtgtaaagaatctatttctgtaaaactacgaacttttgcatagggaatttattctaagcaggtcatagccgtgatccagagctgctgctgctcactgccagtccttgcggctggcggcgattgccggacagactctctgtggcctggctctcatccttggcgtgtcagcctgcggcaggctgccagccatccatgacaatcatgtgagctcagccacagacctcagctggcggtttgatccctggcaggtccctcgagcagtactggtaagaggcttcacacattttcccactcttacagttcatttttcatagtaggaagggcccttggcctccccagtgcctcttccagagcctccaccagcactaagctcagaggaaagaagaaaagggccaggagtcagacgtcacacccgggggctcccctttcccatgtagaagtgttggcatgcgtcagtctcctttacagaggggtggatgtatccgtggaggaggggccttctctctttctaattgcactatacttgttctagcttcagtctggagatacttaagacctccatggggtcgtgatccatagacttagcaagtcttgccttatctatggagctcgatggtgagaattgtgaccattgtctgatgtccatagttccttccccctagattgtttctttccacggattgtgttcatctgaaccattttattttttatttaccaaagtactgtacttggctatttgcagtgttttcaaaaccaaatgtttctttttttgtgtttttaatcttcgatacttggtgcaatagaagctgcaaagatgtgccactttatctatgaaatggagttttgtataccaataaattctagtttaaaaacaaa

SEQ ID NO: 21241 - DNA, 938 bp, Homo sapiens
  source 1..938: mol_type = unassigned DNA
cccattgtaacgccggagtgggacgctgctttgcgtctgaaaggtgcaaattgaaactcgaaagcccgcaaattaacggggtgtctctctcctgatgaagaggtattgcactctcagtctcgccatgttgaagtcagaatggcctgtattcactatcttcgagagaacagagagaaatttgaagcgtttatagaaggatcatttgaagaatatttaaagcgtttggaaaatccacaggaatgggtaggacaagtggaaataagtgccctttctcttatgtacaggaaagattttataatttatcgggaaccaaatgtttctccttcacaagtaacagaaaataattttcctgaaaaggtgttactgtgtttttcaaatggaaatcattatgatattgtgtatcccataaagtataaagaaagctctgctatgtgtcagtctctcctttatgaattgctgtatgagaaggtatttaaaactgatgttagtaaaattgtgatggaactagacacgttggaagtagctgatgaagataacagtgaaatatcagattcagaggatgacagttgcaagtaagaatgaaatcctaaaatacctttcttagtgccatacaaggaaagttaagtaaatgtctttacatttcagtaaatgtctttctataacatatattgaggtattaatggtattcataaaatacagcagtctgctgaagtttctttatccctgtcactaattttacctaatttctattatgggactgtttgttttgaaagttggtgtttttggttgatgagaatttacgtctgcaatctagatgcatatttgtagaataaatttggtcctacctatatgtgtgtgtattgtaaaattttaaagttaacttgtcaattgttcacatacccagtaatgaaataaaatggccgtttggatttccttca

SEQ ID NO: 21242 - DNA, 3829 bp, Homo sapiens
  source 1..3829: mol_type = unassigned DNA
ggcagggcttccctatgcgcccggagagcgcggaccgctgcctcgggccgccgccgcctgccgccgctcgcggagcccgagccccagcccgagccgccgcctgccccaggccggggcgtcgagcagccggcggcctggccatgtggggctagccctcgccgcgcctggcctgcagcaggaccagcaacatggaggctgccgtcggcgtccccgacggcggggaccagggcggcgcggggccccgcgaggacgcgacgcccatggacgcctatctgcggaaactgggcttgtatcggaaactggtcgccaaggacgggtcgtgcctgttccgggccgtggcggagcaggtattgcactctcagtctcgccatgttgaagtcagaatggcctgtattcactatcttcgagagaacagagagaaatttgaagcgtttatagaaggatcatttgaagaatatttaaagcgtttggaaaatccacaggaatgggtaggacaagtggaaataagtgccctttctcttatgtacaggaaagattttataatttatcgggaaccaaatgtttctccttcacaagtaacagaaaataattttcctgaaaaggtgttactgtgtttttcaaatggaaatcattatgatattgtgtatcccataaagtataaagaaagctctgctatgtgtcagtctctcctttatgaattgctgtatgagaaggtatttaaaactgatgttagtaaaattgtgatggaactagacacgttggaagtagctgatgaagataacagtgaaatatcagattcagaggatgacagttgcaagagtaagactgctgctgctgctgctgatgtgaatggatttaaacctttgtcaggcaatgagcagctgaagaacaatgggaactctactagcctgcctttgtctagaaaggttcttaagtcactcaatcctgcagtctatagaaatgtggaatatgaaatttggctgaagtctaaacaagctcagcaaaaacgtgattattccattgctgctggcttacaatatgaagttggagacaaatgtcaagttaggttggatcacaatggaaaatttttgaatgcagatgttcaaggaattcattctgagaatggaccagttttggttgaagaactgggaaagaagcacacatcaaagaacctcaaggcacctcccccagaaagctggaacacagtgtcagggaagaagatgaaaaaaccttccacttctggacaaaatttccattctgatgtggattacagagggccaaagaatccaagcaagccaataaaagccccatcagcactacctcctcgactgcagcatccttcaggagtaagacaacatgcgttctctagtcattcttcagggtcacagtctcagaaattctccagtgagcacaaaaatcttagccggacaccttcacagatcataagaaaacctgatcgtgaaagagttgaggattttgatcacacaagtcgagaatctaactatttcggcctttccccagaagagcgcagagagaagcaagctatagaagaatcccgtttactctatgagattcagaacagagatgaacaggctttcccagccctttccagctcatcagtcaatcagtcagcttctcagagtagcaatccatgtgtccagagaaaatcatcacatgtaggtgatagaaaaggaagcaggcggagaatggatacagaagaacgaaaagacaaagactctattcatggacatagtcagttggataaaagacccgaaccaagcacattggagaatattactgatgataaatatgcaacagtttcatcaccatcaaagtcaaagaagttagagtgcccttctcctgcggaacaaaagccagcagaacatgtgtctttgtcaaatccagctccccttctagtttctccagaggtacatctaactcctgcggtgccttctttaccagccactgtgccagcctggccaagtgaacctacaacttttggaccaacaggtgtccctgctccaattcccgttttgtcagtgacacagactttgaccactggacctgattcagctgtatcccaagctcatttaacaccctctccagttcctgtgtcaatacaggcagttaaccagcccttgatgcctttgcctcagacattgagcctttatcaagacccactctatcctgggtttccttgtaatgaaaagggagatcgagccattgtaccaccttattcactgtgtcagactggggaggacctacctaaagataagaatattcttcgattcttcttcaatcttggtgtgaaggcatacagttgtcctatgtgggccccacattcttacctgtaccctctgcaccaggcctacctggcagcctgcaggatgtacccaaaggtccctgtccctgtttatcctcataatccctggttccaagaggctcctgctgctcagaatgaaagtgattgtacctgtactgatgcccactttcctatgcagactgaggccagtgttaatggtcaaatgccacagccagagattggaccgccgacattttcttcacctctggttatccctccatctcaggtgtctgaaagtcatggacaattgtcttaccaggctgatcttgaatctgagacccctgggcagcttctgcatgctgattatgaagagtcactaagtggcaagaatatgttcccccagccatcttttggacccaatccattcttaggcccagttcctattgcacctcctttctttcctcatgtttggtatgggtacccttttcagggattcatagaaaatccagtaatgaggcagaatattgtcctgccctctgatgaaaaaggagaattggatctgtctctggaaaatctggatctgtctaaagattgtggttcagtttcaacagtagatgagtttccagaagccaggggtgaacatgtacattctctccctgaagcaagtgtgagcagtaagccggacgaaggccggacagagcaatcttcccagacacgaaaggcagatacggcattggcttccatccctcctgtagcagagggaaaggctcatcctcccactcagattctaaacagagagagagaaactgtgcctgttgaacttgaacctaaaaggaccattcaaagcctgaaagaaaaaacagaaaaagtaaaagatcctaagactgctgctgatgtggtcagccctggggccaactctgttgatagcagagtgcaaagaccaaaagaagagagttcagaagatgaaaatgaagtgtctaatattttgagaagtggtagatccaagcagttctataatcaaacttatggaagcaggaagtacaaaagtgattggggctattctggtaggggtggatatcaacatgtgagaagtgaggagtcctggaaaggacagccaagcagaagtcgggatgaaggttatcagtaccatcgaaatgtcagagggcgaccatttaggggagataggaggagatcagggatgggagatggccataggggacagcacacttgatggttgttgccgaagtattttctaacagaaactcttaggtggaatgtttctgaaggctttaaaaaaaatacaataaagtaaaaaccgcagttggaactctttcctctccccagccccccttaccttcactcccatactggacaagacattttggacatgagttcaagggggcaggttaattcctggcattgccagttttcttcattcagaatctgtttgttgatcaagtgactgtccccgtaaaaagtagaagataagtttgttaaagtattttttataaacagcttaatataaaa

SEQ ID NO: 21243 - DNA, 7069 bp, Homo sapiens
  source 1..7069: mol_type = unassigned DNA
cccattgtaacgccggagtgggacgctgctttgcgtctgaaaggtgcaaattgaaactcgaaagcccgcaaattaacggggtgtctctctcctgatgaagaggtattgcactctcagtctcgccatgttgaagtcagaatggcctgtattcactatcttcgagagaacagagagaaatttgaagcgtttatagaaggatcatttgaagaatatttaaagcgtttggaaaatccacaggaatgggtaggacaagtggaaataagtgccctttctcttatgtacaggaaagattttataatttatcgggaaccaaatgtttctccttcacaagtaacagaaaataattttcctgaaaaggtgttactgtgtttttcaaatggaaatcattatgatattgtgtatcccataaagtataaagaaagctctgctatgtgtcagtctctcctttatgaattgctgtatgagaaggtatttaaaactgatgttagtaaaattgtgatggaactagacacgttggaagtagctgatgaagataacagtgaaatatcagattcagaggatgacagttgcaagagtaagactgctgctgctgctgctgatgtgaatggatttaaacctttgtcaggcaatgagcagctgaagaacaatgggaactctactagcctgcctttgtctagaaaggttcttaagtcactcaatcctgcagtctatagaaatgtggaatatgaaatttggctgaagtctaaacaagctcagcaaaaacgtgattattccattgctgctggcttacaatatgaagttggagacaaatgtcaagttaggttggatcacaatggaaaatttttgaatgcagatgttcaaggaattcattctgagaatggaccagttttggttgaagaactgggaaagaagcacacatcaaagaacctcaaggcacctcccccagaaagctggaacacagtgtcagggaagaagatgaaaaaaccttccacttctggacaaaatttccattctgatgtggattacagagggccaaagaatccaagcaagccaataaaagccccatcagcactacctcctcgactgcagcatccttcaggagtaagacaacatgcgttctctagtcattcttcagggtcacagtctcagaaattctccagtgagcacaaaaatcttagccggacaccttcacagatcataagaaaacctgatcgtgaaagagttgaggattttgatcacacaagtcgagaatctaactatttcggcctttccccagaagagcgcagagagaagcaagctatagaagaatcccgtttactctatgagattcagaacagagatgaacaggctttcccagccctttccagctcatcagtcaatcagtcagcttctcagagtagcaatccatgtgtccagagaaaatcatcacatgtaggtgatagaaaaggaagcaggcggagaatggatacagaagaacgaaaagacaaagactctattcatggacatagtcagttggataaaagacccgaaccaagcacattggagaatattactgatgataaatatgcaacagtttcatcaccatcaaagtcaaagaagttagagtgcccttctcctgcggaacaaaagccagcagaacatgtgtctttgtcaaatccagctccccttctagtttctccagaggtacatctaactcctgcggtgccttctttaccagccactgtgccagcctggccaagtgaacctacaacttttggaccaacaggtgtccctgctccaattcccgttttgtcagtgacacagactttgaccactggacctgattcagctgtatcccaagctcatttaacaccctctccagttcctgtgtcaatacaggcagttaaccagcccttgatgcctttgcctcagacattgagcctttatcaagacccactctatcctgggtttccttgtaatgaaaagggagatcgagccattgtaccaccttattcactgtgtcagactggggaggacctacctaaagataagaatattcttcgattcttcttcaatcttggtgtgaaggcatacagttgtcctatgtgggccccacattcttacctgtaccctctgcaccaggcctacctggcagcctgcaggatgtacccaaaggtccctgtccctgtttatcctcataatccctggttccaagaggctcctgctgctcagaatgaaagtgattgtacctgtactgatgcccactttcctatgcagactgaggccagtgttaatggtcaaatgccacagccagagattggaccgccgacattttcttcacctctggttatccctccatctcaggtgtctgaaagtcatggacaattgtcttaccaggctgatcttgaatctgagacccctgggcagcttctgcatgctgattatgaagagtcactaagtggcaagaatatgttcccccagccatcttttggacccaatccattcttaggcccagttcctattgcacctcctttctttcctcatgtttggtatgggtacccttttcagggattcatagaaaatccagtaatgaggcagaatattgtcctgccctctgatgaaaaaggagaattggatctgtctctggaaaatctggatctgtctaaagattgtggttcagtttcaacagtagatgagtttccagaagccaggggtgaacatgtacattctctccctgaagcaagtgtgagcagtaagccggacgaaggccggacagagcaatcttcccagacacgaaaggcagatacggcattggcttccatccctcctgtagcagagggaaaggctcatcctcccactcagattctaaacagagagagagaaactgtgcctgttgaacttgaacctaaaaggaccattcaaagcctgaaagaaaaaacagaaaaagtaaaagatcctaagactgctgctgatgtggtcagccctggggccaactctgttgatagcagagtgcaaagaccaaaagaagagagttcagaagatgaaaatgaagtgtctaatattttgagaagtggtagatccaagcagttctataatcaaacttatggaagcaggaagtacaaaagtgattggggctattctggtaggggtggatatcaacatgtgagaagtgaggagtcctggaaaggacagccaagcagaagtcgggatgaaggttatcagtaccatcgaaatgtcagagggcgaccatttaggggagataggaggagatcagggatgggagatggccataggggacagcacacttgatggttgttgccgaagtattttctaacagaaactcttaggtggaatgtttctgaaggctttaaaaaaaatacaataaagtaaaaaccgcagttggaactctttcctctccccagccccccttaccttcactcccatactggacaagacattttggacatgagttcaagggggcaggttaattcctggcattgccagttttcttcattcagaatctgtttgttgatcaagtgactgtccccgtaaaaagtagaagataagtttgttaaagtattttttataaacagcttaatataaaacattatagatttagtgtttggcttttttccttataagtttataagtttgatttcagatgttggaaatgtgtgctttatagtgtttactaaagtgacaagaaaatataccatttgacacactatagattccaaacataacgttgcaccaaatagaaatgtatattttattatgcaatgccttagtcataaactgggctcaaacaattctcagcctaaaacactgttgtcttttaaaatgcttccaacccaaaggcctttcatctcaatatctgtcaaacttgaataatgtcttctctttaatattcacataaggcagcctattaactgtgtcttagcaatgttgtatatagttcttttaatattcataaggtatatttttgaattttggtatttgttgagattgcatagaagaatagtaggaaatccaatgaaatggctgtttccaccaagaattcttagcactggtgtaaatatcatggtgcctactcgaaagaaatgtagatgctatgcattttgaaaataatctgcatcagttagaactgcagaagtttttttaatgccactttaacactaatgcactgacagattctaaatattttgtgagaagaaatgttaaaaatttttagcttgacaggtttctagagttgttttcttcctcccccccccccccgcaccattggttgtgtatcactttcactttacacttgcatgttctacttgtcagggctggaactattgtatagaagataatatgattgtgacttctagttcttttctagaggatgctgctagaaaatggttttgctttgtattttatagcttgttacccttaggtaggtaacatcttacattctgttttcttccagtctttgcagtattcactagaggttccctttgcatgttgcactctgttctcatttggagattgaactctgaattaacacagtattcattcatctgtgttattttgtaaaaataactgtagcttatattctttatttgtgcataccaatgtgaaaatccactcttttattatgttgagattatcttctgatcaggaagtttgagtgctatgcaaataacatagtagtaatttctctttgcatgccatgtgtaatatacctagccaaaaccagatgcggtgactttctttttttgtaaagcaaattacttaagaaaatacaattcacttgaatttgacaaactgaaacagatgggttttctgggttctctgataacctatgggaatgtttggatgccagttgggctagtgaatcgccactgtactgtaataatggttatttacctctgtgctgttttaattacctaacgtctgtgtaactgctgatttgagtagtgattagcatttagataatgtaacaggattttagagagcactttgaaagataacattttattatgatggtgctaggtaaaaaattgtaaagactgggatggttgtgtggaaaacttttcttgagagaacctattgaaaggaatttgttgtcaccttcttaactagaatagttgttgaaggtaccgcttaagccatttttttcttaacatcggtggctcagttaaggaatgagaagatagagggtcctccactttcagctcatgcttttttatgtaggactagcttacctgattttaatgaaaatcacattttgatacaaacaccagatttgaaagttcaatgtgtttgatctcaggagtccaaaataagttgttgcttctagtgtcctgcattttattgactggggtttgatctcagcttctgaaaatgtttaaaaattggaaggaaatactactcatatcttcattgtcactttgtcttacctcaattgagtaacagaatatagctcctgaaggaaacactgatttgctttctgtttcccatatctcacctctaggatatgatggaagaagtgcttgaaagagaattttagcagatggtacttttctcagtgacctctggaataaaagaactgacttttgatagttttaaaattaatctttgcatgaaggttggtttcgctttttttcctttaagtttgtttttaaatgtattagtccaggggattttgccttatgctgaggtcaaactaaggataagcaagcttttgtccttcattttaactgttatgtcatactgttatgttgacatatttctttataagagaatagaggcaaaagtatagaactgaggatcatttgtatttttgagttggaaattatgaaacttcaccatattatgatcatacatattttgaagaacagactgaccaaagctcacctgttttttgtgttaggtgctttggctgaacttgattccagcccccttttccctttggtgttgtgtatgtctcttcatttcctctcaaatcttcaactcttgccccatgtctccttggcagcaggatgctggcatctgtgtagtcctcatactgtttactgataacccacaaattcattttcatggcagacctaagctcagaccctgccttgtcctggcaagcataggttttcccagaccacaatgctgatatatcttatttaatgcagactgtattcttgcagcgtgttgtttcctttgtgactcaaggttgaattaaaatgcctgtgaactgcaaacttgcttatgattgacttggtgcaataaagttcctttctaaccatttctggtttagaaaacattcagccatcctagaaactagcaatatttatttttgcctctttcgttttaccttcatttttagatgaggtaaatgttttgtcttttacttaagggtactaagcaaggtccactctagtgtagctgaagagaatgcatatttggctacactatttctgtttactgtattttgcttcctactttatgtctaaatgctattgtttgtttaaaatcctaataatgtctcatttccaatatgttattttcagataactaaggttttgctactaatgtcagccatttactctcccactaattgggattattttttaaaagaggtctttctccccgaaatacaagttttagaaaatcttagaagaggggtgggtgcatgtcttaatgctgggaagcggcaactttggggttgaacttacttgaatggattaaaaattgcattgtgttacagagctagaaaattttatgtatgaaaaacgataatagccttacactgagtacaaataatactttaagagcatgtgaagatgtgatcatttgtgatgttacttgtaaaaaaaagtatatatacatatcttttgaagtgttaaaaggaaactagtactttatattctttatcatatcactttttgtaagtgttgaatatattcctgtttatttttctatgttctgttttgtagccttaagaagtgtttcaaacatatctgaatgtataaaataagagtaaatgccctacatggtgtgatgctgcattatatataaaactgtgtgcatatattaaattttgtctcttgat

SEQ ID NO: 21244 - DNA, 543 bp, Homo sapiens
  source 1..543: mol_type = unassigned DNA
aaattaacggggtgtctctctcctgatgaagagtgttgctgtggggtatgttcacagccacccactgcctccggtccttattgttagtaggtattgcactctcagtctcgccatgttgaagtcagaatggcctgtattcactatcttcgagagaacagagagaaatttgaagcgtttatagaaggatcatttgaagaatatttaaagcgtttggaaaatccacaggaatgggtaggacaagtggaaataagtgccctttctcttatgtacaggaaagattttataatttatcgggaaccaaatgtttctccttcacaagtaacagaaaataattttcctgaaaaggtgttactgtgtttttcaaatggaaatcattatgatattgtgtatcccataaagtataaagaaagctctgctatgtgtcagtctctcctttatgaattgctgtatgagaaggtatttaaaactgatgttagtaaaattgtgatggaactagacacgttggaagtagctgatgaagataacagtgaaatatcagattca

SEQ ID NO: 21245 - DNA, 864 bp, Homo sapiens
  source 1..864: mol_type = unassigned DNA
ttacactaagaactctttgttacatcaggtattgcactctcagtctcgccatgttgaagtcagaatggcctgtattcactatcttcgagagaacagagagaaatttgaagcgtttatagaaggatcatttgaagaatatttaaagcgtttggaaaatccacaggaatgggtaggacaagtggaaataagtgccctttctcttatgtacaggaaagattttataatttatcgggaaccaaatgtttctccttcacaagtaacagaaaataattttcctgaaaaggtgttactgtgtttttcaaatggaaatcattatgatattgtgtatcccataaagtataaagaaagctctgctatgtgtcagtctctcctttatgaattgctgtatgagaaggtatttaaaactgatgttagtaaaattgtgatggaactagacacgttggaagtagctgatgaagataacagtgaaatatcagattcagaggatgacagttgcaagtaagaatgaaatcctaaaatacctttcttagtgccatacaaggaaagttaagtaaatgtctttacatttcagtaaatgtctttctataacatatattgaggtattaatggtattcataaaatacagcagtctgctgaagtttctttatccctgtcactaattttacctaatttctattatgggactgtttgttttgaaagttggtgtttttggttgatgagaatttacgtctgcaatctagatgcatatttgtagaataaatttggtcctacctatatgtgtgtgtattgtaaaattttaaagttaacttgtcaattgttcacatacccagtaatgaaataaaatggccgtttggatttccttca

SEQ ID NO: 21246 - DNA, 2740 bp, Homo sapiens
  source 1..2740: mol_type = unassigned DNA
ccgggttctctcccggcgtgccccgcgccgggtttgttggggggtactcggcagtgcagccatgactatactccccaaaaagaagccgccgcctcccgacgccgaccccgccaacgagccgccgccgcccgggccgatgcccccggcgccgcggcgcggcggaggtgtgggcgtgggcggcggcggcacgggcgtgggcggcggcgatcgcgaccgtgactccggcgtcgtgggggcccgtccgcgagcttcgccaccgcctcaaggcccgctaccaggaccgccgggcgctcttcatcgctgggcgctggccgtgccgcctggtgcagtggcgggtccccggccacaacaggcttctccacctccttgcgggggcccaggtggtcccggcggcggtcccggcgacgcgctgggcgcagcggcggcgggtgtgggtgccgcgggcgtggtggtgggtgtgggtggtgccgtaggcgtgggcggctgctgctccgggcctgggcacagcaagcggcgacgtcaagctcccggggttggcgcggttggcgggggcagtcccgagcgtgaggaggtcggcgcaggctacaacagtgaggacgagtatgaggcggctgcagcacgcatcgaggctatggaccctgccactgtcgagcagcaggagcattggtttgaaaaggccctacgagacaagaagggcttcatcatcaagcagatgaaggaggatggcgcctgtctcttccgggctgtagctgaccaggtgtatggagaccaggacatgcatgaggttgtgcgaaagcattgcatggactatctgatgaagaatgccgactacttctccaactatgtcacagaggactttaccacctacattaacaggaagcggaaaaacaattgccatggcaaccacattgagatgcaggccatggcagagatgtacaaccgtcctgtggaggtgtaccagtacagcacaggtacttctgcagtggaacccatcaacacattccatgggatacatcaaaacgaggacgaacccattcgtgttagctaccatcggaatatccactataattcagtggtgaatcctaacaaggccaccattggtgtggggctgggcctgccatcattcaaaccagggtttgcagagcagtctctgatgaagaatgccataaaaacatcggaggagtcatggattgaacagcagatgctagaagacaagaaacgggccacagactgggaggccacaaatgaagccatcgaggagcaggtggctcgggaatcctacctgcagtggttgcgggatcaggagaaacaggctcgccaggtccgaggccccagccagccccggaaagccagcgccacatgcagttcggccacagcagcagcctccagtggcctggaggagtggactagccggtccccgcggcagcggagttcagcctcgtcacctgagcaccctgagctgcatgctgaattgggcatgaagcccccttccccaggcactgttttagctcttgccaaacctccttcgccctgtgcgccaggtacaagcagtcagttctcggcaggggccgaccgggcaacttccccccttgtgtccctctaccctgctttggagtgccgggccctcattcagcagatgtccccctctgcctttggtctgaatgactgggatgatgatgagatcctagcttcggtgctggcagtgtcccaacaggaatacctagacagtatgaagaaaaacaaagtgcacagagacccgcccccagacaagagttgatggagacccagggattggacaccatctcccaaccccagtactcctgctctccggtgccacctcaccttctttggcttcttccctcttgcctccttctgttctttctgctctcccctcttttccctcctcctcacttccctctggctagcccacccctgcactctctctcattgccgctgccactatcacctgtctctctgccagctgatgtgccctgttgccccccaccccatcccgcacagaaccatccctgcattccacaggggactcgggcaagggtgccgaagatagacaagaggcacacagagacagaccaactggcagccaggcagccccagaggagagagacattcagacagaggaaagtctccctgcccctcattccttccaagatgagaaaaacttgccgccaccccccgacactgatgccagggaggtgggaggaagaagtgggaaatttcccttcccagtacccccaagaacgtctgagccttcaatgttgaattttttctttattaaaattacttttatcttataaaatcaactaatcaaaaatgatatagacgacagcactggctctgtgaaggtggcatctttctgggcaggcaggccatggggcatggaggagggtgcaaagatatgggttgctgtcttctggcctccagctgcatggaggccggcccagggtctagggtgtgcactgggcaagggcagggcggcaggtgtcaggccggcttggacaatgaaaccctgaccttgctgcattccttttgcttccaccaccactagcttctttggaatcttggggtgggggtcatctttggggattatggctgccacccgggatttgagtgtagggagtgtgggagcagccttggcagatggggcacccgtgccctgcaggtgttgacaagatccgccatctgtaatgtccttggcacaataaaaccaaatgtcagtttc

SEQ ID NO: 21247 - DNA, 2692 bp, Homo sapiens
  source 1..2692: mol_type = unassigned DNA
tttgttggggggtactcggcagtgcagccatgactatactccccaaaaagaagccgccgcctcccgacgccgaccccgccaacgagccgccgccgcccgggccgatgcccccggcgccgcggcgcggcggaggtgtgggcgtgggcggcggcggcacgggcgtgggcggcggcgatcgcgaccgtgactccggcgtcgtgggggcccgtccgcgagcttcgccaccgcctcaaggcccgctaccaggaccgccgggcgctcttcatcgctgggcgctggccgtgccgcctggtgcagtggcgggtccccggccacaacaggcttctccacctccttgcgggggcccaggtggtcccggcggcggtcccggcgacgcgctgggcgcagcggcggcgggtgtgggtgccgcgggcgtggtggtgggtgtgggtggtgccgtaggcgtgggcggctgctgctccgggcctgggcacagcaagcggcgacgtcaagctcccggggttggcgcggttggcgggggcagtcccgagcgtgaggaggtcggcgcaggctacaacagtgaggacgagtatgaggcggctgcagcacgcatcgaggctatggaccctgccactgtcgagcagcaggagcattggtttgaaaaggccctacgagacaagaagggcttcatcatcaagcagatgaaggaggatggcgcctgtctcttccgggctgtagctgaccaggtgtatggagaccaggacatgcatgaggttgtgcgaaagcattgcatggactatctgatgaagaatgccgactacttctccaactatgtcacagaggactttaccacctacattaacaggaagcggaaaaacaattgccatggcaaccacattgagatgcaggccatggcagagatgtacaaccgtcctgtggaggtgtaccagtacagcacagaacccatcaacacattccatgggatacatcaaaacgaggacgaacccattcgtgttagctaccatcggaatatccactataattcagtggtgaatcctaacaaggccaccattggtgtggggctgggcctgccatcattcaaaccagggtttgcagagcagtctctgatgaagaatgccataaaaacatcggaggagtcatggattgaacagcagatgctagaagacaagaaacgggccacagactgggaggccacaaatgaagccatcgaggagcaggtggctcgggaatcctacctgcagtggttgcgggatcaggagaaacaggctcgccaggtccgaggccccagccagccccggaaagccagcgccacatgcagttcggccacagcagcagcctccagtggcctggaggagtggactagccggtccccgcggcagcggagttcagcctcgtcacctgagcaccctgagctgcatgctgaattgggcatgaagcccccttccccaggcactgttttagctcttgccaaacctccttcgccctgtgcgccaggtacaagcagtcagttctcggcaggggccgaccgggcaacttccccccttgtgtccctctaccctgctttggagtgccgggccctcattcagcagatgtccccctctgcctttggtctgaatgactgggatgatgatgagatcctagcttcggtgctggcagtgtcccaacaggaatacctagacagtatgaagaaaaacaaagtgcacagagacccgcccccagacaagagttgatggagacccagggattggacaccatctcccaaccccagtactcctgctctccggtgccacctcaccttctttggcttcttccctcttgcctccttctgttctttctgctctcccctcttttccctcctcctcacttccctctggctagcccacccctgcactctctctcattgccgctgccactatcacctgtctctctgccagctgatgtgccctgttgccccccaccccatcccgcacagaaccatccctgcattccacaggggactcgggcaagggtgccgaagatagacaagaggcacacagagacagaccaactggcagccaggcagccccagaggagagagacattcagacagaggaaagtctccctgcccctcattccttccaagatgagaaaaacttgccgccaccccccgacactgatgccagggaggtgggaggaagaagtgggaaatttcccttcccagtacccccaagaacgtctgagccttcaatgttgaattttttctttattaaaattacttttatcttataaaatcaactaatcaaaaatgatatagacgacagcactggctctgtgaaggtggcatctttctgggcaggcaggccatggggcatggaggagggtgcaaagatatgggttgctgtcttctggcctccagctgcatggaggccggcccagggtctagggtgtgcactgggcaagggcagggcggcaggtgtcaggccggcttggacaatgaaaccctgaccttgctgcattccttttgcttccaccaccactagcttctttggaatcttggggtgggggtcatctttggggattatggctgccacccgggatttgagtgtagggagtgtgggagcagccttggcagatggggcacccgtgccctgcaggtgttgacaagatccgccatctgtaatgtccttggcacaataaaaccaaatgtcagttt

SEQ ID NO: 21248 - DNA, 2682 bp, Homo sapiens
  source 1..2682: mol_type = unassigned DNA
ccgggttctctcccggcgtgccccgcgccgggtttgttggggggtactcggcagtgcagccatgactatactccccaaaaagaagccgccgcctcccgacgccgaccccgccaacgagccgccgccgcccgggccgatgcccccggcgccgcggcgcggcggaggtgtgggcgtgggcggcggcggcacgggcgtgggcggcggcgatcgcgaccgtgactccggcgtcgtgggggcccgtccgcgagcttcgccaccgcctcaaggcccgctaccaggaccgccgggcgctcttcatcgctgggcgctggccgtgccgcctggtgcagtggcgggtccccggccacaacaggcttctccacctccttgcgggggcccaggtggtcccggcggcggtcccggcgacgcgctgggcgcagcggcggcgggtgtgggtgccgcgggcgtggtggtgggtgtgggtggtgccgtaggcgtgggcggctgctgctccgggcctgggcacagcaagcggcgacgtcaagctcccggggttggcgcggttggcgggggcagtcccgagcgtgaggaggtcggcgcaggctacaacagtgaggacgagtatgaggcggctgcagcacgcatcgaggctatggaccctgccactgtcgagcagcaggagcattggtttgaaaaggccctacgagacaagaagggcttcatcatcaagcagatgaaggaggatggcgcctgtctcttccgggctgtagctgaccaggtgtatggagaccaggacatgcatgaggttgtgcgaaagcattgcatggactatctgatgaagaatgccgactacttctccaactatgtcacagaggactttaccacctacattaacaggaagcggaaaaacaattgccatggcaaccacattgagatgcaggccatggcagagatgtacaaccgtcctgtggaggtgtaccagtacagcacagaacccatcaacacattccatgggatacatcaaaacgaggacgaacccattcgtgttagctaccatcggaatatccactataattcagtggtgaatcctaacaaggccaccattggtgtggggctgggcctgccatcattcaaaccagggtttgcagagcagtctctgatgaagaatgccataaaaacatcggaggagtcatggattgaacagcagatgctagaagacaagaaacgggccacagactgggaggccacaaatgaagccatcgaggagcaggtggctcgggaatcctacctgcagtggttgcgggatcaggagaaacaggctcgccaggtccgaggccccagccagccccggaaagccagcgccacatgcagttcggccacagcagcagcctccagtggcctggaggagtggactagccggtccccgcggcagcggagttcagcctcgtcacctgagcaccctgagctgcatgctgaattgggcatgaagcccccttccccaggcactgttttagctcttgccaaacctccttcgccctgtgcgccaggtacaagcagtcagttctcggcaggggccgaccgggcaacttccccccttgtgtccctctaccctgctttggagtgccgggccctcattcagcagatgtccccctctgcctttggtctgaatgactgggatgatgatgagatcctagcttcggtgctggcagtgtcccaacaggaatacctagacagtatgaagaaaaacaaagtgcacagagacccgcccccagacaagagttgatggagacccagggattggacaccatctcccaaccccagggactcgggcaagggtgccgaagatagacaagaggcacacagagacagaccaactggcagccaggcagccccagaggagagagacattcagacagaggaaagtctccctgcccctcattccttccaagatgagaaaaacttgccgccaccccccgacactgatgccagggaggtgggaggaagaagtgggaaatttcccttcccagtacccccaagaacgtctgagccttcaatgttgaattttttctttattaaaattacttttatcttataaaatcaactaatcaaaaatgatatagacgacagcactggctctgtgaaggtggcatctttctgggcaggcaggccatggggcatggaggagggtgcaaagatatgggttgctgtcttctggcctccagctgcatggaggccggcccagggtctagggtgtgcactgggcaagggcagggcggcaggtgtcaggccggcttggacaatgaaaccctgaccttgctgcattccttttgcttccaccaccactagcttctttggaatcttggggtgggggtcatctttggggattatggctgccacccgggatttgagtgtagggagtgtgggagcagccttggcagatggggcacccgtgccctgcaggtgttgacaagatccgccatctgtaatgtccttggcacaataaaaccaaatgtcagtttccctgagcgactctgttctgtgtggggcaggggttgggcgggcctctgggcagaggatgcaatggcacggaccttggcttgacctcagaggtgtgaatgctctccagcagggtctgtctgggggcctggagtttgtatttgatttgctgcttattaaacctccttctggacctattgccactgg

SEQ ID NO: 21249 - DNA, 1493 bp, Homo sapiens
  source 1..1493: mol_type = unassigned DNA
gtgacgctacaggggccagctatgctcccgggagtgttgatgttttccagtcattccggctgacagcgttcaagttggaatcctggaggggaggtgtttttcctgtcgtacgtgggacaggccacgctgtccgtccgcagtaccgacgcctgcagcaggagcattggtttgaaaaggccctacgagacaagaagggcttcatcatcaagcagatgaaggaggatggcgcctgtctcttccgggctgtagctgaccaggtgtatggagaccaggacatgcatgaggttgtgcgaaagcattgcatggactatctgatgaagaatgccgactacttctccaactatgtcacagaggactttaccacctacattaacaggaagcggaaaaacaattgccatggcaaccacattgagatgcaggccatggcagagatgtacaaccgtcctgtggaggtgtaccagtacagcacagaacccatcaacacattccatgggatacatcaaaacgaggacgaacccattcgtgttagctaccatcggaatatccactataattcagtggtgaatcctaacaaggccaccattggtgtggggctgggcctgccatcattcaaaccagggtttgcagagcagtctctgatgaagaatgccataaaaacatcggaggagtcatggattgaacagcagatgctagaagacaagaaacgggccacagactgggaggccacaaatgaagccatcgaggagcaggtggctcgggaatcctacctgcagtggttgcgggatcaggagaaacaggctcgccaggtccgaggccccagccagccccggaaagccagcgccacatgcagttcggccacagcagcagcctccagtggcctggaggagtggactagccggtccccgcggcagcggagttcagcctcgtcacctgagcaccctgagctgcatgctgaattgggcatgaagcccccttccccaggcactgttttagctcttgccaaacctccttcgccctgtgcgccaggtacaagcagtcagttctcggcaggggccgaccgggcaacttccccccttgtgtccctctaccctgctttggagtgccgggccctcattcagcagatgtccccctctgcctttggtctgaatgactgggatgatgatgagatcctagcttcggtgctggcagtgtcccaacaggaatacctagacagtatgaagaaaaacaaagtgcacagagacccgcccccagacaagagttgatggagacccagggattggacaccatctcccaaccccagtactcctgctctccggtgccacctcaccttctttggcttcttccctcttgcctccttctgttctttctgctctcccctcttttccctcctcctcacttccctctggctagcccacccctgcactctctctcattgccgctgccactatcacctgtctctctgccagctgatgtgccctgttgccccccacccc

SEQ ID NO: 21250 - DNA, 2775 bp, Homo sapiens
  source 1..2775: mol_type = unassigned DNA
atgactatactccccaaaaagaagccgccgcctcccgacgccgaccccggcggcacgggcgtgggcggcggcgatcgcgaccgtgactccggcgtcgtgggggcccgtccgcgagcttcgccaccgcctcaaggcccgctaccaggaccgccgggcgctcttcatcgctgggcgctggccgtgccgcctggtgcagtggcgggtccccggccacaacaggcttctccacctccttgcgggggcccaggtggtcccggcggcggtcccggcgacgcgctgggcgcagcggcggcgggtgtgggtgccgcgggcgtggtggtgggtgtgggtggtgccgtaggcgtgggcggctgctgctccgggcctgggcacagcaagcggcgacgtcaagctcccggggttggcgcggttggcgggggcagtcccgagcgtgaggaggtcggcgcaggctacaacagtgaggacgagtatgaggcggctgcagcacgcatcgaggctatggaccctgccactgtcgagcagcaggagcattggtttgaaaaggccctacgagacaagaagggcttcatcatcaagcagatgaaggaggatggcgcctgtctcttccgggctgtagctgaccaggtgtatggagaccaggacatgcatgaggttgtgcgaaagcattgcatggactatctgatgaagaatgccgactacttctccaactatgtcacagaggactttaccacctacattaacaggaagcggaaaaacaattgccatggcaaccacattgagatgcaggccatggcagagatgtacaaccgtcctgtggaggtgtaccagtacagcacagaacccatcaacacattccatgggatacatcaaaacgaggacgaacccattcgtgttagctaccatcggaatatccactataattcagtggtgaatcctaacaaggccaccattggtgtggggctgggcctgccatcattcaaaccagggtttgcagagcagtctctgatgaagaatgccataaaaacatcggaggagtcatggattgaacagcagatgctagaagacaagaaacgggccacagactgggaggccacaaatgaagccatcgaggagcaggtggctcgggaatcctacctgcagtggttgcgggatcaggagaaacaggctcgccaggtccgaggccccagccagccccggaaagccagcgccacatgcagttcggccacagcagcagcctccagtggcctggaggagtggactagccggtccccgcggcagcggagttcagcctcgtcacctgagcaccctgagctgcatgctgaattgggcatgaagcccccttccccaggcactgttttagctcttgccaaacctccttcgccctgtgcgccaggtacaagcagtcagttctcggcaggggccgaccgggcaacttccccccttgtgtccctctaccctgctttggagtgccgggccctcattcagcagatgtccccctctgcctttggtctgaatgactgggatgatgatgagatcctagcttcggtgctggcagtgtcccaacaggaatacctagacagtatgaagaaaaacaaagtgcacagagacccgcccccagacaagagttgatggagacccagggattggacaccatctcccaaccccagtactcctgctctccggtgccacctcaccttctttggcttcttccctcttgcctccttctgttctttctgctctcccctcttttccctcctcctcacttccctctggctagcccacccctgcactctctctcattgccgctgccactatcacctgtctctctgccagctgatgtgccctgttgccccccaccccatcccgcacagaaccatccctgcattccacaggggactcgggcaagggtgccgaagatagacaagaggcacacagagacagaccaactggcagccaggcagccccagaggagagagacattcagacagaggaaagtctccctgcccctcattccttccaagatgagaaaaacttgccgccaccccccgacactgatgccagggaggtgggaggaagaagtgggaaatttcccttcccagtacccccaagaacgtctgagccttcaatgttgaattttttctttattaaaattacttttatcttataaaatcaactaatcaaaaatgatatagacgacagcactggctctgtgaaggtggcatctttctgggcaggcaggccatggggcatggaggagggtgcaaagatatgggttgctgtcttctggcctccagctgcatggaggccggcccagggtctagggtgtgcactgggcaagggcagggcggcaggtgtcaggccggcttggacaatgaaaccctgaccttgctgcattccttttgcttccaccaccactagcttctttggaatcttggggtgggggtcatctttggggattatggctgccacccgggatttgagtgtagggagtgtgggagcagccttggcagatggggcacccgtgccctgcaggtgttgacaagatccgccatctgtaatgtccttggcacaataaaaccaaatgtcagtttccctgagcgactctgttctgtgtggggcaggggttgggcgggcctctgggcagaggatgcaatggcacggaccttggcttgacctcagaggtgtgaatgctctccagcagggtctgtctgggggcctggagtttgtatttgatttgctgcttattaaacctccttctggacctattgccactgg

SEQ ID NO: 21251 - DNA, 2077 bp, Homo sapiens
  source 1..2077: mol_type = unassigned DNA
ggcgtggtggtgggtgtgggtggtgccgtaggcgtgggcggctgctgctccgggcctgggcacagcaagcggcgacgtcaagctcccggggttggcgcggttggcgggggcagtcccgagcgtgaggaggtcggcgcaggctacaacagtgaggacgagtatgaggcggctgcagcacgcatcgaggctatggaccctgccactgtcgagcagcaggagcattggtttgaaaaggccctacgagacaagaagggcttcatcatcaagcagatgaaggaggatggcgcctgtctcttccgggctgtagctgaccaggtgtatggagaccaggacatgcatgaggttgtgcgaaagcattgcatggactatctgatgaagaatgccgactacttctccaactatgtcacagaggactttaccacctacattaacaggaagcggaaaaacaattgccatggcaaccacattgagatgcaggccatggcagagatgtacaaccgtcctgtggaggtgtaccagtacagcacaggtacttctgcagtggaacccatcaacacattccatgggatacatcaaaacgaggacgaacccattcgtgttagctaccatcggaatatccactataattcagtggtgaatcctaacaaggccaccattggtgtggggctgggcctgccatcattcaaaccagggtttgcagagcagtctctgatgaagaatgccataaaaacatcggaggagtcatggattgaacagcagatgctagaagacaagaaacgggccacagactgggaggccacaaatgaagccatcgaggagcaggtggctcgggaatcctacctgcagtggttgcgggatcaggagaaacaggctcgccaggtccgaggccccagccagccccggaaagccagcgccacatgcagttcggccacagcagcagcctccagtggcctggaggagtggactagccggtccccgcggcagcggagttcagcctcgtcacctgagcaccctgagctgcatgctgaattgggcatgaagcccccttccccaggcactgttttagctcttgccaaacctccttcgccctgtgcgccaggtacaagcagtcagttctcggcaggggccgaccgggcaacttccccccttgtgtccctctaccctgctttggagtgccgggccctcattcagcagatgtccccctctgcctttggtctgaatgactgggatgatgatgagatcctagcttcggtgctggcagtgtcccaacaggaatacctagacagtatgaagaaaaacaaagtgcacagagacccgcccccagacaagagttgatggagacccagggattggacaccatctcccaaccccagggactcgggcaagggtgccgaagatagacaagaggcacacagagacagaccaactggcagccaggcagccccagaggagagagacattcagacagaggaaagtctccctgcccctcattccttccaagatgagaaaaacttgccgccaccccccgacactgatgccagggaggtgggaggaagaagtgggaaatttcccttcccagtacccccaagaacgtctgagccttcaatgttgaattttttctttattaaaattacttttatcttataaaatcaactaatcaaaaatgatatagacgacagcactggctctgtgaaggtggcatctttctgggcaggcaggccatggggcatggaggagggtgcaaagatatgggttgctgtcttctggcctccagctgcatggaggccggcccagggtctagggtgtgcactgggcaagggcagggcggcaggtgtcaggccggcttggacaatgaaaccctgaccttgctgcattccttttgcttccaccaccactagcttctttggaatcttggggtgggggtcatctttggggattatggctgccacccgggatttgagtgtagggagtgtgggagcagccttggcagatggggcacccgtgccctgcaggtgttgacaagatccgccatctgtaatgtccttggcacaataaaaccaaatgtcagtttccctga

SEQ ID NO: 21252 - DNA, 1689 bp, Homo sapiens
  source 1..1689: mol_type = unassigned DNA
agcaaatttcaactcccgcttgccattcaacatcatggatgatccgaagagtgaacagcagcgcatactgcgccgccaccaacgcgagaggcaggagctgcaggcccagatccggagcttaaaaaactcggtccccaagaccgacaagacgaaaagaaagcagttgctccaagacgtggcccgcatggaggccgagatggctcagaagcaccggcaggagctggagaagttccaagacgacagtagcattgaatctgtcgtcgaagacctggccaagatgaatctggaaaaccggcctccccgctcctccaaagcccacagaaagagagaaagaatggagtccgaggagagggagcgccaggagagcatcttccaggctgagatgtcggagcacctggccggcttcaagcgcgaggaggaggagaagctcgccgccatcctgggagccaggggtctggagatgaaagcgatcccggccgacggccactgcatgtaccgcgccatccaagaccagctggtgttcagcgtgtctgtggagatgctgcgctgccgcaccgccagctacatgaagaagcacgtcgacgagttcctgcccttcttcagcaaccccgagaccagcgactccttcggctacgacgacttcatgatctactgcgacaacatcgtgcgcaccacggcatggggaggccagctggagctgagggccctgtcgcacgtcctgaagacccccatcgaggtgatccaggccgactcgcccaccttgatcatcggggaggagtacgtcaagaagccgatcatcctggtctacctgcgctatgcctacagcctcggcgagcactacaactccgtgacaccgctcgaggccggcgccgccgggggcgtgctcccgcgtctcctgtaggccccaaggcgctgagcagccccgggaaactgtcgccgtcgccgcatctcctcagtaggctcagtttattttccccttttgcttttctctgtttttcttttccttccttttaatcaaaactacccgcccccgccccgcccccgctttcctaaccttgctgctttcacagggtgggaaacgaaattcgagggaaattccccggaaatatgagggaaatctctgcattgcaccaccagaggggcataaatttgaaagttctaacctcttcttgcccttaagggtcttttacctccctcaccaactaagatttggtcatgttgcgtataacttcaccacaaaaatggaaatattggccgggcgcggtggctcacgcctgtaatcccagcactttgggaggccgaggcgggcggatcacgaggtcaggagttcgagaccagcctggccaacatggtgaaaccccacctctacaaaaaatacaaaaattagccgggcgtggtggcaggcacctgtagtcccagatactcgggaggctaaggcaggagaatcgcttgacgggaagcggaggttgcagtgagccgagatcgtgcctttgcactccagcgtggaagacagtgagactccgtctcaaaaaaatgaaaaattagccaggcaggttggcgggggcctgtaatcctagctacttggggtgctgaggcaggagaatcaactgaacccgggaggcggaggctgcagtgggccgggatcgtactactgcactccagcatggaagacagcgagactccgtctcc

SEQ ID NO: 21253 - DNA, 3298 bp, Homo sapiens
  source 1..3298: mol_type = unassigned DNA
gcgcacgcgcagcaccccatttaagtttctcgtctttgcagtggctttgcttagatccggtgccgccttgaaggcggggctgggtcccagccgtagccaatggagccccgggtgagggttgaggggtggaaggtgcctactagccggtgcaggtttcttctagcgcgtgtgctggggtacctggtcgtcatggaggcggtattgaccgaagagcttgatgaggaagagcagctgctgagaaggcatcgcaaagagaagaaggagttgcaagccaaaattcagggcatgaagaatgctgttcccaagaatgacaagaagaggaggaagcaactcaccgaagatgtggccaagttggaaaaagaaatggaacagaaacatagagaggaactggagcaattgaagctgactactaaggagaataagatagattctgttgctgttaacatttcaaacttggtgcttgagaatcagccacctcggatatcaaaagcacaaaagagacgggaaaagaaagctgcattggaaaaggagcgagaagaacggatagctgaagctgaaattgaaaacttaacaggagccagacatatggaaagtgagaaacttgctcaaatattggcagctagacagttagaaattaaacagattccatctgatggccactgtatgtataaagccattgaagatcaactgaaagaaaaggattgtgctctgactgtggttgccttgagaagtcagaccgctgagtatatgcaaagccatgtggaagactttctgccatttttaacaaaccctaatacaggagatatgtatactccagaagaatttcagaagtactgtgaagatattgtaaacacagctgcatggggaggtcagcttgagctaagagctctgtctcacattttacaaacaccaatagagataatacaggcagattctcctcccattatagttggtgaagaatattcaaaaaaaccactaatacttgtatatatgagacatgcatatggcttaggagaacattataattcggttacacggttggtaaacatagttactgaaaattgcagctaatttatacaatgttgtacaattatgttttaatacagtgtgctgaactgagtatttctaccaagtgttgggttgttctaaatgctactgaaaaacacaactaccttatatcagttttatggcaaagctactaacaggtgtttttagaaatatgtcagagataaactttaaccagtgtcttcttagtggaattttaaaaatttgttaagttcattgtagagaacaccattcatagaccaagatggtcccctattagctgatattttcatttatgtaagatcctggacattctgttttgtgttggaacaaattttcaatgtttttaattctcccttttctgcctgttcctaaaaactttcaaaataaccatttcaatgtaatttgtcttgaagaagtttacccaatatctttgtcattgcaataatgtagtatggtgatggtcaatttaattattgcttataaaatgaacttgattgcagtaaccatggtatcgatgagactaatgcagtgaagctttattactaatatatatagccttatcaaagcaagctaagaagcttgctttaataattaataatttaaaaatatttatttagatgggattcagttgtttaaagaagtgagataaattcaaaggtaaataggtattctctgtcaaatttaaatctctaaagaattagagattagttttttatttgtgtataatttaaaaaagacctaataggttactgtctttttaatgcatttgttattctttcgtattttttaagcatcggactggagttagtaccatcatctcttgagtctttcataactacacatttttatatttccttttgtgttttctactttgctttccttgaaggaacaagcattttgtggcctttaccttgtgcaattttagggagtagcagtgtaaaaggtccaagaccacatttacttgaaattcttcctcttttctgatttgtcttaccagatatttcccttcttgcctcattctctaggatttgaataaaacctttgccacttattttattagccttattaatgtcacctttccttcaactcaaatatttgagaaattttatgttacatatatgaatgaagttgaaagctactgtttggaagctaagacttgtatagagtagttttgtatatgaatggttgttctagctcagatttcaggttactcacaacagtattctttctaagaggatatatacaaatgtctctcataatttatgtaaggaaatattatgaaaatgagacttttttagtttgatgtgtgtttcccaaactagagataaaactagtaagatttagtatcgtttataacatttgaatttttgctccatgagtacaactaatttttataagtaaatattgggtttatatgaaaaatggggtgtcagtcttttcacacgcccagcaggtaacaatgtgggaagctggcagggtcattgatagcaagtaagtacttcctgaaggctttccagttcaaaagattacaagccattctgcctgccaaacaaattatattctgaagatgcctgttttgtaacccttgatgtgaattttttggtgtctgaaatttacaaaagaatgaaattgaaattgtaaaacactaaatgctttgggtttattttgaagtaatctgttactttaaaatgtcaacattaggaagccataaaacaagatattatgaaacccagtattataaatgttatctacatctaaagtattttaaaataacttattggcagctttattctttttttccttacaagatttagaatctttttggttatatgtctatttttcaattttgttatatttttaatttaagtggccaatgtggttatgaacaagatttgtatggtcagcttctgttctttcctaaaacttcagataaatatcattttagctataacctaaaaaagtgtttaaataaaatgacagatgttaatttaaaagcagcatatgctaatttactttttcatatgatgatggtctaatggaagttacatatgctttcttttgtcctaactctgaaaagtatatgtcagagttctggaatatgtctttagccaagaattttattcacttaaatttgtttacaacttgtataaagcaaaaaagaatgtgtgtaactatagtgaacgcatagttttgcttatattatgtgatgtttgccaaaaaaagaataaaaaatgaatgaattaaatcaaca

SEQ ID NO: 21254 - DNA, 1631 bp, Homo sapiens
  source 1..1631: mol_type = unassigned DNA
aaggtgcctactagccggtgcaggtttcttctagcgcgtgtgctggggtacctggtcgtcatggaggcggtattgaccgaagagcttgatgaggaagagcagctgctgagaaggcatcgcaaagagaagaaggagttgcaagccaaaattcagggcatgaagaatgctgttcccaagaatgacaagaagaggaggaagcaactcaccgaagatgtggccaagttggaaaaagaaatggaacagaaacatagagaggaactggagcaattgaagctgactactaaggagaataagatagattctgttgctgttaacatttcaaacttggtgcttgagaatcagccacctcggatatcaaaagcacaaaagagacgggtgcctggatagaaggagctctctgtgttgtccttggtccctgctctgctcttaccagctgtatggcctttggaaatctttctgcgtgctgtttcctcagaagaggaaaatgaggggttttggattagatgatatctaaggaaaagaaagctgcattggaaaaggagcgagaagaacggatagctgaagctgaaattgaaaacttaacaggagccagacatatggaaagtgagaaacttgctcaaatattggcagctagacagttagaaattaaacagattccatctgatggccactgtatgtataaagccattgaagatcaactgaaagaaaaggattgtgctctgactgtggttgccttgagaagtcagaccgctgagtatatgcaaagccatgtggaagactttctgccatttttaacaaaccctaatacaggagatatgtatactccagaagaatttcagaagtactgtgaagatattgtaaacacagctgcatggggaggtcagcttgagctaagagctctgtctcacattttacaaacaccaatagagataatacaggcagattctcctcccattatagttggtgaagaatattcaaaaaaaccactaatacttgtatatatgagacatgcatatggcttaggagaacattataattcggttacacggttggtaaacatagttactgaaaattgcagctaatttatacaatgttgtacaattatgttttaatacagtgtgctgaactgagtatttctaccaagtgttgggttgttctaaatgctactgaaaaacacaactaccttatatcagttttatggcaaagctactaacaggtgtttttagaaatatgtcagagataaactttaaccagtgtcttcttagtggaattttaaaaatttgttaagttcattgtagagaacaccattcatagaccaagatggtcccctattagctgatattttcatttatgtaagatcctggacattctgttttgtgttggaacaaattttcaatgtttttaattctcccttttctgcctgttcctaaaaactttcaaaataaccatttcaatgtaatttgtcttgaagaagtttacccaatatctttgtcattgcaataatgtagtatggtgatggtcaatttaattattgcttataaaatgaacttgattgcagtaaccatggtatcgatgagactaatgcagtgaagctttattactaatatatatagccttatcaaagcaagcta

SEQ ID NO: 21255 - DNA, 3042 bp, Homo sapiens
  source 1..3042: mol_type = unassigned DNA
gttctctcgctcaggtctctgcatgtagttgtcacttgcagctccatttccatcacgtggtaaaatgccctttctcttctttcctgcagatggatggtttctagtgtgcttccaaaccccacctcggctgagtgttgggcagcacttctacatgatcctatgactcttgatatggacgcagtcctgtcagactttgttcggtccacgggggcagaacctggtctggccagagacctgctggaaggcaaaaactgggacctgacagccgctctgagcgactatgagcagctccgccaggtgcacacagccaatctgccacatgtgttcaatgaagggcggggtcccaagcagccagagcgagagccacagcccgggcacaaggtggagcgaccctgcctgcagaggcaggacgacattgcccaagaaaagcggctttcccgggggatttcccacgccagctcagccatcgtctccctggcccggtcccacgtggcaagtgaatgcaacaacgagcagttccccctggagatgccaatctacacattccagttgccagacctgagcgtgtacagcgaggatttcaggagcttcatcgagcgggacttgatcgagcaggcaacaatggtggctttggagcaggcaggtcgcctgaactggtggtccactgtgtgcacgagctgtaaacggcttcttcctctggccacaacaggggatgggaactgccttttacatgctgcttcactgggaatgtgggggtttcacgaccgggacctggtgttacggaaagctctctataccatgatgaggacgggagctgagagggaagccctgaagcggaggtggaggtggcagcagacgcagcagaataaggaggaggagtgggagcgggagtggacggagctgctgaagctggcctccagcgagccgcgcacacacttcagcaagaatggcggcacgggcgggggtgtggacaactctgaggaccccgtgtacgagagcctggaagagttccacgtttttgtcctagcccatatattaagaaggcccatcgttgttgtggcagatacaatgttaagagactcaggtggagaagcgttcgcacccatcccattcggagggatctacctgcccttggaggtccctcccaacagatgccactgctcgcctctggttctggcctatgatcaagcccatttctctgcccttgtgtccatggaacagagagaccagcaaagagaacaagccgtgatccccctgacggattctgagcacaagctgctgcctctgcactttgcagtggaccctggcaaggactgggagtgggggaaagacgacaacgataacgcccggctggcccaccttatcctgtcgctagaagccaagctgaaccttctgcacagctacatgaacgtgacgtggatccggatcccctccgagacacgggcgcccctggcacagccggagtctcccacggcctcggcaggggaggacgtgcagtccctggccgactcgctggactcggaccgcgattcggtgtgcagcaattctaacagcaataacggcaagaacggcaaggacaaggagaaggagaagcagcgcaaggagaaggacaagacgcgcgccgactccgtggccaacaagctgggcagcttcagcaagacgctgggcatcaagctgaagaaaaacatgggcggcctcggcggcctggtgcacggcaagatgggccgcgccaactccgccaatggcaagaacggggactcggccgagcggggcaaggagaagaaggccaagtcgcgcaagggcagcaaggaggagtctggtgcgtcggccagcacgtcgccgtcggaaaagaccacgccgtcgcccacagacaaggcagcgggcgcgtcgccggcggagaagggcggtgggccgcggggcgacgcctggaagtacagcacggatgtgaagctgagcctcaacatcctgcgcgccgccatgcagggggagcgcaagttcatcttcgccggcctgctgctcaccagccaccggcaccagttccacgaggagatgatcggctactacctgacgagcgcgcaggagcgcttcagcgccgagcaggagcagcggcgccgcgacgccgctactgcggccgccgctgccgccgccgccgccgccgccacggccaagcggccgccgcgcagaccggagacggagggcgtgccggtcccggagcgcgcctctccgggcccacccacgcagctggtgctcaagctcaaggagcggccgagccccgggcccgcggcagggcgtgcggcgcgggcggcggcgggcggcacggcctccccggggggaggcgcgcggcgtgcgagcgccagcggaccagtgcctggccgcagccccccggcgccagcgcgccagagcgtcatccacgtgcaggcgtcgggcgcgcgggacgaggcgtgcgcgccggccgtgggggcgctgcggccgtgcgccacgtacccgcagcagaaccgctcgctgtcgtcgcagagctacagcccggcgcgcgccgccgccctgcgcaccgtcaacacggtcgagtcgctggcgcgcgcggtgcccggggccctaccgggcgcggcggggacggcgggggcggccgagcacaagtcgcagacctacaccaacggcttcggcgccctgcgcgacggcctggagttcgccgacgccgacgcgccgaccgcgcgctcgaacggtgagtgcggccgtggcggcccggggccggtgcagcggcgctgccagcgcgagaactgtgcgttctacgggcgcgccgagaccgagcactactgctcctactgctaccgcgaggagctgcggcggcggcgcgaggcgcgcggggcccggccctgagcggcgcggcgcggcgcgggcggcgaggttctaccttcgaggatttcttttccattgtgtcggtgtcttttttacatgccctggtccaccggaaggccggcgcctcctctgtcagtgccgtgtacgtgtttggtcaaacgttcctaatggtgcctgaacctacactga

SEQ ID NO: 21256 - DNA, 3063 bp, Homo sapiens
  source 1..3063: mol_type = unassigned DNA
gttctctcgctcaggtctctgcatgtagttgtcacttgcagctccatttccatcacgtggtaaaatgccctttctcttctttcctgcagatggatggtttctagtgtgcttccaaaccccacctcggctgagtgttgggcagcacttctacatgatcctatgactcttgatatggacgcagtcctgtcagactttgttcggtccacgggggcagaacctggtctggccagagacctgctggaaggcaaaaactgggacctgacagccgctctgagcgactatgagcagctccgccaggtgcacacagccaatctgccacatgtgttcaatgaagggcggggtcccaagcagccagagcgagagccacagcccgggcacaaggtggagcgaccctgcctgcagaggcaggacgacattgcccaagaaaagcggctttcccgggggatttcccacgccagctcagccatcgtctccctggcccggtcccacgtggcaagtgaatgcaacaacgagcagttccccctggagatgccaatctacacattccagttgccagacctgagcgtgtacagcgaggatttcaggagcttcatcgagcgggacttgatcgagcaggcaacaatggtggctttggagcaggcaggtcgcctgaactggtggtccactgtgtgcacgagctgtaaacggcttcttcctctggccacaacaggggatgggaactgccttttacatgctgcttcactgggaatgtgggggtttcacgaccgggacctggtgttacggaaagctctctataccatgatgaggacgggagctgagagggaagccctgaagcggaggtggaggtggcagcagacgcagcagaataaggagtcagggctggtgtacacagaggaggagtgggagcgggagtggacggagctgctgaagctggcctccagcgagccgcgcacacacttcagcaagaatggcggcacgggcgggggtgtggacaactctgaggaccccgtgtacgagagcctggaagagttccacgtttttgtcctagcccatatattaagaaggcccatcgttgttgtggcagatacaatgttaagagactcaggtggagaagcgttcgcacccatcccattcggagggatctacctgcccttggaggtccctcccaacagatgccactgctcgcctctggttctggcctatgatcaagcccatttctctgcccttgtgtccatggaacagagagaccagcaaagagaacaagccgtgatccccctgacggattctgagcacaagctgctgcctctgcactttgcagtggaccctggcaaggactgggagtgggggaaagacgacaacgataacgcccggctggcccaccttatcctgtcgctagaagccaagctgaaccttctgcacagctacatgaacgtgacgtggatccggatcccctccgagacacgggcgcccctggcacagccggagtctcccacggcctcggcaggggaggacgtgcagtccctggccgactcgctggactcggaccgcgattcggtgtgcagcaattctaacagcaataacggcaagaacggcaaggacaaggagaaggagaagcagcgcaaggagaaggacaagacgcgcgccgactccgtggccaacaagctgggcagcttcagcaagacgctgggcatcaagctgaagaaaaacatgggcggcctcggcggcctggtgcacggcaagatgggccgcgccaactccgccaatggcaagaacggggactcggccgagcggggcaaggagaagaaggccaagtcgcgcaagggcagcaaggaggagtctggtgcgtcggccagcacgtcgccgtcggaaaagaccacgccgtcgcccacagacaaggcagcgggcgcgtcgccggcggagaagggcggtgggccgcggggcgacgcctggaagtacagcacggatgtgaagctgagcctcaacatcctgcgcgccgccatgcagggggagcgcaagttcatcttcgccggcctgctgctcaccagccaccggcaccagttccacgaggagatgatcggctactacctgacgagcgcgcaggagcgcttcagcgccgagcaggagcagcggcgccgcgacgccgctactgcggccgccgctgccgccgccgccgccgccgccacggccaagcggccgccgcgcagaccggagacggagggcgtgccggtcccggagcgcgcctctccgggcccacccacgcagctggtgctcaagctcaaggagcggccgagccccgggcccgcggcagggcgtgcggcgcgggcggcggcgggcggcacggcctccccggggggaggcgcgcggcgtgcgagcgccagcggaccagtgcctggccgcagccccccggcgccagcgcgccagagcgtcatccacgtgcaggcgtcgggcgcgcgggacgaggcgtgcgcgccggccgtgggggcgctgcggccgtgcgccacgtacccgcagcagaaccgctcgctgtcgtcgcagagctacagcccggcgcgcgccgccgccctgcgcaccgtcaacacggtcgagtcgctggcgcgcgcggtgcccggggccctaccgggcgcggcggggacggcgggggcggccgagcacaagtcgcagacctacaccaacggcttcggcgccctgcgcgacggcctggagttcgccgacgccgacgcgccgaccgcgcgctcgaacggtgagtgcggccgtggcggcccggggccggtgcagcggcgctgccagcgcgagaactgtgcgttctacgggcgcgccgagaccgagcactactgctcctactgctaccgcgaggagctgcggcggcggcgcgaggcgcgcggggcccggccctgagcggcgcggcgcggcgcgggcggcgaggttctaccttcgaggatttcttttccattgtgtcggtgtcttttttacatgccctggtccaccggaaggccggcgcctcctctgtcagtgccgtgtacgtgtttggtcaaacgttcctaatggtgcctgaacctacactga

SEQ ID NO: 21257 - DNA, 724 bp, Homo sapiens
  source 1..724: mol_type = unassigned DNA
ggggaggagaggccaccgggaccgcgagcggcagctggggagggggccgcggagcccgagcgggagcaaaacagctgatctggttttcctttaaagcgagagaaaatggaagtcgggtagcggcgactgcggcgctgcgggctggcggagcggagcggcgcggcgcggcagagttctcaggcgctgtggtctcaccttccactggggcaacaatgggccatttccagcagggacggcgcagtgttggcctgcatgcctgactgccacacacctccagaatcaggtgtctgaaaagtggcagtgacgaaagaagagactctcccggccgaggccccagtgcatggagagaaggaagaaatcaatttcctaattggtaccatatacatcagatggatggtttctagtgtgcttccaaaccccacctcggctgagtgttgggcagcacttctacatgatcctatgactcttgatatggacgcagtcctgtcagactttgttcggtccacgggggcagaacctggtctggccagagacctgctggaaggcaaaaactgggacctgacagccgctctgagcgactatgagcagctccgccaggtgcacacagccaatctgccacatgtgttcaatgaagggcggggtcccaagcagccagagcgagagccacagcccgggcacaaggtggagcgaccctgcctgcagaggcaggacgacattgcccaag

SEQ ID NO: 21258 - DNA, 6352 bp, Homo sapiens
  source 1..6352: mol_type = unassigned DNA
gggcaaaaagccactgggggaggccagtcccgatcagtcctttctggctccagctccagatcccgtgcggagcaacagctgcggtcgcagtctccaccaccgcctccacctccatcgccgtcgggggaggggccggccggaccccggggtcactgccgaggaatgaagagaggcggccgggccccgcgctccgccccggcctagggccttgccccgggagcccgcgagggtggaggcctgaattttgatctatgttctacctacatccagctggctgaaagtacttgaggatcacatgaccctggacatggatgctgttctgtcagattttgtccgttccacaggagcagagccagggctagcgcgagatctcctagaaggaaagaattgggatgtgaatgccgccctcagtgattttgaacagctacgtcaagtccatgctggaaacctacccccatcctttagtgaggggagtggtggctccaggacccctgaaaaagggttttctgacagagagcctactcgccctccccgacccatcctccagcggcaggatgacatcgttcaagaaaaacgcctgtctaggggcatctcccacgccagctccagcattgtttccctggcccggtcccatgtctcctccaatggtgggggtggggggagcaatgagcaccccctggaaatgcccatctgtgccttccagcttccagatctcactgtatacaatgaagacttccgcagcttcatagagagagacctcattgagcagtccatgctggttgccttggaacaggcagggcgtttgaactggtgggtgagtgtggatcccacctctcagaggctgcttcctttggcaactactggagatgggaactgcctcctgcatgcagcctcccttggaatgtggggtttccatgatcgggacttgatgctgcggaaagctttgtatgcactgatggagaagggagttgagaaggaagcgttgaaaaggcgctggaggtggcagcagacacagcagaataaagagtcagggctggtatacacagaagatgaatggcagaaggagtggaatgaactgatcaagcttgcctcaagtgaaccccgaatgcatctaggtaccaatggagccaactgtggtggggtggagagttctgaggagcctgtatatgagagccttgaagagtttcacgtctttgtccttgctcatgtgcttaggaggcccatagtcgtcgtggcagacaccatgctgagggactccggaggggaagcatttgcccctattccctttggaggaatctatctgcctttggaggtcccagccagccagtgtcaccgctcccctctggtgctcgcctatgatcaggcccacttttctgcactcgtgtccatggagcagaaggagaataccaaggaacaagctgtgatcccacttacagattcagagtataagctgctgcccttgcactttgctgtggaccctggaaagggctgggagtggggcaaagatgatagtgacaatgtccgattggccagtgtaattctgtccctagaggtcaaattgcatctgctgcatagctacatgaatgtgaagtggatcccactgtcctctgatgcacaggctcctctggcccagcctgagtcccccaccgcctcagctggagatgagccccggtccactcctgagtctggagactcagacaaggagtcagttggcagcagttccaccagcaacgagggcggccggcggaaggagaagtcaaagcgagatcgggagaaggacaagaagagagcagattctgtggctaacaaactgggcagctttggcaaaaccttgggcagcaagctcaagaagaacatggggggcctgatgcacagcaagggttcaaagcctggaggggtggggacagggttgggaggaagcagcggcactgagacactggagaagaagaagaaaaactcactgaagagctggaagggtggcaaggaggaggcagctggggatgggcctgtgtctgagaagcccccagctgagtctgttggtaacggagggagcaagtatagccaggaggtgatgcagagcctgagcattctgaggactgccatgcaaggggaggggaagtttatttttgttggaaccctgaagatgggtcaccgtcaccagtatcaggaggaaatgatccagcgctacctttctgatgctgaggagagattcctggcagaacagaagcagaaggaggcagagaggaagatcatgaatggaggaatagggggtggccctcctccagccaaaaagccagagccagatgctagggaagagcagccgaccggtcccccagcagagtccagggcaatggcattttccactggctaccctggggactttactatccctcggccgtctgggggcggagtccactgccaggaaccccggaggcagttggcagggggtccatgtgtcgggggcctaccaccatatgccaccttccccagacagtgccctcctgggcgaccctacccccaccaggacagcatcccttctctggagccaggcagccactctaaggatggacttcacaggggtgccttgttaccacccccctaccgagtggctgattcctatagcaatggctacagagagccccctgagccagatggatgggctggaggtctccggggccttcccccaactcagaccaaatgcaaacaaccgaactgcagcttctatggacaccctgagacaaacaacttctgttcctgttgttacagggaagaactgaggaggagggagcgggaaccggatggggagctcctggtgcacaggttctgaacgggtggaacactgaagggcaaggaggctaaacaaagttaagctcaactaattggctcatcaagaacacagtccccatgttgagggggaaaatgcagtaatgtttgtgggagcctggctggaaacttttaagtgtgtgcacacaggagtgctgccaggctggcaagagcaggtcggggctggatggcacctcaggggctgtactattcctctgcagagcttgacttgatgaggtttgaggtacaaggggaaaagatggcgattctgtcttataacctcctgggtcccatccagggacctaagagaaagtagcaggggaaggtttggtgtgtgggggtgggaggtgggcagaagtcttggggaggaatgggcaaaggaggttctcagtcaataaaaccaaagttctttaggttgggaaaaagcacatggtggagtgagaagtgtggaggggaagtgggaaattggacacatttgctattgatttgaattaagctagaaattaaggttggataaattcttccccttgaaggatctggaaagacaaggcagtaatgtgtcctcatgggtgcctgttaggaggtgggggtagtttaaatccgtttgtttagatgggaaagggaggaacttaagagggaaatccttttcctcttaaggtttatttccttccaagcagtcatatgtcatctgttacagtttgagaagagattgctgattaccccctgtcttttcctcatctaagtctttaattgtatttgtttaaagggaagagtgtggtgagaacagccgtcatgtgtgttgcattttctccaggtgaattggggcagagctgatctattttttaaccacagcaataaccatacgttggggtttgagtgcaccttgggaggggtgggaggacagacattttagccagaggctgtttcaaacaaaaccaaaaacctaagtagagcattacaggcctctgtggctgctgcgtttctgtagaaagcaacttattttattgacttttttttttaaggaaaagaaataaaaagaccccagcaagcaaaaacatttaaaaaatgatttttttccctcctacttaagtggttctttctccctttgctctacttttggagaatgaacttaacatcccggcttcttttgttaagccatagctgaccttaatctgtggttagtttattaaaataattaaaaatactttctaagaagagatatttttgatattaggactgatgttgaaacatataggggcaatttataaaaaggtagttagagaaatatattttagtgaactataaccacagagcacagatgactcccaatgagctgatctgtctttaggtttctccctttccctgacccttccctgttctctaggggctgggagtggggatgcggacacagtagggggagctccttcgcattttgcacaaagcacaagtctgaacagcctatgctctggccagagccatttctaagagctttaaaccggaagacctatcctgggccaattttcctttttctttatatttttttccgggaaaaaaagtcaactatgcaattgtatacactcccgggtgcatgtgaagaaggggaataagtgtacttatgtgtccagagtattaactggggctgtttttctgtgtttggatttctcttttgaggtatgtactcataacccatcccttggaacgtaatccccacatttgatctaaagcacttgagcgtgcatgcatgtgcgtgcgtgcatatgtgtgtgtgttttcctcctcggtagccagtcaagattgtccttgttggaaatgctcacggtttataaaggttattttctcctcaacaaactcagaagtcacctattttccaaatctgatttaataatttcctatggctattaattcttagggttttctttgaaaatagatttgtgttaaggaagcagtgagattccaaaggaagggatgtgtatatgtctaggcaggtctggaacctggtatgagatgagcactcccctaagttgcaaaatttaagggttactataaaactcattaatcaagatactataaaaaatgcagtatttaaaaaaattaatgcaaaaaatttatgttggataaaatagcgaaatcttacaggatctgacaggactgagattaggaggagggaagtgaggctgaattgaataagtatggggatgaatccttcttatttaaatttttgatacattgtccatcatagactttttacattaattgtgattttttaaaaatgttgcattaaaatagtatttatcttggttactgggttttttggcactccttaaattttgtgcccaaggtgagtgctttgctcacctcaccctagttacgtccctgtttctgtgatttgaacactagcgagaacaccactgtgtgcgcctccacccccatcacacaccaaacaacaggtggctcagacaccctgaatttgcacagctcacctagctttcctaatttaggccttcatatcatagaatggtggcctggaccaataggaatgaaaacagaccaggggttttcccagagaataaagccggaaaagttttgattctccactggactgctgtgtttggatttgatctgttgttagattctagttaacacttttgtttttaaaaactaaggacaaatgaacaaaaaaccttgtatcatgtttgtttttatttataagttagccaatcccaattccgtttgctttattttcaaataaaaaaagatggaaattttgaggggtggtctaggggtgaatatggtaaaatggggctttaggccttatagctttttattaagaaataaattattttttttatttgggagggtaactatttattgaggcattgaaaaacctctccattctaaggatgagagaccctgagacaatggatattttttataggagatagtgaagtttgttttgcttcattctttcggggagggttttggtgggatggggggaggtgaaggaataatgcctgggaaattaatatagattcagcttggtttgtggtattttgggaagatgagggaatagaagaggcaagcccatgtcgttactgggttggggagaaggaaagaaggggcatatggcctgcactcgaaatgggcagaaaaattccttagttaaggaggggtgtgtgagtgaagggggaaggtagaccctttaaccccaagtgagggatgatatcatctctcaggcttaaatttaagtgcacttagttcctttaatccagggcaactggggtacctactgaagtttttaatggagaggggagattttcagggttcttgtttttccctttttgatgttagacagtgctactccctccctgctgtgctctctgccccatctccaatggagtaagtattactgtaggataggcctccgcttctcccttaacctatgctgcatttattgaaagttacaagatttaaccagaagtttttcctccatactggtttttatcaacaaaataaaaagattatatccaaa

SEQ ID NO: 21259 - DNA, 1425 bp, Homo sapiens
  source 1..1425: mol_type = unassigned DNA
ggcaaaaagccactgggggaggccagtcccgatcagtcctttctggctccagctccagatcccgtgcggagcaacagctgcggcctgaattttgatctatgttctacctacatccagctggctgaaagtacttgaggatcacatgaccctggacatggatgctgttctgtcagattttgtccgttccacaggagcagagccagggctagcgcgagatctcctagaaggaaagaattgggatgtgaatgccgccctcagtgattttgaacagctacgtcaagtccatgctggaaacctacccccatcctttagtgaggggagtggtggctccaggacccctgaaaaagggttttctgacagagagcctactcgccctccccgacccatcctccagcggcaggatgacatcgttcaagaaaaacgcctgtctaggggcatctcccacgccagctccagcattgtttccctggcccggtcccatgtctcctccaatggtgggggtggggggagcaatgagcaccccctggaaatgcccatctgtgccttccagcttccagatctcactgtatacaatgaagacttccgcagcttcatagagagagacctcattgagcagtccatgctggttgccttggaacaggcagggcgtttgaactggtgggtgagtgtggatcccacctctcagaggctgcttcctttggcaactactggagatgggaactgcctcctgcatgcagcctcccttggaatgtggggtttccatgatcgggacttgatgctgcggaaagctttgtatgcactgatggagaagggagttgagaaggaagcgttgaaaaggcgctggaggtggcagcagacacagcagaataaagagtcagggctggtatacacagaagatgaatggcagaaggagtggaatgaactgatcaagcttgcctcaagtgaaccccgaatgcatctaggtaccaatggagccaactgtggtggggtggagagttctgaggagcctgtatatgagagccttgaagagtttcacgtctttgtccttgctcatgtgcttaggaggcccatagtcgtcgtggcagacaccatgctgagggactccggaggggaagcatttgcccctattccctttggaggaatctatctgcctttggaggtcccagccagccagtgtcaccgctcccctctggtgctcgcctatgatcaggcccacttttctgcactcgtgtccatggagcagaaggagaataccaaggaacaagctgtgatcccacttacagattcagagtataagctgctgcccttgcactttgctgtggaccctggaaagggctgggagtggggcaaagatgatagtgacaatgtccgattggccagtgtaattctgtccctagaggtcaaattgcatctgctgcatagcta

SEQ ID NO: 21260 - DNA, 2801 bp, Homo sapiens
  source 1..2801: mol_type = unassigned DNA
agcagaaagccaccgatcctgaaccagccgccggagccggagtggcgaccgggtgcggagtgggcaaaaagccactgggggaggccagtcccgatcagtcctttctggctccagctccagatcccgtgcggagcaacagctgcggtcgcagtctccaccaccgcctccacctccatcgccgtcgggggaggggccggccggaccccggggtcactgccgaggaatgaagagaggcggccgggccccgcgctccgccccggcctagggccttgccccgggagcccgcgagggtggaggcctgaattttgatctatgttctacctacatccagctggctgaaagtacttgaggatcacatgaccctggacatggatgctgttctgtcagattttgtccgttccacaggagcagagccagggctagcgcgagatctcctagaaggaaagaattgggatgtgaatgccgccctcagtgattttgaacagctacgtcaagtccatgctggaaacctacccccatcctttagtgaggggagtggtggctccaggacccctgaaaaagggttttctgacagagagcctactcgccctccccgacccatcctccagcggcaggatgacatcgttcaagaaaaacgcctgtctaggggcatctcccacgccagctccagcattgtttccctggcccggtcccatgtctcctccaatggtgggggtggggggagcaatgagcaccccctggaaatgcccatctgtgccttccagcttccagatctcactgtatacaatgaagacttccgcagcttcatagagagagacctcattgagcagtccatgctggttgccttggaacaggcagggcgtttgaactggtgggtgagtgtggatcccacctctcagaggctgcttcctttggcaactactggagatgggaactgcctcctgcatgcagcctcccttggaatgtggggtttccatgatcgggacttgatgctgcggaaagctttgtatgcactgatggagaagggagttgagaaggaagcgttgaaaaggcgctggaggtggcagcagacacagcagaataaagagtcagggctggtatacacagaagatgaatggcagaaggagtggaatgaactgatcaagcttgcctcaagtgaaccccgaatgcatctaggtaccaatggagccaactgtggtggggtggagagttctgaggagcctgtatatgagagccttgaagagtttcacgtctttgtccttgctcatgtgcttaggaggcccatagtcgtcgtggcagacaccatgctgagggactccggaggggaagcatttgcccctattccctttggaggaatctatctgcctttggaggtcccagccagccagtgtcaccgctcccctctggtgctcgcctatgatcaggcccacttttctgcactcgtgtccatggagcagaaggagaataccaaggaacaagctgtgatcccacttacagattcagagtataagctgctgcccttgcactttgctgtggaccctggaaagggctgggagtggggcaaagatgatagtgacaatgtccgattggccagtgtaattctgtccctagaggtcaaattgcatctgctgcatagctacatgaatgtgaagtggatcccactgtcctctgatgcacaggctcctctggcccagcctgagtcccccaccgcctcagctggagatgagccccggtccactcctgagtctggagactcagacaaggagtcagttggcagcagttccaccagcaacgagggcggccggcggaaggagaagtcaaagcgagatcgggagaaggacaagaagagagcagattctgtggctaacaaactgggcagctttggcaaaaccttgggcagcaagctcaagaagaacatggggggcctgatgcacagcaagggttcaaagcctggaggggtggggacagggttgggaggaagcagcggcactgagacactggagaagaagaagaaaaactcactgaagagctggaagggtggcaaggaggaggcagctggggatgggcctgtgtctgagaagcccccagctgagtctgttggtaacggagggagcaagtatagccaggaggtgatgcagagcctgagcattctgaggactgccatgcaaggggaggggaagtttatttttgttggaaccctgaagatgggtcaccgtcaccagtatcaggaggaaatgatccagcgctacctttctgatgctgaggagagattcctggcagaacagaagcagaaggaggcagagaggaagatcatgaatggaggaatagggggtggccctcctccagccaaaaagccagagccagatgctagggaagagcagccgaccggtcccccagcagagtccagggcaatggcattttccactggctaccctggggactttactatccctcggccgtctgggggcggagtccactgccaggaaccccggaggcagttggcagggggtccatgtgtcgggggcctaccaccatatgccaccttccccagacagtgccctcctgggcgaccctacccccaccaggacagcatcccttctctggagccaggcagccactctaaggatggacttcacaggggtgccttgttaccacccccctaccgagtggctgattcctatagcaatggctacagagagccccctgagccagatggatgggctggaggtctccggggccttcccccaactcagaccaaatgcaaacaaccggatggggagctcctggtgcacaggttctga

SEQ ID NO: 21261 - DNA, 1296 bp, Homo sapiens
  source 1..1296: mol_type = unassigned DNA
gctgctccgcactgcagctatggtcgcatgcagtgcctgccgaagcccgcagcaggaatgctgccttcggtgattttaatttcacttttctacttctctcaataacaaaatccgcgtttcaaactccagggaaaagaaaacggaattggctccaggaggatctgcaatcaccaccgggaactttgggaggctgggaagatggagccaaaccaatgtgtggggtggagggctgttgccaaggcggggcaacgaggaggggctcgcttccgggaggacggcaattggcaacccggaagcggtcggtagtgcggcgctgtttaaagatggcggcggaggaacctcagcagcagaagcaggagccgctgggcagcgactccgaaggtgttaactgtctggcctatgatgaagccatcatggctcagcaggaccgaattcagcaagagattgctgtgcagaaccctctggtgtcagagcggctggagctctcggtcctatacaaggagtatgctgaagatgacaacatctatcaacagaagatcaaggacctccacaaaaagtactcgtacatccgcaagaccaggcctgacggcaactgtttctatcgggctttcggattctcccacttggaggcactgctggatgacagcaaggagttgcagcggttcaaggctgtgtctgccaagagcaaggaagacctggtgtcccagggcttcactgaattcacaattgaggatttccacaacacgttcatggacctgattgagcaggtggagaagcagacctctgtcgccgacctgctggcctccttcaatgaccagagcacctccgactaccttgtggtctacctgcggctgctcacctcgggctacctgcagcgcgagagcaagttcttcgagcacttcatcgagggtggacggactgtcaaggagttctgccagcaggaggtggagcccatgtgcaaggagagcgaccacatccacatcattgcgctggcccaggccctcagcgtgtccatccaggtggagtacatggaccgcggcgagggcggcaccaccaatccgcacatcttccctgagggctccgagcccaaggtctaccttctctaccggcctggacactacgatatcctctacaaatagggctggctccagcccgctgctgccctgctgcccccctctgccaggcgctagacatgtacagaggtttttctgtggttgtaaatggtcctatttcacccccttcttcctgtcacatgacccccccccatgttttattaaagggggtgctggtggtgag

SEQ ID NO: 21262 - DNA, 1296 bp, Homo sapiens; identical to SEQ ID NO: 21261
  source 1..1296: mol_type = unassigned DNA

SEQ ID NO: 21263 - DNA, 1729 bp, Homo sapiens
  source 1..1729: mol_type = unassigned DNA
aattggcaacccggaagcggtcggtagtgcggcgctgtttaaagatggcggcggaggaacctcagcagcagaagcaggagccgctgggcagcgactccgaaggtgttaactgtctggcctatgatgaagccatcatggctcagcaggaccgaattcagcaagagattgctgtgcagaaccctctggtgtcagagcggctggagctctcggtcctatacaaggagtatgctgaagatgacaacatctatcaacagaagatcaaggacctccacaaaaagtactcgtacatccgcaagaccaggcctgacggcaactgtttctatcgggctttcggattctcccacttggaggcactgctggatgacagcaaggagttgcagcggttcaaggctgtgtctgccaagagcaaggaagacctggtgtcccagggcttcactgaattcacaattgaggatttccacaacacgttcatggacctgattgagcaggtggagaagcagacctctgtcgccgacctgctggcctccttcaatgaccagagcacctccgactaccttgtggtctacctgcggctgctcacctcgggctacctgcagcgcgagagcaagttcttcgagcacttcatcgagggtggacggactgtcaaggagttctgccagcaggaggtggagcccatgtgcaaggagagcgaccacatccacatcattgcgctggcccaggccctcagcgtgtccatccaggtggagtacatggaccgcggcgagggcggcaccaccaatccgcacatcttccctgagggctccgagcccaaggtctaccttctctaccggcctggacactacgatatcctctacaaatagggctggctccagcccgctgctgccctgctgcccccctctgccaggcgctagacatgtacagaggtttttctgtggttgtaaatggtcctatttcacccccttcttcctgtcacatgacccccccccatgttttattaaagggggtgctggtggtgagccgtgtgtgcgtgtccctgctctgctgcccgcctggctgctctgtctgctgccccctccccccaggtgggtccccctgcttttcacctatctactcctgagcttccccaacaggagcaggtttgaggggccaggcctcttggaggcccctcctgcttcgttgggttctgcttccttcccttcttagctggctcaggggcttctatgggatcctggaagttccttagggacttgcccagggtcccagggccacccacacttcatctgctccctcataggccccacctccacgtcccggctgggccccagaccccagcttcctgccctccaccgggagtctgcatggttgggagtcctgggtggaggggcctttgtgaggctggacccggctcagggcaggtggaggagctgggcctcccacagggtgcccgggcagtgccatcctggtgggggagggcagccttcaaacgtgtggggtctacagtcctcaggtctaggcagggctgccggttctccacctccccatccgccccaggccccctgcctgtgcctgccttgcaccccctctgcttgggccacggtgtctctgcattgcctgcctttttgccttcacctcttttcttccccgccccctgcacattcggggtctcagcccccaggctgtgagctccttgggggcaggccctcaataaatgtgaactgctgctgccgcc

SEQ ID NO: 21264 - DNA, 1647 bp, Homo sapiens
  source 1..1647: mol_type = unassigned DNA
gctgtttaaagatggcggcggaggaacctcagcagcagaagcaggagccgctgggcagcgactccgaaggtgttaactgtctggcctatgatgaagccatcatggctcagcaggaccgaattcagcaagaggacatgacagatccctgcctcctccagattgctgtgcagaaccctctggtgtcagagcggctggagctctcggtcctatacaaggagtatgctgaagatgacaacatctatcaacagaagatcaaggacctccacaaaaagtactcgtacatccgcaagaccaggcctgacggcaactgtttctatcgggctttcggattctcccacttggaggcactgctggatgacagcaaggagttgcagcggttcaaggctgtgtctgccaagagcaaggaagacctggtgtcccagggcttcactgaattcacaattgaggatttccacaacacgttcatggacctgattgagcaggtggagaagcagacctctgtcgccgacctgctggcctccttcaatgaccagagcacctccgactaccttgtggtctacctgcggctgctcacctcgggctacctgcagcgcgagagcaagttcttcgagcacttcatcgagggtggacggactgtcaaggagttctgccagcaggaggtggagcccatgtgcaaggagagcgaccacatccacatcattgcgctggcccaggccctcagcgtgtccatccaggtggagtacatggaccgcggcgagggcggcaccaccaatccgcacatcttccctgagggctccgagcccaaggtctaccttctctaccggcctggacactacgatatcctctacaaatagggctggctccagcccgctgctgccctgctgcccccctctgccaggcgctagacatgtacagaggtttttctgtggttgtaaatggtcctatttcacccccttcttcctgtcacatgacccccccccatgttttattaaagggggtgctggtggtgagccgtgtgtgcgtgtccctgctctgctgcccgcctggctgctctgtctgctgccccctccccccaggtgggtccccctgcttttcacctatctactcctgagcttccccaacaggagcaggtttgaggggccaggcctcttggaggcccctcctgcttcgttgggttctgcttccttcccttcttagctggctcaggggcttctatgggatcctggaagttccttagggacttgcccagggtcccagggccacccacacttcatctgctccctcataggccccacctccacgtcccggctgggccccagaccccagcttcctgccctccaccgggagtctgcatggttgggagtcctgggtggaggggcctttgtgaggctggacccggctcagggcaggtggaggagctgggcctcccacagggtgcccgggcagtgccatcctggtgggggagggcagccttcaaacgtgtggggtctacagtcctcaggtctaggcagggctgccggttctccacctccccatccgccccaggccccctgcctgtgcctgccttgcaccccctctgcttgggccacggtgtctctgcattgcctgcctttttgccttcacctcttttcttccccgccccctgca

SEQ ID NO: 21265 - DNA, 3922 bp, Homo sapiens
  source 1..3922: mol_type = unassigned DNA
acgtcaatcgcagggcgtgtgtcttgctgggacacagtggaggtctaacctttggtttgcggagcggtcgggtgtattctccgccgcccccacgccctcgaggtccccgccaccgaaccagcggcggagcccgcccgcgcctcccgcggcattcccgcaccggatcgctcctcgctggggcgggacctggcctggcggctctggtcactatgagtgaaacatctttcaacctaatatcagaaaaatgtgacattctatccattcttcgggaccatcctgaaaacaggatttaccggaggaaaatcgaggaactcagcaaaaggttcaccgccatccgcaagaccaaaggggatgggaactgcttctacagggccttgggctattcctacctggagtccctgctggggaagagcagggagatcttcaagttcaaagaacgcgtactgcagaccccaaatgaccttctggctgctggctttgaggagcacaagttcagaaacttcttcaatgctttttacagtgtggtggaactggtagagaaggatggctcagtgtccagcctgctgaaggtgttcaacgaccagagtgcctcggaccacatcgtgcagttcctgcgcctgctcacgtcggccttcatcaggaaccgagcagacttcttccggcacttcattgatgaggagatggacatcaaagacttctgcactcacgaagtagagcccatggccacggagtgtgaccacatccagatcacggcgttgtcgcaggccctgagcattgccctgcaagtggagtacgtggacgagatggataccgccctgaaccaccacgtgttccctgaggccgccaccccttccgtttacctgctctataaaacatcccactacaacatcctttatgcagccgataaacattgattaattttaggccatgcagtggaacctgtcacctaatgggactgcattctgaatggaacattccggctcttcaattttttaagcaatttagactgtagcaagaaaatgtgcagccttttgggcaaagcccctgggaacgaggcctatccactatggactatggtaacttggtaggatttttagtatttattttaatggagggacaaatgctttctaactgggcccccgactccgcaccccagttcgcagtgaggccctgggtgggtcacctgccctctctggacttgtttcttcaactggaggaggtccctgcctatgctgacattccattgtagaaaaatggggcctctggtgtctctttaccaggggcagtgcctctctgcgggggaggaaaagctcaaggttagctgtcttaacccaagtgacttaccaggcctacaaaagagtccagtccagtcacttgttggactgggctctgacagatggcctattgaggtcaacttgaatgtgagggctacggtgtggtttcaaacattcatgatggatgtattttcctacccctaacttaaggagaaaaaaaaaaagacttcctttttttgccaaagtccagaaaggggcctttagcctttagtaggagctcaaattgttggggcccctctacctctctcagggctagaactgcctgactcttggtggacgagcccttcagggttctgctttcagccccacctggacagaggcttacaagactagggtctggaccagaatctgtgtatttctgtctgggaccaggaagccgcagctgtcccatcatccccagcaaatcctagaagtggagtctggatacttcaaggatagaagtgttggcacgcacagccatggacccagctgagcagagcagacgctttgcaggctgcccctggcttcttcctccctttcccgcttctgctctctttatggactggtcagagggtaggtgggaaagaacagacaagccatgggaagttggcagtggggagatttccactgtggaaaccgcctgggaattccggccagcagcttcctccttcagccacctggccataccccttaaataagcccctcaccttgctgcctcaggaccttcaagattccatctgtgggctggccggcaagatggcaccagtggggacccacaccctggctgggcagaggtgctgctagcaacctctcttcctctataagaggaaatggaaaatgcagggtgtggaattgccctttggggtccttccttaattgaaggccaccttctcacaggtttcattctgcagggatttactggaatctattggtgctgctgcatgagtctgctgacaacctgactgcacaaggactgggtagcagactcctcagagtcctcttgacacaaatgtcagatttgtgtcactcttctgccttcgtgaaaagccaatagcactctcagatatcaggggattttagttccaagcagggaccctggtttccatactgccctcagctggagtttggatccaaaggctctggctaagtcattatgtcactttttcacaggaatgtaaatttgactgtcacctctgaatttgttcagtgtcccaccatggtctatgagaagtacactggaagcgtggggggaacacatgacatgatttgtgaatatcatcatctttgccagacaagtctccaggggatccctgtttcccaactgaaaggtgtgaacggacacacacacagcctggatgacgccttggctgttctaaggggctgtaaggtgggctctgggccttccagctaggctctcaagcacagcagaagcctcactgggctgctatgtctctgtatttgtggcttgtgtggtagcctcagaagcagagctgtttggcagactggctggagaaattccctctaggagacttgcctgtgctgtgcttccaggtcacagagccccccggaaactcacaggggccctcttcccagaaaagaatctattctatcacttcagaatcaggacactcaagctctggcagaggaaggccaagttactttcatggtcttaccctctgcttttcccctttttgcaaaaaaccactggccaaatccgaaccattgcccttgtttcccccacgttctctctcagatctttgtctcgaagggaaaacatagtggatgaaaaggtgtggcaggctttggcaccttgttaaaatttctagtcatctgtggatgttaccttgcttgtccacagcagccagtcaccctggccagtcccacttcctggataattctctaccctcaccccacagagccatctctctccagaccaaaagctggaaggagagttgctttgagagcttgtttttacaactgcatgtttattatgatactttctctccaaaggaaacttttaaatcaatgggaacaattagcaacagaaagagcacagtccctgcttttgactgggttcctattttaagcacaaatgagagctctggagccagaatgccagggttctaacttcagcattcacttactagctgtatgatcttggccaagtcacttcacctccctgagccccaattcccaagtttgtgaaatggcaacaatacctatgtgtcactggattattggttaaaacagaatgagattccttgtgtgaaaatagctattatacctgacacactcatcgtatgggctctgcaaagggatattccccaacctgtccttcctgacaggaagcatagggcactgcagatggggaagcatgtcaccttggcagtgactcggtggcttcccaagcaggagtgtcaggggaaccatgagagagagtctaggagcaaacacatcaccaccctgagcagatacaggagtggggagggggctgtaactcagtgagtggcttccaggggccccaggccctgctggatgtgggccaagccctacagcttccctaggcagtaagtaaaaacattctcctagcattaaaatggtttccataa

SEQ ID NO: 21266 - DNA, 708 bp, Homo sapiens
  source 1..708: mol_type = unassigned DNA
ctttggtttgcggagcggtcgggtgtattctccgccgcccccacgccctcgaggtccccgccaccgaaccagcggcggagcccgcccgcgcctcccgcggcattcccgcaccggatcgctcctcgctggggcgggacctggcctggcggctctggtcactatgagtgaaacatctttcaacctaatatcagaaaaatgtgacattctatccattcttcgggaccatcctgaaaacaggatttaccggaggaaaatcgaggaactcagcaaaaggttcaccgccatccgcaagaccaaaggggatgggaactgcttctacagggccttgggctattcctacctggagtccctgctggggaagagcagggagatcttcaagtgagtgccggggccccttggcctgtcagggctgtgttctctgtgctaggtcagcctcaagtctctcggaggttttcgttacactcaggctggttaacccagagaatgagctgaagagctgcctggcagaggcgtttgatgttgggggtgcccagctgcctgctgtggtgaagttgggggcagccaaggggtggaggatggaatctgtgacctcccagatgctttccagcctctgcttccaccacaggcctgggtcagcccaggtgagtcgcagggagcaggtacttcgtgacccactctgaaaagaaaagaaaagacaaacaaaaagaa

SEQ ID NO: 21267 - DNA, 1013 bp, Homo sapiens
  source 1..1013: mol_type = unassigned DNA
gaaggtggtgaggtcatagaacacaagctttaaagtaagtgaatcatgtgtgcctcatttatttttaaaagcaacttctgagaagggcttagaacaaattttttcccggagtgccatttcccaaaggtactcacagaacaatcaggtgtgaccataatggctgcactgagttgtctcttggacagtgtcagaagggacataaagaaggtggacagagaactaaggcaactgagatgcatcgacgaatttagcacacggtgcctgtgcgacttgtatatgcacccctattgctgctgtgacttgcacccatatccgtactgcttgtgctattccaagcgatcacgctcttgcggcctgtgtgatctctacccatgttgcctgtgtgattataagctttactgtctgcgaccatctctcagaagtttggagaggaaagccatcagagccatagaagatgagaagcgagagcttgccaaactgagaagaacaacaaatagaattctggcttcctcctgctgtagcagtaacattttaggatcggtgaatgtatgcggttttgaacccgatcaagtcaaagttcgagtgaaggatggaaaggtatgtgtgtcggctgagcgggagaacaggtacgactgccttggatcgaaaaagtacagctacatgaacatctgcaaagagttcagcttgccgccctgtgtggatgagaaggatgtaacatactcctatgggctcggcagctgtgtcaagatcgagtctccttgctacccttgcacttctccttgcagcccctgcagcccctgcagcccctgcaacccctgcagcccctgcaacccgtgcagcccatatgatccttgcaacccgtgttatccctgtggaagccgattttcctgtaggaagatgattttgtaaagtgcgcataggaacccattacttaatagaagtcagttactccagccaggcagctctcccaatgtttctcctctccttcccatggcccctgttgttgaagtacg

SEQ ID NO: 21268 - DNA, 3707 bp, Homo sapiens
  source 1..3707: mol_type = unassigned DNA
gagccagactgcatccgccgcggcgtctccatggcacgaccctggcctccgacttcaacgacttcataaggcggcgtttctgggcgcagccgtgtcgctcctggacagttgctgtgcgacttggacagtagaggagcgcctcccaagttttcatccaactgccaaccccaaagcttccacccttctcccctcagagaggacgtttgatgccgggccccttgagaggctcattgacaagcctgcccctctgggtccccctgagcagagcctgctgacccaattgcccacctttgcggctttgatgcctagccatgtctgcctcatcctcaggcggctcccccaggtttccatcgtgtgggaagaacggagtaacgagtctcacgcagaaaaaggtcttgagagcaccttgtggcgcacccagtgtaactgtgacgttgagatcactgtgtagaaggatccgcctgctttccgctgtgcttcactaaatccaaggaggagctgtgcattccagcaggtttagaggagatccagccctaagaaccctggggccggcgtctgggatctgttctggaacggaagccaaccatgaaggaccgctcttcaactccccccttacatgttcacgtggatgagaacacccctgtccacgtccacataaaaaaactcccgaaaccatcagcgaccagcagccagaaatctcacaagcgaggaatgaaaggggacactgtgaatgtgcggcggagtgtccgggtgaaaaccaagaatccacctcattgcctggagatcacgccaccatcttcagaaaagctggtctcagtgatgcggttaagtgacctctctacagaagatgatgactcaggtcactgtaaaatgaaccgttatgataagaagattgatagtctaatgaatgcggttggttgtctgaagtctgaggtcaagatgcaaaaaggtgagcgccagatggccaaaaggttcctggaggaacggaaggaagagctggaggaggtggcccacgaactggctgagactgagcacgagaacacggtgttgaggcacaacatcgagcgcatgaaggaggagaaggacttcaccatacttcagaagaaacacctacaacaggagaaggagtgcctcatgtccaagctggtggaggcggaaatggatggggctgcggctgccaagcaggtcatggccttgaaggataccatcgggaagctgaaaacagagaaacaaatgacctgcacggacatcaacaccctgacaaggcagaaggaacttctcctgcagaagctgagcacatttgaggagaccaaccgcaccctccgagacctcctgagggaacagcactgcaaagaggattctgaaagactaatggagcaacaaggagcactgctgaaacggctggcggaggccgactcagagaaagcgcgcctgctgttactgctgcaagacaaggacaaggaggtggaagagctccttcaggaaatacaatgtgagaaggctcaagcaaagacagcctctgagctttctaaatccatggagtccatgcgtgggcatttgcaggcacagcttcggtccaaagaggctgagaacagtcgcctgtgcatgcagattaagaatctggagcgcagcgggaatcagcataaggcagaagtggaggccatcatggagcagctgaaggagttgaagcagaagggagaccgagacaaagagagcttgaagaaggccatccgagcccagaaggagcgagccgagaagagcgaggagtatgctgagcagctacacgtgcaactcgctgacaaggatctttatgtcgctgaagctttatccactctggaatcctggaggagccgctacaaccaagttgtaaaagaaaagggagaccttgagctggaaattattgtcctgaatgaccgggtaacagatcttgtaaaccaacaacaaaccctggaggagaagatgcgggaagaccgggatagcctggtggagagactacaccgtcagactgctgagtattccgcattcaagctggagaatgagaggctgaaggccagctttgctccaatggaggacaaactcaaccaggcacacctcgaggtccagcagctgaaggcctcagtgaagaactatgaggggatgattgacaactataagagtcaggtgatgaagaccagattggaggctgatgaagtagctgcccagctagaacgctgtgacaaagagaacaagatccttaaagatgagatgaacaaagagattgaggcggcacgaaggcagttccagtctcagctggctgacctgcagcagctccctgacatcctgaagatcacggaggcgaagctggctgagtgccaagaccaactgcagggctatgagcggaagaacatcgacctcacagccatcatatcagacctgcgcagccggatcgaacaccagggggacaagctggagatggcgagagagaaacatcaggcttcccagaaggaaaataaacagctgagtctgaaggtggatgaactggagaggaaactggaggcgaccagtgcccagaatatcgagttcctacaggtgattgccaagagggaggaggcaatccaccagtcccagctgcggctggaggagaaaacacgggaatgtgggaccctggcaaggcagttggagagtgccattgaagatgcgaggaggcaggtggaacaaaccaaggagcacgcactctccaaggagcgagcagcccagaacaaaatcctggaccttgagacccagctgagcagaaccaaaacggaattgagccagctgcggcggagccgtgatgatgcggaccgccgctaccagagccggctgcaagacctgaaagatcgcctggagcagtccgagagcaccaaccgcagcatgcagaactacgtccagttcctcaaatcatcatacgccaacgtgtttggggatggtccctattccaccttcctgactagctctcccatccgctcccgatctcctcctgcctgaggccacttatcagggcctggagccctgatggaagccataggaactccagagttgccaagccatagctgagaagcctggtggttttcctctcccagtgaaaaaatgggttcagggtcttgtccttagctactagctctagaaaagtcccaaaagcagcagaaggtgaagcaggaagcacttggttttctccttcctgatatagtcacctgttggaagtgttaaaatttcctcgacaggccttaaatttactactacattagggtaccacattttaacttaccatgactttgctccttcctttcctgagaaaatatttccactggattttttccaccagtccccttacagccctcattgttttaggaatctctctcaggttttttctgacctaaaccagcaggaagtcgtcctgggctgtaagcaccatcacttgctttttttttttttctgatttcacaagtgtggtgttttcccaaggctcccttcccaagctcagtgcaaacctctcactcccaagtttctttgaggccacttgcccccaagcacttcacaatagaccctcgagggcttgtgtccatttggccttttacaagtgtaatgccaatttcattgatttttgtttcttttggcctgatttgtatctctggaatgcatttattcttgaaatatttgtgtgattttacaaaaagcttttgtaatcagtt

SEQ ID NO: 21269 - DNA, 3406 bp, Homo sapiens
  source 1..3406: mol_type = unassigned DNA
ggaagcggggaggagccgctgccagagccagactgcatccgccgcggcgtctccatggcacgaccctggcctccgacttcaacgacttcataaggcggcgtttctgggcgcagccgtgtcgctcctggtttccatcgtgtgggaagaacggagtaacgagtctcacgcagaaaaaggtcttgagagcaccttgtggcgcacccagtgtaactgtgacgaagccaaccatgaaggaccgctcttcaactccccccttacatgttcacgtggatgagaacacccctgtccacgtccacataaaaaaactcccgaaaccatcagcgaccagcagccagaaatctcacaagcgaggaatgaaaggggacactgtgaatgtgcggcggagtgtccgggtgaaaaccaaggtaccttggatgccccctggaaaatcatctgcccggcctgtgggatgcaagtgggagaatccacctcattgcctggagatcacgccaccatcttcagaaaagctggtctcagtgatgcggttaagtgacctctctacagaagatgatgactcaggtcactgtaaaatgaaccgttatgataagaagattgatagtctaatgaatgcggttggttgtctgaagtctgaggtcaagatgcaaaaaggtgagcgccagatggccaaaaggttcctggaggaacggaaggaagagctggaggaggtggcccacgaactggctgagactgagcacgagaacacggtgttgaggcacaacatcgagcgcatgaaggaggagaaggacttcaccatacttcagaagaaacacctacaacaggagaaggagtgcctcatgtccaagctggtggaggcggaaatggatggggctgcggctgccaagcaggtcatggccttgaaggataccatcgggaagctgaaaacagagaaacaaatgacctgcacggacatcaacaccctgacaaggcagaaggaacttctcctgcagaagctgagcacatttgaggagaccaaccgcaccctccgagacctcctgagggaacagcactgcaaagaggattctgaaagactaatggagcaacaaggagcactgctgaaacggctggcggaggccgactcagagaaagcgcgcctgctgttactgctgcaagacaaggacaaggaggtggaagagctccttcaggaaatacaatgtgagaaggctcaagcaaagacagcctctgagctttctaaatccatggagtccatgcgtgggcatttgcaggcacagcttcggtccaaagaggctgagaacagtcgcctgtgcatgcagattaagaatctggagcgcagcgggaatcagcataaggcagaagtggaggccatcatggagcagctgaaggagttgaagcagaagggagaccgagacaaagagagcttgaagaaggccatccgagcccagaaggagcgagccgagaagagcgaggagtatgctgagcagctacacgtgcaactcgctgacaaggatctttatgtcgctgaagctttatccactctggaatcctggaggagccgctacaaccaagttgtaaaagaaaagggagaccttgagctggaaattattgtcctgaatgaccgggtaacagatcttgtaaaccaacaacaaaccctggaggagaagatgcgggaagaccgggatagcctggtggagagactacaccgtcagactgctgagtattccgcattcaagctggagaatgagaggctgaaggccagctttgctccaatggaggacaaactcaaccaggcacacctcgaggtccagcagctgaaggcctcagtgaagaactatgaggggatgattgacaactataagagtcaggtgatgaagaccagattggaggctgatgaagtagctgcccagctagaacgctgtgacaaagagaacaagatccttaaagatgagatgaacaaagagattgaggcggcacgaaggcagttccagtctcagctggctgacctgcagcagctccctgacatcctgaagatcacggaggcgaagctggctgagtgccaagaccaactgcagggctatgagcggaagaacatcgacctcacagccatcatatcagacctgcgcagccggatcgaacaccagggggacaagctggagatggcgagagagaaacatcaggcttcccagaaggaaaataaacagctgagtctgaaggtggatgaactggagaggaaactggaggcgaccagtgcccagaatatcgagttcctacaggtgattgccaagagggaggaggcaatccaccagtcccagctgcggctggaggagaaaacacgggaatgtgggaccctggcaaggcagttggagagtgccattgaagatgcgaggaggcaggtggaacaaaccaaggagcacgcactctccaaggagcgagcagcccagaacaaaatcctggaccttgagacccagctgagcagaaccaaaacggaattgagccagctgcggcggagccgtgatgatgcggaccgccgctaccagagccggctgcaagacctgaaagatcgcctggagcagtccgagagcaccaaccgcagcatgcagaactacgtccagttcctcaaatcatcatacgccaacgtgtttggggatggtccctattccaccttcctgactagctctcccatccgctcccgatctcctcctgcctgaggccacttatcagggcctggagccctgatggaagccataggaactccagagttgccaagccatagctgagaagcctggtggttttcctctcccagtgaaaaaatgggttcagggtcttgtccttagctactagctctagaaaagtcccaaaagcagcagaaggtgaagcaggaagcacttggttttctccttcctgatatagtcacctgttggaagtgttaaaatttcctcgacaggccttaaatttactactacattagggtaccacattttaacttaccatgactttgctccttcctttcctgagaaaatatttccactggattttttccaccagtccccttacagccctcattgttttaggaatctctctcaggttttttctgacctaaaccagcaggaagtcgtcctgggctgtaagcaccatcacttgctttttttttttttctgatttcacaagtgtggtgttttcccaaggctcccttcccaagctcagtgcaaacctctcactcccaagtttctttgaggccacttgcccccaagcacttcacaatagaccctcgagggcttgtgtccatttggccttttacaagtgtaatgccaatttcattgatttttgtttcttttggcctgatttgtatctctggaatgcatttattcttgaaatatttgtgtgattttacaaaaagcttttgtaatcagtt

SEQ ID NO: 21270 - DNA, 2375 bp, Homo sapiens
  source 1..2375: mol_type = unassigned DNA
cccttctcctaggagacagttgtccggccccgccccagcatccccgcggctccctgcgcggttctggccctctggggcccacttggggccgagcggttctcacccgccctctccgcacgtccgccggcgcctcaggtttcccccggacagttgctgtgcgacttggacagtagaggagcgcctcccaagttttcatccaactgccaaccccaaagcttccacccttctcccctcagagaggacgtttgatgccgggccccttgagaggctcattgacaagcctgcccctctgggtccccctgagcagagcctgctgacccaattgcccacctttgcggctttgatgcctagccatgtctgcctcatcctcaggcggctcccccaggtttccatcgtgtgggaagaacggagtaacgagtctcacgcagaaaaaggtcttgagagcaccttgtggcgcacccagtgtaactgtgacgaaatctcacaagcgaggaatgaaaggggacactgtgaatgtgcggcggagtgtccgggtgaaaaccaagaatccacctcattgcctggagatcacgccaccatcttcagaaaagctggtctcagtgatgcggttaagtgacctctctacagaagatgatgactcaggtcactgtaaaatgaaccgttatgataagaagattgatagtctaatgaatgcggttggttgtctgaagtctgaggtcaagatgcaaaaaggtgagcgccagatggccaaaaggttcctggaggaacggaaggaagagctggaggaggtggcccacgaactggctgagactgagcacgagaacacggtgttgaggcacaacatcgagcgcatgaaggaggagaaggacttcaccatacttcagaagaaacacctacaacaggagaaggagtgcctcatgtccaagctggtggaggcggaaatggatggggctgcggctgccaagcaggtcatggccttgaaggataccatcgggaagctgaaaacagagaaacaaatgacctgcacggacatcaacaccctgacaaggcagaaggaacttctcctgcagaagctgagcacatttgaggagaccaaccgcaccctccgagacctcctgagggaacagcactgcaaagaggattctgaaagactaatggagcaacaaggagcactgctgaaacggctggcggaggccgactcagagaaagcgcgcctgctgttactgctgcaagacaaggacaaggaggtggaagagctccttcaggaaatacaatgtgagaaggctcaagcaaagacagcctctgagctttctaaatccatggagtccatgcgtgggcatttgcaggcacagcttcggtccaaagaggctgagaacagtcgcctgtgcatgcagattaagaatctggagcgcagcgggaatcagcataaggcagaagtggaggccatcatggagcagctgaaggagttgaagcagaagggagaccgagacaaagagagcttgaagaaggccatccgagcccagaaggagcgagccgagaagagcgaggagtatgctgagcagctacacgtgcaactcgctgacaaggatctttatgtcgctgaagctttatccactctggaatcctggaggagccgctacaaccaagttgtaaaagaaaagggagaccttgagctggaaattattgtcctgaatgaccgggtaacagatcttgtaaaccaacaacaaaccctggaggagaagatgcgggaagaccgggatagcctggtggagagactacaccgtcagactgctgagtattccgcattcaagctggagaatgagaggctgaaggccagctttgctccaatggaggacaaactcaaccaggcacacctcgaggtccagcagctgaaggcctcagtgaagaactatgaggggatgattgacaactataagagtcaggtgatgaagaccagattggaggctgatgaagtagctgcccagctagaacgctgtgacaaagagaacaagatccttaaagatgagatgaacaaagagattgaggcggcacgaaggcagttccagtctcagctggctgacctgcagcagctccctgacatcctgaagatcacggaggcgaagctggctgagtgccaagaccaactgcagggctatgagcggaagaacatcgacctcacagccatcatatcagacctgcgcagccgggtaagggactggcagaaagggtcccacgaactgacccgagcaggggcccgcataccaagatgagctgcacgccccccaagggaggactacttcctttttcttggctgctgctttttaaaaggagtgagctatcatcagtgctgtgaaataaaagtctggtgtgccaaa

SEQ ID NO: 21271 - DNA, 3505 bp, Homo sapiens
  source 1..3505: mol_type = unassigned DNA
gagccagactgcatccgccgcggcgtctccatggcacgaccctggcctccgacttcaacgacttcataaggcggcgtttctgggcgcagccgtgtcgctcctggacagttgctgtgcgacttggacagtagaggagcgcctcccaagttttcatccaactgccaaccccaaagcttccacccttctcccctcagagaggacgtttgatgccgggccccttgagaggctcattgacaagcctgcccctctgggtccccctgagcagagcctgctgacccaattgcccacctttgcggctttgatgcctagccatgtctgcctcatcctcaggcggctcccccaggtttccatcgtgtgggaagaacggagtaacgagtctcacgcagaaaaaggtcttgagagcaccttgtggcgcacccagtgtaactgtgacgaaatctcacaagcgaggaatgaaaggggacactgtgaatgtgcggcggagtgtccgggtgaaaaccaaggtaccttggatgccccctggaaaatcatctgcccggcctgtgggatgcaagtgggagaatccacctcattgcctggagatcacgccaccatcttcagaaaagctggtctcagtgatgcggttaagtgacctctctacagaagatgatgactcaggtcactgtaaaatgaaccgttatgataagaagattgatagtctaatgaatgcggttggttgtctgaagtctgaggtcaagatgcaaaaaggtgagcgccagatggccaaaaggttcctggaggaacggaaggaagagctggaggaggtggcccacgaactggctgagactgagcacgagaacacggtgttgaggcacaacatcgagcgcatgaaggaggagaaggacttcaccatacttcagaagaaacacctacaacaggagaaggagtgcctcatgtccaagctggtggaggcggaaatggatggggctgcggctgccaagcaggtcatggccttgaaggataccatcgggaagctgaaaacagagaaacaaatgacctgcacggacatcaacaccctgacaaggcagaaggaacttctcctgcagaagctgagcacatttgaggagaccaaccgcaccctccgagacctcctgagggaacagcactgcaaagaggattctgaaagactaatggagcaacaaggagcactgctgaaacggctggcggaggccgactcagagaaagcgcgcctgctgttactgctgcaagacaaggacaaggaggtggaagagctccttcaggaaatacaatgtgagaaggctcaagcaaagacagcctctgagctttctaaatccatggagtccatgcgtgggcatttgcaggcacagcttcggtccaaagaggctgagaacagtcgcctgtgcatgcagattaagaatctggagcgcagcgggaatcagcataaggcagaagtggaggccatcatggagcagctgaaggagttgaagcagaagggagaccgagacaaagagagcttgaagaaggccatccgagcccagaaggagcgagccgagaagagcgaggagtatgctgagcagctacacgtgcaactcgctgacaaggatctttatgtcgctgaagctttatccactctggaatcctggaggagccgctacaaccaagttgtaaaagaaaagggagaccttgagctggaaattattgtcctgaatgaccgggtaacagatcttgtaaaccaacaacaaaccctggaggagaagatgcgggaagaccgggatagcctggtggagagactacaccgtcagactgctgagtattccgcattcaagctggagaatgagaggctgaaggccagctttgctccaatggaggacaaactcaaccaggcacacctcgaggtccagcagctgaaggcctcagtgaagaactatgaggggatgattgacaactataagagtcaggtgatgaagaccagattggaggctgatgaagtagctgcccagctagaacgctgtgacaaagagaacaagatccttaaagatgagatgaacaaagagattgaggcggcacgaaggcagttccagtctcagctggctgacctgcagcagctccctgacatcctgaagatcacggaggcgaagctggctgagtgccaagaccaactgcagggctatgagcggaagaacatcgacctcacagccatcatatcagacctgcgcagccggatcgaacaccagggggacaagctggagatggcgagagagaaacatcaggcttcccagaaggaaaataaacagctgagtctgaaggtggatgaactggagaggaaactggaggcgaccagtgcccagaatatcgagttcctacaggtgattgccaagagggaggaggcaatccaccagtcccagctgcggctggaggagaaaacacgggaatgtgggaccctggcaaggcagttggagagtgccattgaagatgcgaggaggcaggtggaacaaaccaaggagcacgcactctccaaggagcgagcagcccagaacaaaatcctggaccttgagacccagctgagcagaaccaaaacggaattgagccagctgcggcggagccgtgatgatgcggaccgccgctaccagagccggctgcaagacctgaaagatcgcctggagcagtccgagagcaccaaccgcagcatgcagaactacgtccagttcctcaaatcatcatacgccaacgtgtttggggatggtccctattccaccttcctgactagctctcccatccgctcccgatctcctcctgcctgaggccacttatcagggcctggagccctgatggaagccataggaactccagagttgccaagccatagctgagaagcctggtggttttcctctcccagtgaaaaaatgggttcagggtcttgtccttagctactagctctagaaaagtcccaaaagcagcagaaggtgaagcaggaagcacttggttttctccttcctgatatagtcacctgttggaagtgttaaaatttcctcgacaggccttaaatttactactacattagggtaccacattttaacttaccatgactttgctccttcctttcctgagaaaatatttccactggattttttccaccagtccccttacagccctcattgttttaggaatctctctcaggttttttctgacctaaaccagcaggaagtcgtcctgggctgtaagcaccatcacttgctttttttttttttctgatttcacaagtgtggtgttttcccaaggctcccttcccaagctcagtgcaaacctctcactcccaagtttctttgaggccacttgcccccaagcacttcacaatagaccctcgagggcttgtgtccatttggccttttacaagtgtaatgccaatttcattgatttttgtttcttttggcctgatttgtatctctggaatgcatttattcttgaaatatttgtgtgattttacaaaaagcttttgtaatcagtt

SEQ ID NO: 21272 - DNA, 2249 bp, Homo sapiens
  source 1..2249: mol_type = unassigned DNA
acccaagcggctcccgggggggtttgaactggccaatgggcgagctgccgaccgggtgtcggaaaaggaggcggaagcggggaggagccgctgccagagccagactgcatccgccgcggcgtctccatggcacgaccctggcctccgacttcaacgacttcataaggcggcgtttctgggcgcagccgtgtcgctcctggtttccatcgtgtgggaagaacggagtaacgagtctcacgcagaaaaaggtcttgagagcaccttgtggcgcacccagtgtaactgtgacgaaatctcacaagcgaggaatgaaaggggacactgtgaatgtgcggcggagtgtccgggtgaaaaccaaggtaccttggatgccccctggaaaatcatctgcccggcctgtgggatgcaagtgggagaatccacctcattgcctggagatcacgccaccatcttcagaaaagctggtctcagtgatgcggttaagtgacctctctacagaagatgatgactcaggtcactgtaaaatgaaccgttatgataagaagattgatagtctaatgaatgcggttggttgtctgaagtctgaggtcaagatgcaaaaaggtgagcgccagatggccaaaaggttcctggaggaacggaaggaagagctggaggaggtggcccacgaactggctgagactgagcacgagaacacggtgttgaggcacaacatcgagcgcatgaaggaggagaaggacttcaccatacttcagaagaaacacctacaacaggagaaggagtgcctcatgtccaagctggtggaggcggaaatggatggggctgcggctgccaagcaggtcatggccttgaaggataccatcgggaagctgaaaacagagaaacaaatgacctgcacggacatcaacaccctgacaaggcagaaggaacttctcctgcagaagctgagcacatttgaggagaccaaccgcaccctccgagacctcctgagggaacagcactgcaaagaggattctgaaagactaatggagcaacaaggagcactgctgaaacggctggcggaggccgactcagagaaagcgcgcctgctgttactgctgcaagacaaggacaaggaggtggaagagctccttcaggaaatacaatgtgagaaggctcaagcaaagacagcctctgagctttctaaatccatggagtccatgcgtgggcatttgcaggcacagcttcggtccaaagaggctgagaacagtcgcctgtgcatgcagattaagaatctggagcgcagcgggaatcagcataaggcagaagtggaggccatcatggagcagctgaaggagttgaagcagaagggagaccgagacaaagagagcttgaagaaggccatccgagcccagaaggagcgagccgagaagagcgaggagtatgctgagcagctacacgtgcaactcgctgacaaggatctttatgtcgctgaagctttatccactctggaatcctggaggagccgctacaaccaagttgtaaaagaaaagggagaccttgagctggaaattattgtcctgaatgaccgggtaacagatcttgtaaaccaacaacaaaccctggaggagaagatgcgggaagaccgggatagcctggtggagagactacaccgtcagactgctgagtattccgcattcaagctggagaatgagaggctgaaggccagctttgctccaatggaggacaaactcaaccaggcacacctcgaggtccagcagctgaaggcctcagtgaagaactatgaggggatgattgacaactataagagtcaggtgatgaagaccagattggaggctgatgaagtagctgcccagctagaacgctgtgacaaagagaacaagatccttaaagatgagatgaacaaagagattgaggcggcacgaaggcagttccagtctcagctggctgacctgcagcagctccctgacatcctgaagatcacggaggcgaagctggctgagtgccaagaccaactgcagggctatgagcggaagaacatcgacctcacagccatcatatcagacctgcgcagccgggtaagggactggcagaaagggtcccacgaactgacccgagcaggggcccgcataccaagatgagctgcacgccccccaagggaggactacttcctttttcttggctgctgctttttaaaaggagtgagctatcatcagtgctgtgaaataaaagtctggtgtgccaaatgc

SEQ ID NO: 21273 - DNA, 2086 bp, Homo sapiens
  source 1..2086: mol_type = unassigned DNA
aattgagaagatggcggaccagcaaggacctcatcagaataggtttccatcgtgtgggaagaacggagtaacgagtctcacgcagaaaaaggtcttgagagcaccttgtggcgcacccagtgtaactgtgacgaaatctcacaagcgaggaatgaaaggggacactgtgaatgtgcggcggagtgtccgggtgaaaaccaaggtaccttggatgccccctggaaaatcatctgcccggcctgtgggatgcaagtgggagaatccacctcattgcctggagatcacgccaccatcttcagaaaagctggtctcagtgatgcggttaagtgacctctctacagaagatgatgactcaggtcactgtaaaatgaaccgttatgataagaagattgatagtctaatgaatgcggttggttgtctgaagtctgaggtcaagatgcaaaaaggtgagcgccagatggccaaaaggttcctggaggaacggaaggaagagctggaggaggtggcccacgaactggctgagactgagcacgagaacacggtgttgaggcacaacatcgagcgcatgaaggaggagaaggacttcaccatacttcagaagaaacacctacaacaggagaaggagtgcctcatgtccaagctggtggaggcggaaatggatggggctgcggctgccaagcaggtcatggccttgaaggataccatcgggaagctgaaaacagagaaacaaatgacctgcacggacatcaacaccctgacaaggcagaaggaacttctcctgcagaagctgagcacatttgaggagaccaaccgcaccctccgagacctcctgagggaacagcactgcaaagaggattctgaaagactaatggagcaacaaggagcactgctgaaacggctggcggaggccgactcagagaaagcgcgcctgctgttactgctgcaagacaaggacaaggaggtggaagagctccttcaggaaatacaatgtgagaaggctcaagcaaagacagcctctgagctttctaaatccatggagtccatgcgtgggcatttgcaggcacagcttcggtccaaagaggctgagaacagtcgcctgtgcatgcagattaagaatctggagcgcagcgggaatcagcataaggcagaagtggaggccatcatggagcagctgaaggagttgaagcagaagggagaccgagacaaagagagcttgaagaaggccatccgagcccagaaggagcgagccgagaagagcgaggagtatgctgagcagctacacgtgcaactcgctgacaaggatctttatgtcgctgaagctttatccactctggaatcctggaggagccgctacaaccaagttgtaaaagaaaagggagaccttgagctggaaattattgtcctgaatgaccgggtaacagatcttgtaaaccaacaacaaaccctggaggagaagatgcgggaagaccgggatagcctggtggagagactacaccgtcagactgctgagtattccgcattcaagctggagaatgagaggctgaaggccagctttgctccaatggaggacaaactcaaccaggcacacctcgaggtccagcagctgaaggcctcagtgaagaactatgaggggatgattgacaactataagagtcaggtgatgaagaccagattggaggctgatgaagtagctgcccagctagaacgctgtgacaaagagaacaagatccttaaagatgagatgaacaaagagattgaggcggcacgaaggcagttccagtctcagctggctgacctgcagcagctccctgacatcctgaagatcacggaggcgaagctggctgagtgccaagaccaactgcagggctatgagcggaagaacatcgacctcacagccatcatatcagacctgcgcagccgggtaagggactggcagaaagggtcccacgaactgacccgagcaggggcccgcataccaagatgagctgcacgccccccaagggaggactacttcctttttcttggctgctgctttttaaaaggagtgagctatcatcagtgctgtgaaataaaagtctggtgtgcc

SEQ ID NO: 21274 - DNA, 793 bp, Homo sapiens
  source 1..793: mol_type = unassigned DNA
ccgccgcggcgtctccatggcacgaccctggcctccgacttcaacgacttcataaggcggcgtttctgggcgcagccgtgtcgctcctggtttccatcgtgtgggaagaacggagtaacgagtctcacgcagaaaaaggtcttgagagcaccttgtggcgcacccagtgtaactgtgacgatcaaccatttttgtgttgtcctcccccacctgccagaagccaaccatgaaggaccgctcttcaactccccccttacatgttcacgtggatgagaacacccctgtccacgtccacataaaaaaactcccgaaaccatcagcgaccagcagccagaaatctcacaagcgaggaatgaaaggggacactgtgaatgtgcggcggagtgtccgggtgaaaaccaaggtcaagatgcaaaaaggtgagcgccagatggccaaaaggttcctggaggaacggaaggaagagctggaggaggtggcccacgaactggctgagactgagcacgagaacacggtgttgaggcacaacatcgagcgcatgaaggaggagaaggacttcaccatacttcagaagaaacacctacaacaggagaaggagtgcctcatgtccaagctggtggaggcggaaatggatggggctgcggctgccaagcaggtcatggccttgaaggataccatcgggaagctgaaaacagagaaacaaatgacctgcacggacatcaacaccctgacaaggcagaaggaacttctcctgcagaagctgagcacatttgaggagaccaaccgcaccctc

SEQ ID NO: 21275 - DNA, 935 bp, Homo sapiens
  source 1..935: mol_type = unassigned DNA
ccgcctccttcctctcttggctaccacggggctctgcccctcctctgccgcccgcgggcagggcttcacctttctctctatgggcagaaaccggtaccctcctgcctgctggacagttgctgtgcgacttggacagtagaggagcgcctcccaagttttcatccaactgccaaccccaaagcttccacccttctcccctcagagaggacgtttgatgccgggccccttgagaggctcattgacaagcctgcccctctgggtccccctgagcagagcctgctgacccaattgcccacctttgcggctttgatgcctagccatgtctgcctcatcctcaggcggctcccccaggtttccatcgtgtgggaagaacggagtaacgagtctcacgcagaaaaaggtcttgagagcaccttgtggcgcacccagtgtaactgtgacgaaatctcacaagcgaggaatgaaaggggacactgtgaatgtgcggcggagtgtccgggtgaaaaccaaggtcaagatgcaaaaaggtgagcgccagatggccaaaaggttcctggaggaacggaaggaagagctggaggaggtggcccacgaactggctgagactgagcacgagaacacggtgttgaggcacaacatcgagcgcatgaaggaggagaaggacttcaccatacttcagaagaaacacctacaacaggagaaggagtgcctcatgtccaagctggtggaggcggaaatggatggggctgcggctgccaagcaggtcatggccttgaaggataccatcgggaagctgaaaacagagaaacaaatgacctgcacggacatcaacaccctgacaaggcagaaggaacttctcctgcagaagctgagcacatttgaggagaccaaccgcaccctccgagacctcctgagggaacagcactgcaaagagg

SEQ ID NO: 21276 - DNA, 905 bp, Homo sapiens
  source 1..905: mol_type = unassigned DNA
ccaccggcgcggggcctctcctcctcccgctaacgggcggtcggccgcctccttcctctcttggctaccacggggctctgcccctcctctgccgcccgcgggcagggcttcacctttctctctatgggcagaaaccggtaccctcctgcctgctggacagttgctgtgcgacttggacagtagaggagcgcctcccaagttttcatccaactgccaaccccaaagcttccacccttctcccctcagagaggacgtttgatgccgggccccttgagaggctcattgacaagcctgcccctctgggtccccctgagcagagcctgctgacccaattgcccacctttgcggctttgatgcctagccatgtctgcctcatcctcaggcggctcccccaggtttccatcgtgtgggaagaacggagtaacgagtctcacgcagaaaaaggtcttgagagcaccttgtggcgcacccagtgtaactgtgacgaaatctcacaagcgaggaatgaaaggggacactgtgaatgtgcggcggagtgtccgggtgaaaaccaaggtaccttggatgccccctggaaaatcatctgcccggcctgtgggatgcaagtgggagaatccacctcattgcctggagatcacgccaccatcttcagaaaagctggtctcagtgatgcggttaagtgacctctctacagaagatgatgactcaggtcactgtaaaatgaaccgttatgataagaagattgatagtctaatgaatgcggttggttgtctgaagtctgaggtcaagatgcaaaaaggtgagcgccagatggccaaaaggttcctggaggaacggaaggaagagctggaggaggtggcccacgaactggctgagactgagcacgagaacacggtgttgaggca

SEQ ID NO: 21277 - DNA, 828 bp, Homo sapiens
  source 1..828: mol_type = unassigned DNA
aacgacttcataaggcggcgtttctgggcgcagccgtgtcgctcctggtttccatcgtgtgggaagaacggagtaacgagtctcacgcagaaaaaggtcttgagagcaccttgtggcgcacccagtgtaactgtgacgatcaaccatttttgtgttgtcctcccccacctgccagaagccaaccatgaaggaccgctcttcaactccccccttacatgttcacgtggatgagaacacccctgtccacgtccacataaaaaaactcccgaaaccatcagcgaccagcagccagaaatctcacaagcgaggaatgaaaggggacactgtgaatgtgcggcggagtgtccgggtgaaaaccaagaatccacctcattgcctggagatcacgccaccatcttcagaaaagctggtctcagtgatgcggttaagtgacctctctacagaagatgatgactcaggtcactgtaaaatgaaccgttatgataagaagattgatagtctaatgaatgcggttggttgtctgaagtctgaggtcaagatgcaaaaaggtgagcgccagatggccaaaaggttcctggaggaacggaaggaagagctggaggaggtggcccacgaactggctgagactgagcacgagaacacggtgttgaggcacaacatcgagcgcatgaaggaggagaaggacttcaccatacttcagaagaaacacctacaacaggagaaggagtgcctcatgtccaagctggtggaggcggaaatggatggggctgcggctgccaagcaggtcatggccttgaaggataccatcgggaagctgaaaacagtagg

SEQ ID NO: 21278 - DNA, 822 bp, Homo sapiens
  source 1..822: mol_type = unassigned DNA
gggcctctcctcctcccgctaacgggcggtcggccgcctccttcctctcttggctaccacggggctctgcccctcctctgccgcccgcgggcagggcttcacctttctctctatgggcagaaaccggtaccctcctgcctgctggacagttgctgtgcgacttggacagtagaggagcgcctcccaagttttcatccaactgccaaccccaaagcttccacccttctcccctcagagaggacgtttgatgccgggccccttgagaggctcattgacaagcctgcccctctgggtccccctgagcagagcctgctgacccaattgcccacctttgcggctttgatgcctagccatgtctgcctcatcctcaggcggctcccccaggtttccatcgtgtgggaagaacggagtaacgagtctcacgcagaaaaaggtcttgagagcaccttgtggcgcacccagtgtaactgtgacgaaatctcacaagcgaggaatgaaaggggacactgtgaatgtgcggcggagtgtccgggtgaaaaccaagaatccacctcattgcctggagatcacgccaccatcttcagaaaagctggtctcagtgatgcggttaagtgacctctctacagaagatgatgactcaggtcactgtaaaatgaaccgttatgataagaagattgatagtctaatgaatgcggttggttgtctgaagtctgaggtcaagatgcaaaaaggtgagcgccagatggccaaaaggttcctggaggaacggaaggaagagctggaggaggtggcccacgaactggctgagactgagcacgagaa

SEQ ID NO: 21279 - DNA, 2069 bp, Homo sapiens
  source 1..2069: mol_type = unassigned DNA
cagactgcatccgccgcggcgtctccatggcacgaccctggcctccgacttcaacgacttcataaggcggcgtttctgggcgcagccgtgtcgctcctggtttccatcgtgtgggaagaacggagtaacgagtctcacgcagaaaaaggtcttgagagcaccttgtggcgcacccagtgtaactgtgacgatcaaccatttttgtgttgtcctcccccacctgccagaagccaaccatgaaggaccgctcttcaactccccccttacatgttcacgtggatgagaacacccctgtccacgtccacataaaaaaactcccgaaaccatcagcgaccagcagccagaaatctcacaagcgaggaatgaaaggggacactgtgaatgtgcggcggagtgtccgggtgaaaaccaaggtcaagatgcaaaaaggtgagcgccagatggccaaaaggttcctggaggaacggaaggaagagctggaggaggtggcccacgaactggctgagactgagcacgagaacacggtgttgaggcacaacatcgagcgcatgaaggaggagaaggacttcaccatacttcagaagaaacacctacaacaggagaaggagtgcctcatgtccaagctggtggaggcggaaatggatggggctgcggctgccaagcaggtcatggccttgaaggataccatcgggaagctgaaaacagagaaacaaatgacctgcacggacatcaacaccctgacaaggcagaaggaacttctcctgcagaagctgagcacatttgaggagaccaaccgcaccctccgagacctcctgagggaacagcactgcaaagaggattctgaaagactaatggagcaacaaggagcactgctgaaacggctggcggaggccgactcagagaaagcgcgcctgctgttactgctgcaagacaaggacaaggaggtggaagagctccttcaggaaatacaatgtgagaaggctcaagcaaagacagcctctgagctttctaaatccatggagtccatgcgtgggcatttgcaggcacagcttcggtccaaagaggctgagaacagtcgcctgtgcatgcagattaagaatctggagcgcagcgggaatcagcataaggcagaagtggaggccatcatggagcagctgaaggagttgaagcagaagggagaccgagacaaagagagcttgaagaaggccatccgagcccagaaggagcgagccgagaagagcgaggagtatgctgagcagctacacgtgcaactcgctgacaaggatctttatgtcgctgaagctttatccactctggaatcctggaggagccgctacaaccaagttgtaaaagaaaagggagaccttgagctggaaattattgtcctgaatgaccgggtaacagatcttgtaaaccaacaacaaaccctggaggagaagatgcgggaagaccgggatagcctggtggagagactacaccgtcagactgctgagtattccgcattcaagctggagaatgagaggctgaaggccagctttgctccaatggaggacaaactcaaccaggcacacctcgaggtccagcagctgaaggcctcagtgaagaactatgaggggatgattgacaactataagagtcaggtgatgaagaccagattggaggctgatgaagtagctgcccagctagaacgctgtgacaaagagaacaagatccttaaagatgagatgaacaaagagattgaggcggcacgaaggcagttccagtctcagctggctgacctgcagcagctccctgacatcctgaagatcacggaggcgaagctggctgagtgccaagaccaactgcagggctatgagcggaagaacatcgacctcacagccatcatatcagacctgcgcagccgggtaagggactggcagaaagggtcccacgaactgacccgagcaggggcccgcataccaagatgagctgcacgccccccaagggaggactacttcctttttcttggctgctgctttttaaaaggagtgagctatcatcagtgctgtgaaataaaagtctggtgtgcc

SEQ ID NO: 21280 - DNA, 937 bp, Homo sapiens
  source 1..937: mol_type = unassigned DNA
agactgcatccgccgcggcgtctccatggcacgaccctggcctccgacttcaacgacttcataaggcggcgtttctgggcgcagccgtgtcgctcctggtttccatcgtgtgggaagaacggagtaacgagtctcacgcagaaaaaggtcttgagagcaccttgtggcgcacccagtgtaactgtgacgatcaaccatttttgtgttgtcctcccccacctgccagaagccaaccatgaaggaccgctcttcaactccccccttacatgttcacgtggatgagaacacccctgtccacgtccacataaaaaaactcccgaaaccatcagcgaccagcagccagaaatctcacaagcgaggaatgaaaggggacactgtgaatgtgcggcggagtgtccgggtgaaaaccaaggtaccttggatgccccctggaaaatcatctgcccggcctgtgggatgcaagtgggagacttcagaagaaacacctacaacaggagaaggagtgcctcatgtccaagctggtggaggcggaaatggatggggctgcggctgccaagcaggtcatggccttgaaggataccatcgggaagctgaaaacagagaaacaaatgacctgcacggacatcaacaccctgacaaggcagaaggaacttctcctgcagaagctgagcacatttgaggagaccaaccgcaccctccgagacctcctgagggaacagcactgcaaagaggattctgaaagactaatggagcaacaaggagcactgctgaaacggctggcggaggccgactcagagaaagcgcgcctgctgttactgctgcaagacaaggacaaggaggtggaagagctccttcaggaaatacaatgtgagaaggctcaagcaaagacagcctctgagctttctaaatccatggagtccatgcgtgggcatttgca

SEQ ID NO: 21281 - DNA, 2140 bp, Homo sapiens
  source 1..2140: mol_type = unassigned DNA
accggcgcggggcctctcctcctcccgctaacgggcggtcggccgcctccttcctctcttggctaccacggggctctgcccctcctctgccgcccgcgggcagggcttcacctttctctctatgggcagaaaccggtaccctcctgcctgctggtttccatcgtgtgggaagaacggagtaacgagtctcacgcagaaaaaggtcttgagagcaccttgtggcgcacccagtgtaactgtgacgaaatctcacaagcgaggaatgaaaggggacactgtgaatgtgcggcggagtgtccgggtgaaaaccaagaatccacctcattgcctggagatcacgccaccatcttcagaaaagctggtctcagtgatgcggttaagtgacctctctacagaagatgatgactcaggtcactgtaaaatgaaccgttatgataagaagattgatagtctaatgaatgcggttggttgtctgaagtctgaggtcaagatgcaaaaaggtgagcgccagatggccaaaaggttcctggaggaacggaaggaagagctggaggaggtggcccacgaactggctgagactgagcacgagaacacggtgttgaggcacaacatcgagcgcatgaaggaggagaaggacttcaccatacttcagaagaaacacctacaacaggagaaggagtgcctcatgtccaagctggtggaggcggaaatggatggggctgcggctgccaagcaggtcatggccttgaaggataccatcgggaagctgaaaacagagaaacaaatgacctgcacggacatcaacaccctgacaaggcagaaggaacttctcctgcagaagctgagcacatttgaggagaccaaccgcaccctccgagacctcctgagggaacagcactgcaaagaggattctgaaagactaatggagcaacaaggagcactgctgaaacggctggcggaggccgactcagagaaagcgcgcctgctgttactgctgcaagacaaggacaaggaggtggaagagctccttcaggaaatacaatgtgagaaggctcaagcaaagacagcctctgagctttctaaatccatggagtccatgcgtgggcatttgcaggcacagcttcggtccaaagaggctgagaacagtcgcctgtgcatgcagattaagaatctggagcgcagcgggaatcagcataaggcagaagtggaggccatcatggagcagctgaaggagttgaagcagaagggagaccgagacaaagagagcttgaagaaggccatccgagcccagaaggagcgagccgagaagagcgaggagtatgctgagcagctacacgtgcaactcgctgacaaggatctttatgtcgctgaagctttatccactctggaatcctggaggagccgctacaaccaagttgtaaaagaaaagggagaccttgagctggaaattattgtcctgaatgaccgggtaacagatcttgtaaaccaacaacaaaccctggaggagaagatgcgggaagaccgggatagcctggtggagagactacaccgtcagactgctgagtattccgcattcaagctggagaatgagaggctgaaggccagctttgctccaatggaggacaaactcaaccaggcacacctcgaggtccagcagctgaaggcctcagtgaagaactatgaggggatgattgacaactataagagtcaggtgatgaagaccagattggaggctgatgaagtagctgcccagctagaacgctgtgacaaagagaacaagatccttaaagatgagatgaacaaagagattgaggcggcacgaaggcagttccagtctcagctggctgacctgcagcagctccctgacatcctgaagatcacggaggcgaagctggctgagtgccaagaccaactgcagggctatgagcggaagaacatcgacctcacagccatcatatcagacctgcgcagccgggtaagggactggcagaaagggtcccacgaactgacccgagcaggggcccgcataccaagatgagctgcacgccccccaagggaggactacttcctttttcttggctgctgctttttaaaaggagtgagctatcatcagtgctgtgaaataaaagtctggtgtgcc

SEQ ID NO: 21282 - DNA, 1307 bp, Homo sapiens
  source 1..1307: mol_type = unassigned DNA
attctagagtttagagtgggggacctctccccaattctgtaagcccatgaggagagaggaaggcctttctctccatgctccttttgcgggaactccctggcaccaaggccaggggggaaaggacagtctctgatgaggatgggtctctaggctgctctgagtgctgtccctgcactgaagaagttatagttccctcccaggcggccccctccctgcccctcagctcagcctcaatcaagaagttccccatctttgaccactccaagtaggagaaaccggcccagggctcccttagagccgagaacagtgagctggccatgacggaggaggtatggatgggtacctggaggccccatcgcccccggggacccatcatggccctctacagcagccctggacccaagtacctgattccaccaacaacaggcttcatgaagcacacgcccaccaagctgcgtgcaccggcctacagcttccgtggggcccccatgctcctggcagagaactgctccccagggccccgttacaatgtaaaccccaagatactgaggactggcaaggaccttggccctgcctactccatcctggggcgctaccaaaccaagaccatgctgactcctggtccaggtgactactttccagagaaatccaccaagtacgtgttcgactcagcacccagccactccatctctgcccggacaaaggcattccgagtggacagcaccccaggccccgctgcgtacatgctgcccatggtaatggggcccaataccgtcggcaaggcctcccagccctccttttccatcaagggccgcagcaagctgggcggcttcagcgacgacctacacaagaccccaggtcccgcagcctaccgccaaactgatgtgcgggtgaccaagttcaaggctccgcagtacaccatggctgcccgtgtggagcccccaggggacaagaccctcaagccaggaccaggcgcccacagccctgagaaggtgaccctgaccaagccctgcgccccagttgtcaccttcggcatcaaacactctgattacatgactcccctgctggttgatgtggaataacgccagccctgctgtgccccatcacacccggcatctacacaagatccgccgggccacagagctcgaggctgtcttcaccagctgggctgggccagcctggccctgcagggcagagcacgcttgtttgggcaattgtaatcagttactttttttctatgctattttaccattttttaatcttgttttctgctgtgcccaaattattaataaatcagattgcattaa

SEQ ID NO: 21283 - DNA, 711 bp, Homo sapiens
  source 1..711: mol_type = unassigned DNA
cctctccccaattctgtaagcccatgaggagagaggaaggcctttctctccatgctccttttgcgggaactccctggcaccaaggccaggggggaaaggacagtctctgatgaggatgggtctctaggctgctctgagtgctgtccctgcactgaagaagttatagttccctcccaggcggccccctccctgcccctcagctcagcctcaatcaagaagttccccatctttgaccactccaagtaggagaaaccggcccagggctcccttagagccgagaacagtgagctggccatgacggaggaggtatggatgggtacctggaggccccatcgcccccggggacccatcatggccctctacagcagccctggacccaagtacctgattccaccaacaacaggcttcatgaagcacacgcccaccaagctgcgtgcaccggcctacagcttccgtggggcccccatgctcctggcagagaactgctccccagggccccgttacaatgtaaaccccaagatactgaggactggcaaggaccttggccctgcctactccatcctggggcgctaccaaaccaagaccatgctgactcctggtccagccctgaagtcagcatttccatcctggacaccccctgacccgacttggtcaccacctgtgttggagcccagaggccccacgcctagaatgttggggagtcctccttga

SEQ ID NO: 21284 - DNA, 892 bp, Homo sapiens
  source 1..892: mol_type = unassigned DNA
cctctccccaattctgtaagcccatgaggagagaggaaggcctttctctccatgctccttttgcgggaactccctggcaccaaggccaggggggaaaggacagtctctgatgaggatgggtctctaggctgctctgagtgctgtccctgcactgaagaagttatagttccctcccaggcggccccctccctgcccctcagctcagcctcaatcaagaagttccccatctttgaccactccaagtaggagaaaccggcccagggctcccttagagccgagaacagtgagctggccatgacggaggaggtatggatgggtacctggaggccccatcgcccccggggacccatcatggccctctacagcagccctggacccaagtacctgattccaccaacaacaggcttcatgaagcacacgcccaccaagctgcgtgcaccggcctacagcttccgtggggcccccatgctcctggcagagaactgctccccacccaataccgtcggcaaggcctcccagccctccttttccatcaagggccgcagcaagctgggcggcttcagcgacgacctacacaaggtgaccctgaccaagccctgcgccccagttgtcaccttcggcatcaaacactctgattacatgactcccctgctggttgatgtggaataacgccagccctgctgtgccccatcacacccggcatctacacaagatccgccgggccacagagctcgaggctgtcttcaccagctgggctgggccagcctggccctgcagggcagagcacgcttgtttgggcaattgtaatcagttactttttttctatgctattttaccattttttaatcttgttttctgctgtgcccaaattattaataaatcagattgcatt

SEQ ID NO: 21285 - DNA, 1156 bp, Homo sapiens
  source 1..1156: mol_type = unassigned DNA
ctgaatgggttggggccttctcttggatcaagagtctcttatttgatcgaggtctgttattagacttcctcattctttctcagacctcaggctgcatggtggcagctgatgaaaatatccaaaagatgagaagagacaattgagtctggtgagggaaaggggagacagagggtgaagtggtgctcaagatggatgcagagtactctgggaatgagttccccaggtcagaaggagaaagagaccaacatcagagacctggaaaggaaaggaagagtggggaggcaggatggggcacaggtgagctgggacaagatgggagactgctgtcctccaccctctccctcagtagtaacaggtccttgggccagcgccagaactctccgctgccctttcaatggagaatcacacacagcttccgctggatggcccaggtgttggcctctgagctcagcctggttgcctttatcctactattggtcgtggccttctccaagaaatggctggacctctctaggagcctcttctaccagcgctggcccgtggatgtcagcaacagaatccacacatcagcccacgttatgtccatggggctcctgcacttttacaaatccaggagctgttctgacttagagaatgggaaagtcaccttcatcttctccaccctcatgctattccccattaacatctggatcttcgagttggaaaggaatgtatccatccccataggctggagctatttcattggttggctggtgcttatcctatacttcacctgcgcgatcctttgctacttcaaccataaaagtttctggagtctgattctgagccaccccagtggtgccgtgtcctgcagcagcagtttcggctcagtagaagaatctccaagggcacagacgatcacagacacccccatcacccaggagggagtcctggatcctgagcagaaggatacacatgtgtaatcttttctgaactcctggcaccaagttctgtccattcatctgaccccatctcctcatcctcccccagcccttgaataggttggtcctcatcattgcaaggaatgagaaagggaggattttgcactcctctgctttctccctgccttgattgagcttgagtgatgtggaataaattgtccgtctcttctttctca

SEQ ID NO: 21286 - DNA, 1728 bp, Homo sapiens
  source 1..1728: mol_type = unassigned DNA
atggtaacgtggctttacagatttttacccacttcaaatatggccgccaagctccgttctcttttaccgcctgatctgcggctacaattctggcttcatgcccgcctccaaaagtgcttcctctcgaggggttgtggttcttactgcgcaggcgcaaaagcaagtcctcttccgggcaaaatggcgatgggactaatgtgcggacgccgggagcttctgcgcttgctacagtccgggcgtcgggtccacagcgtcgcagggccctcgcaatggcttgggaaaccgctgaccacacggctcctattcccagcagccccgtgctgctgtcgcccacactacctcttccttgcggcttccggcccccgcagcctcagtacctctgctatctcttttgcagaagtccaggttcaggcccctcctgttgttgctgcaactccctcacccacagcagtacctgaggtggcttctggagagactgcagatgtagtccaaactgctgcagagcagagcttcgctgaactggggctggggtcatacaccccagtgggactgatccagaatttactggaatttatgcatgttgatctgggcctaccttggtggggggccattgctgcatgtacagtctttgcccgctgcctgatttttcctctcatcgtgacgggccagcgagaggcagccaggatccacaatcacttgccagagatccagaagttttccagtcgaatcagagaggccaagttagcaggagaccatattgagtattacaaggcttcctcggagatggcactttaccagaaaaaacatggtattaaactctataaacctctcattctccctgtgactcaggccccaatcttcatctccttcttcattgctttgagagagatggccaaccttcctgtgcccagcctgcagacaggtggcctctggtggttccaggatctcacggtatccgatcccatctacatattaccactggcagtcactgctacaatgtgggctgttcttgagctaggtgctgagacaggtgtgcaaagttctgaccttcagtggatgagaaatgtcatcagaatgatgcccctgataaccttgcccataaccatgcatttccccacggcagtgtttatgtactggctctcctccaatttgttttccctggtccaagtatcctgtctccggattccagcagtacgcactgtacttaaaatcccccagcgtgttgtacatgacctggacaaattacctccacgggaaggcttcctagagagcttcaaaaaaggctggaaaaatgctgaaatgacgcgtcagctgcgagagcgtgaacaacgcatgcggaatcagttggagctagcagccaggggtcctttacgacagacctttacccacaaccctctcctacaacctggaaaggataaccctcccaatatccctagcagcagcagcaaaccaaagtcaaagtatccctggcacgacacacttggctgacttatgttctgtgcgcattctggcaggaattctgtctcttcagagactcatcctcaaaacaagacttgacactgtgtccttgccccagtcctaggaactgtggcacacagagatgttcattttaaaaacggatttcatgaaacactcttgtacttatgtttataagagagcactgggtagccaagtgatcttcccattcacagagttagtaaacctctgtactacatgctgcttcctgat

SEQ ID NO: 21287 - DNA, 1750 bp, Homo sapiens
  source 1..1750: mol_type = unassigned DNA
gtgcggacgccgggagcttctgcgcttgctacagtccgggcgtcgggtaaggatgccccggggcagagcaccgggatgctgccctgacccagtgaaccaggccccaggacagctcgtgctaggggtatcagcagacgctgacctgctcaccgggacctgaatgtcatgacctcgggtcatgtgaggacgcgctagggttagtccccgacactatgggcccagcagcccggtgtcagcttctggaattggcttggctcctggcgagagcacctcggcctcgttctcagggccctccgatgtgggtctgcgataactgagatgcggggaacccaggtccacagcgtcgcagggccctcgcaatggcttgggaaaccgctgaccacacggctcctattcccagcagccccgtgctgctgtcgcccacactacctcttccttgcggcttccggcccccgcagcctcagtacctctgctatctcttttgcagaagtccaggttcaggcccctcctgttgttgctgcaactccctcacccacagcagtacctgaggtggcttctggagagactgcagatgtagtccaaactgctgcagagcagagcttcgctgaactggggctggggtcatacaccccagtgggactgatccagaatttactggaatttatgcatgttgatctgggcctaccttggtggggggccattgctgcatgtacagtctttgcccgctgcctgatttttcctctcatcgtgacgggccagcgagaggcagccaggatccacaatcacttgccagagatccagaagttttccagtcgaatcagagaggccaagttagcaggagaccatattgagtattacaaggcttcctcggagatggcactttaccagaaaaaacatggtattaaactctataaacctctcattctccctgtgactcaggccccaatcttcatctccttcttcattgctttgagagagatggccaaccttcctgtgcccagcctgcagacaggtggcctctggtggttccaggatctcacggtatccgatcccatctacatattaccactggcagtcactgctacaatgtgggctgttcttgagctaggtgctgagacaggtgtgcaaagttctgaccttcagtggatgagaaatgtcatcagaatgatgcccctgataaccttgcccataaccatgcatttccccacggcagtgtttatgtactggctctcctccaatttgttttccctggtccaagtatcctgtctccggattccagcagtacgcactgtacttaaaatcccccagcgtgttgtacatgacctggacaaattacctccacgggaaggcttcctagagagcttcaaaaaaggctggaaaaatgctgaaatgacgcgtcagctgcgagagcgtgaacaacgcatgcggaatcagttggagctagcagccaggggtcctttacgacagacctttacccacaaccctctcctacaacctggaaaggataaccctcccaatatccctagcagcagcagcaaaccaaagtcaaagtatccctggcacgacacacttggctgacttatgttctgtgcgcattctggcaggaattctgtctcttcagagactcatcctcaaaacaagacttgacactgtgtccttgccccagtcctaggaactgtggcacacagagatgttcattttaaaaacggatttcatgaaacactcttgtacttatgtttataagagagca

SEQ ID NO: 21288 - DNA, 1944 bp, Homo sapiens
  source 1..1944: mol_type = unassigned DNA
aaatctttgtctctagcaaactgttttgtcactgtagtaaggctctagtgctggaaatttatctttgacagaggaagaatgcttttgaaaacagttcttacgtgattttatgtaacttaatttgccctggaaaggaaatgtctcgtctctggtatgggaaaaaagggagaagacatcaaccaattaatcataaatacactctggtagtgtcagtggctgagtatcaccgcaggatcgatgctctaaatactgaagaactgcgcacactctgcagacgcctccagattactacaagggaagacataaattcaaagcaggttgctacagtgaaagcagacctggagtctgaatcttttcgaccaaacctaagtgatcccagtgaacttttactgccagatcaaattgaaaagcttaccaagcatcttccaccaagaacaattggctatccatggactcttgtttatggtactggaaaacatggcacaagcttgaaaactctttatcgaacaatgacaggtttagacaccccagtgctgatggtgattaaagacagtgatggacaggtttttggtgcgttagcatctgagccactgaaagtgagtgatggcttttatggtactggagagacctttgtttttacattctgtccggagtttgaggtctttaagtggacaggagataatatgttttttatcaaaggagacatggattcactagctttcggtggtggaggaggagaatttgcgctttggcttgatggagatctctaccatggaagaagccattcttgtaaaacgtttgggaatcgtacactttctaagaaggaagatttctttatccaagatattgaaatctgggcttttgaataaataaaatgctctctgtcttagcaggagaatggcccaaacctgacatggacaagcattgtttggaaagttcaagaagcaatacagtgtaacatgtcacttgtgctttaaaattagtctgtatcaccatttattacagttataattttggagtttatttttcaaatcatgttcttgtcccagagttctttaggttaacactagggactgcgtccatgtactagtataacagcttgggtttgttagaatttgggcaacattttgattataatgacaacttcattttcacatgttactcagttccctaataggatggtgctcttttgttgaacctgtattgatttttttttttttaactatattgattcgtttactagaacagtctaattggggcattgaggaaatgaagactggatacttctgtatctgtgaagttggcacaggtaacatttggacatgttcatcttattcttaggaaggaaaaaatcacttgccaaaataatacatacttcatagaccactgagttctagtttttattcacactacaacattctctttaacgatgttgcaggtattctcaatttccttttaagaaaaatgaaatgtgaggagaattctggttgtaatagatgacagtacatatgatctgcaggtttgggcatatgctttcatcattaaattatctgataaagttacaagtcacaaaggagaatgagaacttaatgattctattggatttaatatattagcaagaaaacatactatttacatatgtgtagcttagtaaggcattaacataagtacaaaaactatgaaacagatgcatatttcctcaacatactgtgtcaggtatactgttttataatttggttgttttagccttattgcacaccaactcccaaaatataggttactcttgttcaaaaggaaaaaaaaaattgtgattttctttgagtggtatatgttattaattaccattagcatttgctcttataaagggcaatgattatagtagacaatattgtaactcagtagacttgttgaatatgcaaacttactgtcaagtgacctcaaaaa

SEQ ID NO: 21289 - DNA, 4406 bp, Homo sapiens
  source 1..4406: mol_type = unassigned DNA
gcctcttgtgaggcgcgcggagccgcctcccctgggtcaggtctgatgggccggtgggcgcgctagtggtggccgccaccgccgaaaccgtcgacctcctgggccccagttccgcgtccagccccgcggcagcatggactacctgacgacgttcaccgagaagagtgggcgccttctgcggggcacggccaaccgcctgttggggttcgggggcggcggcgaagcccggcaggtgcgcttcgaagattacctgagggagccagcccagggggacctcgggtgcgggtccccgccccaccggcccccggcgccgtccagcccggagggacctgacactggccaaaagaagaccctagacaagaaagatggaagacgaatgtcttttcagaaacctaaagggactattgagtatactgttgaatcaagggattctttgaatagcatagccctgaagtttgatacaacacctaacgaacttgttcaattaaataagttattctcccgagcagttgttactggacaggttctgtatgttcctgatcctgaatatgtctccagtgttgagagctctccatctctaagccccgtaagtcctctgtcaccaacatcatctgaggctgaatttgataagaccactaatcctgatgtccatccaacagaagcaactccctcatctactttcactggtattcgacctgcacgagttgtatcttcaacttctgaggaggaggaagcatttactgagaaatttcttaaaattaattgcaaatatattaccagtggcaagggcacagtcagtggtgtgctgctagttacaccaaataatataatgtttgatccacataaaaatgaccctttggttcaagagaatggctgtgaggaatatggcatcatgtgtccaatggaagaggtgatgtcagctgcaatgtacaaagaaattttggatagcaaaataaaggaatctttacccatagatatagatcagctatcaggaagggacttctgccattcaaagaaaatgacaggaagtaacactgaggaaatagactcaagaatccgagatgcaggtaatgatagtgccagcactgctcctaggagcactgaggagtctctttctgaagatgtgttcacagaatcagaactttcccctatacgagaggagcttgtatcttcagatgaactgcgacaagataaatcttctggtgcgtcatcagaatctgtgcaaactgtcaatcaggctgaagtagaaagtctgacagtcaaatcagaatctactggtactcctggtcacttaagatctgatactgaacattctacaaatgaagttgggactttatgtcataaaactgatttaaataatcttgaaatggccattaaggaagatcagattgcagataactttcaaggaatatcaggtcctaaagaagacagcacaagtataaaaggtaattcagaccaggattcttttcttcatgagaattcgttacaccaagaagagagtcaaaaagaaaatatgccttgtggggaaacagcagaatttaaacaaaagcaaagtgttaacaaaggaaaacaaggaaaggagcaaaatcaggactcacagacagaggcagaagagctacgcaaactttggaaaacccatactatgcaacaaactaaacagcaaagggaaaatattcaacaagtgtcacaaaaagaagctaagcataaaattacatctgctgatggacacatagaaagttctgcacttttaaaagaaaagcaaaggcatcgattacataagttcttgtgtctcagagttggaaaaccaatgaggaaaacgtttgtatctcaagcaagtgctacaatgcaacagtatgcacagagagataagaaacatgaatattggtttgctgtgccacaagaaaggacagatcacttgtatgccttcttcattcagtggagtccagaaatatatgcagaagatactggcgaatataccagagaacctggatttatagtagtaaaaaagattgaggagtctgaaacaattgaggattctagtaatcaagcagcagccagagaatgggagattactacaagggaagacataaattcaaagcaggttgctacagtgaaagcagacctggagtctgaatcttttcgaccaaacctaagtgatcccagtgaacttttactgccagatcaaattgaaaagcttaccaagcatcttccaccaagaacaattggctatccatggactcttgtttatggtactggaaaacatggcacaagcttgaaaactctttatcgaacaatgacaggtttagacaccccagtgctgatggtgattaaagacagtgatggacaggtttttggtgcgttagcatctgagccactgaaagtgagtgatggcttttatggtactggagagacctttgtttttacattctgtccggagtttgaggtctttaagtggacaggagataatatgttttttatcaaaggagacatggattcactagctttcggtggtggaggaggagaatttgcgctttggcttgatggagatctctaccatggaagaagccattcttgtaaaacgtttgggaatcgtacactttctaagaaggaagatttctttatccaagatattgaaatctgggcttttgaataaataaaatgctctctgtcttagcaggagaatggcccaaacctgacatggacaagcattgtttggaaagttcaagaagcaatacagtgtaacatgtcacttgtgctttaaaattagtctgtatcaccatttattacagttataattttggagtttatttttcaaatcatgttcttgtcccagagttctttaggttaacactagggactgcgtccatgtactagtataacagcttgggtttgttagaatttgggcaacattttgattataatgacaacttcattttcacatgttactcagttccctaataggatggtgctcttttgttgaacctgtattgatttttttttttttaactatattgattcgtttactagaacagtctaattggggcattgaggaaatgaagactggatacttctgtatctgtgaagttggcacaggtaacatttggacatgttcatcttattcttaggaaggaaaaaatcacttgccaaaataatacatacttcatagaccactgagttctagtttttattcacactacaacattctctttaacgatgttgcaggtattctcaatttccttttaagaaaaatgaaatgtgaggagaattctggttgtaatagatgacagtacatatgatctgcaggtttgggcatatgctttcatcattaaattatctgataaagttacaagtcacaaaggagaatgagaacttaatgattctattggatttaatatattagcaagaaaacatactatttacatatgtgtagcttagtaaggcattaacataagtacaaaaactatgaaacagatgcatatttcctcaacatactgtgtcaggtatactgttttataatttggttgttttagccttattgcacaccaactcccaaaatataggttactcttgttcaaaaggaaaaaaaaaattgtgattttctttgagtggtatatgttattaattaccattagcatttgctcttataaagggcaatgattatagtagacaatattgtaactcagtagacttgttgaatatgcaaacttactgtcaagtgacctcaaaaaaaaaatgaaaagatagaatacactagtagttcttatcctcttttgtaggaaaccaataatagccattgtggcaataattcatcagttgattttaaagcttcatgttatgcaaaaaagaatcctgctgttatacatgtgacagtgactttgtgctgaaatttcagctattccagataaacattgtatatcttgtaaattaatgtttaaaggtgtagttttgttcttacagaaagtgttgattgccaggttgcttatagcactttaagttattctaaaaatgaaattataagccaaatatttggcttaagtagatttagttgtatagcacttacatatttagttcttttgaaagtttagataattatttaaagaaagcataatgctaatggaaaagaaaatctgatgttctattataatatgctattgctgaatatgaatagaaatacagggcatcatttccttgtctcattataagttagtaacaatatatagattaaatgtttacaatatagggaattgtaaataaatatatcagtttttttccccttcggtcttccacagcagtattattgtctttgtggagttgactaatgataatttaaaaatcctgtaatggatttctactaaaataaggtcatagtggcatataccaaataaaatcaaatacagaaatacaaa

SEQ ID NO: 21290 - DNA, 2956 bp, Homo sapiens
  source 1..2956: mol_type = unassigned DNA
aacgagacatctagtacggggctcacaggtaacagaactctgatcagatccgccccggctcccacacagctataaggttgcctgcctgcctgcacagaaatgacgaaggacaaaaacagcccagggctgaagaaaaagtcccagtcggtggatattaatgctccagggttcaaccctttggctggtgcaggaaagcaaacaccacaagccagtaagcccccggcacccaagacccccatcattgaagaagagcagaacaatgcagcaaatactcagaaacatccttccagaaggagcgaactgaagaggttctacacaattgacactggccaaaagaagaccctagacaagaaagatggaagacgaatgtcttttcagaaacctaaagggactattgagtatactgttgaatcaagggattctttgaatagcatagccctgaagtttgatacaacacctaacgaacttgttcaattaaataagttattctcccgagcagttgttactggacaggttctgtatgttcctgatcctgaatatgtctccagtgttgagagctctccatctctaagccccgtaagtcctctgtcaccaacatcatctgaggctgaatttgataagaccactaatcctgatgtccatccaacagaagcaactccctcatctactttcactggtattcgacctgcacgagttgtatcttcaacttctgaggaggaggaagcatttactgagaaatttcttaaaattaattgcaaatatattaccagtggcaagggcacagtcagtggtgtgctgctagttacaccaaataatataatgtttgatccacataaaaatgaccctttggttcaagagaatggctgtgaggaatatggcatcatgtgtccaatggaagaggtgatgtcagctgcaatgtacaaagaaattttggatagcaaaataaaggaatctttacccatagatatagatcagctatcaggaagggacttctgccattcaaagaaaatgacaggaagtaacactgaggaaatagactcaagaatccgagatgcaggtaatgatagtgccagcactgctcctaggagcactgaggagtctctttctgaagatgtgttcacagaatcagaactttcccctatacgagaggagcttgtatcttcagatgaactgcgacaagataaatcttctggtgcgtcatcagaatctgtgcaaactgtcaatcaggctgaagtagaaagtctgacagtcaaatcagaatctactggtactcctggtcacttaagatctgatactgaacattctacaaatgaagttgggactttatgtcataaaactgatttaaataatcttgaaatggccattaaggaagatcagattgcagataactttcaaggaatatcaggtcctaaagaagacagcacaagtataaaaggtaattcagaccaggattcttttcttcatgagaattcgttacaccaagaagagagtcaaaaagaaaatatgccttgtggggaaacagcagaatttaaacaaaagcaaagtgttaacaaaggaaaacaaggaaaggagcaaaatcaggactcacagacagaggcagaagagctacgcaaactttggaaaacccatactatgcaacaaactaaacagcaaagggaaaatattcaacaagtgtcacaaaaagaagctaagcataaaattacatctgctgatggacacatagaaagttctgcacttttaaaagaaaagcaaaggcatcgattacataagttcttgtgtctcagagttggaaaaccaatgaggaaaacgtttgtatctcaagcaagtgctacaatgcaacagtatgcacagagagataagaaacatgaatattggtttgctgtgccacaagaaaggacagatcacttgtatgccttcttcattcagtggagtccagaaatatatgcagaagatactggcgaatataccagagaacctggatttatagtagtaaaaaagattgaggagtctgaaacaattgaggattctagtaatcaagcagcagccagagaatgggaggtagtgtcagtggctgagtatcaccgcaggatcgatgctctaaatactgaagaactgcgcacactctgcagacgcctccagattactacaagggaagacataaattcaaagcaggttgctacagtgaaagcagacctggagtctgaatcttttcgaccaaacctaagtgatcccagtgaacttttactgccagatcaaattgaaaagcttaccaagcatcttccaccaagaacaattggctatccatggactcttgtttatggtactggaaaacatggcacaagcttgaaaactctttatcgaacaatgacaggtttagacaccccagtgctgatggtgattaaagacagtgatggacaggtttttggtgcgttagcatctgagccactgaaagtgagtgatggcttttatggtactggagagacctttgtttttacattctgtccggagtttgaggtctttaagtggacaggagataatatgttttttatcaaaggagacatggattcactagctttcggtggtggaggaggagaatttgcgctttggcttgatggagatctctaccatggaagaagccattcttgtaaaacgtttgggaatcgtacactttctaagaaggaagatttctttatccaagatattgaaatctgggcttttgaataaataaaatgctctctgtcttagcaggagaatggcccaaacctgacatggacaagcattgtttggaaagttcaagaagcaatacagtgtaacatgtcacttgtgctttaaaattagtctgtatcaccatttattacagttataattttggagtttatttttcaaatcatgttcttgtcccagagttctttaggttaacactagggactgcgtccatgtactagtataacagctt

SEQ ID NO: 21291 - DNA, 4550 bp, Homo sapiens
  source 1..4550: mol_type = unassigned DNA
attcacctcgcggccacaggagctcagcgccggcgccgcgccgcccagccccgccgagaggggcgcactcgccgccgcggggcccgccgccgctcaccgcagccccctcctggcgacccgcaagtcctctcaaactgtgagtaactaagtggtttgtgcatcattccagaagcaaagctaaaatttttagcggtgttgtcgacttgacctgctaatttcctgttctggaatcgagagaagactcctcaacaagttgctgcaatgtctgtgtctaatctatcatggctgaagaaaaagtcccagtcggtggatattaatgctccagggttcaaccctttggctggtgcaggaaagcaaacaccacaagccagtaagcccccggcacccaagacccccatcattgaagaagagcagaacaatgcagcaaatactcagaaacatccttccagaaggagcgaactgaagaggttctacacaattgacactggccaaaagaagaccctagacaagaaagatggaagacgaatgtcttttcagaaacctaaagggactattgagtatactgttgaatcaagggattctttgaatagcatagccctgaagtttgatacaacacctaacgaacttgttcaattaaataagttattctcccgagcagttgttactggacaggttctgtatgttcctgatcctgaatatgtctccagtgttgagagctctccatctctaagccccgtaagtcctctgtcaccaacatcatctgaggctgaatttgataagaccactaatcctgatgtccatccaacagaagcaactccctcatctactttcactggtattcgacctgcacgagttgtatcttcaacttctgaggaggaggaagcatttactgagaaatttcttaaaattaattgcaaatatattaccagtggcaagggcacagtcagtggtgtgctgctagttacaccaaataatataatgtttgatccacataaaaatgaccctttggttcaagagaatggctgtgaggaatatggcatcatgtgtccaatggaagaggtgatgtcagctgcaatgtacaaagaaattttggatagcaaaataaaggaatctttacccatagatatagatcagctatcaggaagggacttctgccattcaaagaaaatgacaggaagtaacactgaggaaatagactcaagaatccgagatgcaggtaatgatagtgccagcactgctcctaggagcactgaggagtctctttctgaagatgtgttcacagaatcagaactttcccctatacgagaggagcttgtatcttcagatgaactgcgacaagataaatcttctggtgcgtcatcagaatctgtgcaaactgtcaatcaggctgaagtagaaagtctgacagtcaaatcagaatctactggtactcctggtcacttaagatctgatactgaacattctacaaatgaagttgggactttatgtcataaaactgatttaaataatcttgaaatggccattaaggaagatcagattgcagataactttcaaggaatatcaggtcctaaagaagacagcacaagtataaaaggtaattcagaccaggattcttttcttcatgagaattcgttacaccaagaagagagtcaaaaagaaaatatgccttgtggggaaacagcagaatttaaacaaaagcaaagtgttaacaaaggaaaacaaggaaaggagcaaaatcaggactcacagacagaggcagaagagctacgcaaactttggaaaacccatactatgcaacaaactaaacagcaaagggaaaatattcaacaagtgtcacaaaaagaagctaagcataaaattacatctgctgatggacacatagaaagttctgcacttttaaaagaaaagcaaaggcatcgattacataagttcttgtgtctcagagttggaaaaccaatgaggaaaacgtttgtatctcaagcaagtgctacaatgcaacagtatgcacagagagataagaaacatgaatattggtttgctgtgccacaagaaaggacagatcacttgtatgccttcttcattcagtggagtccagaaatatatgcagaagatactggcgaatataccagagaacctggatttatagtagtaaaaaagattgaggagtctgaaacaattgaggattctagtaatcaagcagcagccagagaatgggagattactacaagggaagacataaattcaaagcaggttgctacagtgaaagcagacctggagtctgaatcttttcgaccaaacctaagtgatcccagtgaacttttactgccagatcaaattgaaaagcttaccaagcatcttccaccaagaacaattggctatccatggactcttgtttatggtactggaaaacatggcacaagcttgaaaactctttatcgaacaatgacaggtttagacaccccagtgctgatggtgattaaagacagtgatggacaggtttttggtgcgttagcatctgagccactgaaagtgagtgatggcttttatggtactggagagacctttgtttttacattctgtccggagtttgaggtctttaagtggacaggagataatatgttttttatcaaaggagacatggattcactagctttcggtggtggaggaggagaatttgcgctttggcttgatggagatctctaccatggaagaagccattcttgtaaaacgtttgggaatcgtacactttctaagaaggaagatttctttatccaagatattgaaatctgggcttttgaataaataaaatgctctctgtcttagcaggagaatggcccaaacctgacatggacaagcattgtttggaaagttcaagaagcaatacagtgtaacatgtcacttgtgctttaaaattagtctgtatcaccatttattacagttataattttggagtttatttttcaaatcatgttcttgtcccagagttctttaggttaacactagggactgcgtccatgtactagtataacagcttgggtttgttagaatttgggcaacattttgattataatgacaacttcattttcacatgttactcagttccctaataggatggtgctcttttgttgaacctgtattgatttttttttttttaactatattgattcgtttactagaacagtctaattggggcattgaggaaatgaagactggatacttctgtatctgtgaagttggcacaggtaacatttggacatgttcatcttattcttaggaaggaaaaaatcacttgccaaaataatacatacttcatagaccactgagttctagtttttattcacactacaacattctctttaacgatgttgcaggtattctcaatttccttttaagaaaaatgaaatgtgaggagaattctggttgtaatagatgacagtacatatgatctgcaggtttgggcatatgctttcatcattaaattatctgataaagttacaagtcacaaaggagaatgagaacttaatgattctattggatttaatatattagcaagaaaacatactatttacatatgtgtagcttagtaaggcattaacataagtacaaaaactatgaaacagatgcatatttcctcaacatactgtgtcaggtatactgttttataatttggttgttttagccttattgcacaccaactcccaaaatataggttactcttgttcaaaaggaaaaaaaaaattgtgattttctttgagtggtatatgttattaattaccattagcatttgctcttataaagggcaatgattatagtagacaatattgtaactcagtagacttgttgaatatgcaaacttactgtcaagtgacctcaaaaaaaaaatgaaaagatagaatacactagtagttcttatcctcttttgtaggaaaccaataatagccattgtggcaataattcatcagttgattttaaagcttcatgttatgcaaaaaagaatcctgctgttatacatgtgacagtgactttgtgctgaaatttcagctattccagataaacattgtatatcttgtaaattaatgtttaaaggtgtagttttgttcttacagaaagtgttgattgccaggttgcttatagcactttaagttattctaaaaatgaaattataagccaaatatttggcttaagtagatttagttgtatagcacttacatatttagttcttttgaaagtttagataattatttaaagaaagcataatgctaatggaaaagaaaatctgatgttctattataatatgctattgctgaatatgaatagaaatacagggcatcatttccttgtctcattataagttagtaacaatatatagattaaatgtttacaatatagggaattgtaaataaatatatcagtttttttccccttcggtcttccacagcagtattattgtctttgtggagttgactaatgataatttaaaaatcctgtaatggatttctactaaaataaggtcatagtggcatataccaaataaaatcaaatacagaaat

SEQ ID NO: 21292 - DNA, 2621 bp, Homo sapiens
  source 1..2621: mol_type = unassigned DNA
gaaattctctcttccctccccagctttacagcctccactcaggactatcattgctatggatactacttagtgattagctctctctcttgtcaatcaaatctttgtctctagcaaactgttttgtcactgtagtaaggctctagtgctggaaatttatctttgacagaggaagaatgcttttgaaaacagttcttacgtgattttatgtaacttaatttgccctggaaaggaaatgtctcgtctctggtatgggaaaaaagggagaagacatcaaccaattaatcataaatacactctgattactacaagggaagacataaattcaaagcaggttgctacagtgaaagcagacctggagtctgaatcttttcgaccaaacctaagtgatcccagtgaacttttactgccagatcaaattgaaaagcttaccaagcatcttccaccaagaacaattggctatccatggactcttgtttatggtactggaaaacatggcacaagcttgaaaactctttatcgaacaatgacaggtttagacaccccagtgctgatggtgattaaagacagtgatggacaggtttttggtgcgttagcatctgagccactgaaagtgagtgatggcttttatggtactggagagacctttgtttttacattctgtccggagtttgaggtctttaagtggacaggagataatatgttttttatcaaaggagacatggattcactagctttcggtggtggaggaggagaatttgcgctttggcttgatggagatctctaccatggaagaagccattcttgtaaaacgtttgggaatcgtacactttctaagaaggaagatttctttatccaagatattgaaatctgggcttttgaataaataaaatgctctctgtcttagcaggagaatggcccaaacctgacatggacaagcattgtttggaaagttcaagaagcaatacagtgtaacatgtcacttgtgctttaaaattagtctgtatcaccatttattacagttataattttggagtttatttttcaaatcatgttcttgtcccagagttctttaggttaacactagggactgcgtccatgtactagtataacagcttgggtttgttagaatttgggcaacattttgattataatgacaacttcattttcacatgttactcagttccctaataggatggtgctcttttgttgaacctgtattgatttttttttttttaactatattgattcgtttactagaacagtctaattggggcattgaggaaatgaagactggatacttctgtatctgtgaagttggcacaggtaacatttggacatgttcatcttattcttaggaaggaaaaaatcacttgccaaaataatacatacttcatagaccactgagttctagtttttattcacactacaacattctctttaacgatgttgcaggtattctcaatttccttttaagaaaaatgaaatgtgaggagaattctggttgtaatagatgacagtacatatgatctgcaggtttgggcatatgctttcatcattaaattatctgataaagttacaagtcacaaaggagaatgagaacttaatgattctattggatttaatatattagcaagaaaacatactatttacatatgtgtagcttagtaaggcattaacataagtacaaaaactatgaaacagatgcatatttcctcaacatactgtgtcaggtatactgttttataatttggttgttttagccttattgcacaccaactcccaaaatataggttactcttgttcaaaaggaaaaaaaaaattgtgattttctttgagtggtatatgttattaattaccattagcatttgctcttataaagggcaatgattatagtagacaatattgtaactcagtagacttgttgaatatgcaaacttactgtcaagtgacctcaaaaaaaaaatgaaaagatagaatacactagtagttcttatcctcttttgtaggaaaccaataatagccattgtggcaataattcatcagttgattttaaagcttcatgttatgcaaaaaagaatcctgctgttatacatgtgacagtgactttgtgctgaaatttcagctattccagataaacattgtatatcttgtaaattaatgtttaaaggtgtagttttgttcttacagaaagtgttgattgccaggttgcttatagcactttaagttattctaaaaatgaaattataagccaaatatttggcttaagtagatttagttgtatagcacttacatatttagttcttttgaaagtttagataattatttaaagaaagcataatgctaatggaaaagaaaatctgatgttctattataatatgctattgctgaatatgaatagaaatacagggcatcatttccttgtctcattataagttagtaacaatatatagattaaatgtttacaatatagggaattgtaaataaatatatcagtttttttccccttcggtcttccacagcagtattattgtctttgtggagttgactaatgataatttaaaaatcctgtaatggatttctactaaaataaggtcatagtggcatataccaaataaaatcaa

SEQ ID NO: 21293 - DNA, 4294 bp, Homo sapiens
  source 1..4294: mol_type = unassigned DNA
gtcctctcaaactgtgagtaactaagtggtttgtgcatcattccagaagcaaagctaaaatttttagcggtgttgtcgacttgacctgctaatttcctgttctggaatcgagagaagactcctcaacaagttgctgcaatgtctgtgtctaatctatcatggctgaagaaaaagtcccagtcggtggatattaatgctccagggttcaaccctttggctggtgcaggaaagcaaacaccacaagccagtaagcccccggcacccaagacccccatcattgaagaagagcagaacaatgcagcaaatactcagaaacatccttccagaaggagcgaactgaagaggttctacacaattgacactggccaaaagaagaccctagacaagaaagatggaagacgaatgtcttttcagaaacctaaagggactattgagtatactgttgaatcaagggattctttgaatagcatagccctgaagtttgatacaacacctaacgaacttgttcaattaaataagttattctcccgagcagttgttactggacaggttctgtatgttcctgatcctgaatatgtctccagtgttgagagctctccatctctaagccccgtaagtcctctgtcaccaacatcatctgaggctgaatttgataagaccactaatcctgatgtccatccaacagaagcaactccctcatctactttcactggtattcgacctgcacgagttgtatcttcaacttctgaggaggaggaagcatttactgagaaatttcttaaaattaattgcaaatatattaccagtggcaagggcacagtcagtggtgtgctgctagttacaccaaataatataatgtttgatccacataaaaatgaccctttggttcaagagaatggctgtgaggaatatggcatcatgtgtccaatggaagaggtgatgtcagctgcaatgtacaaagaaattttggatagcaaaataaaggaatctttacccatagatatagatcagctatcaggaagggacttctgccattcaaagaaaatgacaggaagtaacactgaggaaatagactcaagaatccgagatgcaggtaatgatagtgccagcactgctcctaggagcactgaggagtctctttctgaagatgtgttcacagaatcagaactttcccctatacgagaggagcttgtatcttcagatgaactgcgacaagataaatcttctggtgcgtcatcagaatctgtgcaaactgtcaatcaggctgaagtagaaagtctgacagtcaaatcagaatctactggtactcctggtcacttaagatctgatactgaacattctacaaatgaagttgggactttatgtcataaaactgatttaaataatcttgaaatggccattaaggaagatcagattgcagataactttcaaggaatatcaggtcctaaagaagacagcacaagtataaaaggtaattcagaccaggattcttttcttcatgagaattcgttacaccaagaagagagtcaaaaagaaaatatgccttgtggggaaacagcagaatttaaacaaaagcaaagtgttaacaaaggaaaacaaggaaaggagcaaaatcaggactcacagacagaggcagaagagctacgcaaactttggaaaacccatactatgcaacaaactaaacagcaaagggaaaatattcaacaagtgtcacaaaaagaagctaagcataaaattacatctgctgatggacacatagaaagttctgcacttttaaaagaaaagcaaaggcatcgattacataagttcttgtgtctcagagttggaaaaccaatgaggaaaacgtttgtatctcaagcaagtgctacaatgcaacagtatgcacagagagataagaaacatgaatattggtttgctgtgccacaagaaaggacagatcacttgtatgccttcttcattcagtggagtccagaaatatatgcagaagatactggcgaatataccagagaacctggatttatagtagtaaaaaagattgaggagtctgaaacaattgaggattctagtaatcaagcagcagccagagaatgggagcttaccaagcatcttccaccaagaacaattggctatccatggactcttgtttatggtactggaaaacatggcacaagcttgaaaactctttatcgaacaatgacaggtttagacaccccagtgctgatggtgattaaagacagtgatggacaggtttttggtgcgttagcatctgagccactgaaagtgagtgatggcttttatggtactggagagacctttgtttttacattctgtccggagtttgaggtctttaagtggacaggagataatatgttttttatcaaaggagacatggattcactagctttcggtggtggaggaggagaatttgcgctttggcttgatggagatctctaccatggaagaagccattcttgtaaaacgtttgggaatcgtacactttctaagaaggaagatttctttatccaagatattgaaatctgggcttttgaataaataaaatgctctctgtcttagcaggagaatggcccaaacctgacatggacaagcattgtttggaaagttcaagaagcaatacagtgtaacatgtcacttgtgctttaaaattagtctgtatcaccatttattacagttataattttggagtttatttttcaaatcatgttcttgtcccagagttctttaggttaacactagggactgcgtccatgtactagtataacagcttgggtttgttagaatttgggcaacattttgattataatgacaacttcattttcacatgttactcagttccctaataggatggtgctcttttgttgaacctgtattgatttttttttttttaactatattgattcgtttactagaacagtctaattggggcattgaggaaatgaagactggatacttctgtatctgtgaagttggcacaggtaacatttggacatgttcatcttattcttaggaaggaaaaaatcacttgccaaaataatacatacttcatagaccactgagttctagtttttattcacactacaacattctctttaacgatgttgcaggtattctcaatttccttttaagaaaaatgaaatgtgaggagaattctggttgtaatagatgacagtacatatgatctgcaggtttgggcatatgctttcatcattaaattatctgataaagttacaagtcacaaaggagaatgagaacttaatgattctattggatttaatatattagcaagaaaacatactatttacatatgtgtagcttagtaaggcattaacataagtacaaaaactatgaaacagatgcatatttcctcaacatactgtgtcaggtatactgttttataatttggttgttttagccttattgcacaccaactcccaaaatataggttactcttgttcaaaaggaaaaaaaaaattgtgattttctttgagtggtatatgttattaattaccattagcatttgctcttataaagggcaatgattatagtagacaatattgtaactcagtagacttgttgaatatgcaaacttactgtcaagtgacctcaaaaaaaaaatgaaaagatagaatacactagtagttcttatcctcttttgtaggaaaccaataatagccattgtggcaataattcatcagttgattttaaagcttcatgttatgcaaaaaagaatcctgctgttatacatgtgacagtgactttgtgctgaaatttcagctattccagataaacattgtatatcttgtaaattaatgtttaaaggtgtagttttgttcttacagaaagtgttgattgccaggttgcttatagcactttaagttattctaaaaatgaaattataagccaaatatttggcttaagtagatttagttgtatagcacttacatatttagttcttttgaaagtttagataattatttaaagaaagcataatgctaatggaaaagaaaatctgatgttctattataatatgctattgctgaatatgaatagaaatacagggcatcatttccttgtctcattataagttagtaacaatatatagattaaatgtttacaatatagggaattgtaaataaatatatcagtttttttccccttcggtcttccacagcagtattattgtctttgtggagttgactaatgataatttaaaaatcctgtaatggatttctactaaaataaggtcatagtggcatataccaaataaaatcaaata

SEQ ID NO: 21294 - DNA, 2007 bp, Homo sapiens
  source 1..2007: mol_type = unassigned DNA
actgctagctgagcaaggttcgaaggaaggacctcagaaatgttctgccagcgcaaagacactggccaaaagaagaccctagacaagaaagatggaagacgaatgtcttttcagaaacctaaagggactattgagtatactgttgaatcaagggattctttgaatagcatagccctgaagtttgatacaacacctaacgaacttgttcaattaaataagttattctcccgagcagttgttactggacaggttctgtatgttcctgatcctgaatatgtctccagtgttgagagctctccatctctaagccccgtaagtcctctgtcaccaacatcatctgaggctgaatttgataagaccactaatcctgatgtccatccaacagaagcaactccctcatctactttcactggtattcgacctgcacgagttgtatcttcaacttctgaggaggaggaagcatttactgagaaatttcttaaaattaattgcaaatatattaccagtggcaagggcacagtcagtggtgtgctgctagttacaccaaataatataatgtttgatccacataaaaatgaccctttggttcaagagaatggctgtgaggaatatggcatcatgtgtccaatggaagaggtgatgtcagctgcaatgtacaaagaaattttggatagcaaaataaaggaatctttacccatagatatagatcagctatcaggaagggacttctgccattcaaagaaaatgacaggaagtaacactgaggaaatagactcaagaatccgagatgcaggtaatgatagtgccagcactgctcctaggagcactgaggagtctctttctgaagatgtgttcacagaatcagaactttcccctatacgagaggagcttgtatcttcagatgaactgcgacaagataaatcttctggtgcgtcatcagaatctgtgcaaactgtcaatcaggctgaagtagaaagtctgacagtcaaatcagaatctactggtactcctggtcacttaagatctgatactgaacattctacaaatgaagttgggactttatgtcataaaactgatttaaataatcttgaaatggccattaaggaagatcagattgcagataactttcaaggaatatcaggtcctaaagaagacagcacaagtataaaaggtaattcagaccaggattcttttcttcatgagaattcgttacaccaagaagagagtcaaaaagaaaatatgccttgtggggaaacagcagaatttaaacaaaagcaaagtgttaacaaaggaaaacaaggaaaggagcaaaatcaggactcacagacagaggcagaagagctacgcaaactttggaaaacccatactatgcaacaaactaaacagcaaagggaaaatattcaacaagtgtcacaaaaagaagctaagcataaaattacatctgctgatggacacatagaaagtaagtgttatagagtaaatgaagttagttcatccaattgtatggtgtctccgtctttcctcactgactcaaaagccgctgtaccttagggcaacctgaaggataagtgagtgacccttgaccggtgattctctggggacaagtatatacagtctccagtgtctactgtcttttcttatcccacaggtggattgtacacataatgagcatcattgctacccaccatgtttaaacattcttggctcactacatcgtatcattaaacaatttatttcttgagaaattgcacaaaagctgtataatacctttgatcactccattttctcttaaaaagtttttggtgtgttaccattaaaaatgtcttttttcatatataacattttaattgccaaagttgtaatcccatcttttataaaatgtacagttaaacctaaaagtgtacttacagaattcttccacgtatcgagaagtttcatcatcatcatctaattattttcttttaaaaacctgccctcaggacaaataaaaacactattttatctgtc

SEQ ID NO: 21295 - DNA, 4501 bp, Homo sapiens
  source 1..4501: mol_type = unassigned DNA
gtcctctcaaactgtgagtaactaagtggtttgtgcatcattccagaagcaaagctaaaatttttagcggtgttgtcgacttgacctgctaatttcctgttctggaatcgagagaagactcctcaacaagttgctgcaatgtctgtgtctaatctatcatggctgaagaaaaagtcccagtcggtggatattaatgctccagggttcaaccctttggctggtgcaggaaagcaaacaccacaagccagtaagcccccggcacccaagacccccatcattgaagaagagcagaacaatgcagcaaatactcagaaacatccttccagaaggagcgaactgaagaggttctacacaattgacactggccaaaagaagaccctagacaagaaagatggaagacgaatgtcttttcagaaacctaaagggactattgagtatactgttgaatcaagggattctttgaatagcatagccctgaagtttgatacaacacctaacgaacttgttcaattaaataagttattctcccgagcagttgttactggacaggttctgtatgttcctgatcctgaatatgtctccagtgttgagagctctccatctctaagccccgtaagtcctctgtcaccaacatcatctgaggctgaatttgataagaccactaatcctgatgtccatccaacagaagcaactccctcatctactttcactggtattcgacctgcacgagttgtatcttcaacttctgaggaggaggaagcatttactgagaaatttcttaaaattaattgcaaatatattaccagtggcaagggcacagtcagtggtgtgctgctagttacaccaaataatataatgtttgatccacataaaaatgaccctttggttcaagagaatggctgtgaggaatatggcatcatgtgtccaatggaagaggtgatgtcagctgcaatgtacaaagaaattttggatagcaaaataaaggaatctttacccatagatatagatcagctatcaggaagggacttctgccattcaaagaaaatgacaggaagtaacactgaggaaatagactcaagaatccgagatgcaggtaatgatagtgccagcactgctcctaggagcactgaggagtctctttctgaagatgtgttcacagaatcagaactttcccctatacgagaggagcttgtatcttcagatgaactgcgacaagataaatcttctggtgcgtcatcagaatctgtgcaaactgtcaatcaggctgaagtagaaagtctgacagtcaaatcagaatctactggtactcctggtcacttaagatctgatactgaacattctacaaatgaagttgggactttatgtcataaaactgatttaaataatcttgaaatggccattaaggaagatcagattgcagataactttcaaggaatatcaggtcctaaagaagacagcacaagtataaaaggtaattcagaccaggattcttttcttcatgagaattcgttacaccaagaagagagtcaaaaagaaaatatgccttgtggggaaacagcagaatttaaacaaaagcaaagtgttaacaaaggaaaacaaggaaaggagcaaaatcaggactcacagacagaggcagaagagctacgcaaactttggaaaacccatactatgcaacaaactaaacagcaaagggaaaatattcaacaagtgtcacaaaaagaagctaagcataaaattacatctgctgatggacacatagaaagttctgcacttttaaaagaaaagcaaaggcatcgattacataagttcttgtgtctcagagttggaaaaccaatgaggaaaacgtttgtatctcaagcaagtgctacaatgcaacagtatgcacagagagataagaaacatgaatattggtttgctgtgccacaagaaaggacagatcacttgtatgccttcttcattcagtggagtccagaaatatatgcagaagatactggcgaatataccagagaacctggatttatagtagtaaaaaagattgaggagtctgaaacaattgaggattctagtaatcaagcagcagccagagaatgggaggtagtgtcagtggctgagtatcaccgcaggatcgatgctctaaatactgaagaactgcgcacactctgcagacgcctccagattactacaagggaagacataaattcaaagcaggttgctacagtgaaagcagacctggagtctgaatcttttcgaccaaacctaagtgatcccagtgaacttttactgccagatcaaattgaaaagcttaccaagcatcttccaccaagaacaattggctatccatggactcttgtttatggtactggaaaacatggcacaagcttgaaaactctttatcgaacaatgacaggtttagacaccccagtgctgatggtgattaaagacagtgatggacaggtttttggtgcgttagcatctgagccactgaaagtgagtgatggcttttatggtactggagagacctttgtttttacattctgtccggagtttgaggtctttaagtggacaggagataatatgttttttatcaaaggagacatggattcactagctttcggtggtggaggaggagaatttgcgctttggcttgatggagatctctaccatggaagaagccattcttgtaaaacgtttgggaatcgtacactttctaagaaggaagatttctttatccaagatattgaaatctgggcttttgaataaataaaatgctctctgtcttagcaggagaatggcccaaacctgacatggacaagcattgtttggaaagttcaagaagcaatacagtgtaacatgtcacttgtgctttaaaattagtctgtatcaccatttattacagttataattttggagtttatttttcaaatcatgttcttgtcccagagttctttaggttaacactagggactgcgtccatgtactagtataacagcttgggtttgttagaatttgggcaacattttgattataatgacaacttcattttcacatgttactcagttccctaataggatggtgctcttttgttgaacctgtattgatttttttttttttaactatattgattcgtttactagaacagtctaattggggcattgaggaaatgaagactggatacttctgtatctgtgaagttggcacaggtaacatttggacatgttcatcttattcttaggaaggaaaaaatcacttgccaaaataatacatacttcatagaccactgagttctagtttttattcacactacaacattctctttaacgatgttgcaggtattctcaatttccttttaagaaaaatgaaatgtgaggagaattctggttgtaatagatgacagtacatatgatctgcaggtttgggcatatgctttcatcattaaattatctgataaagttacaagtcacaaaggagaatgagaacttaatgattctattggatttaatatattagcaagaaaacatactatttacatatgtgtagcttagtaaggcattaacataagtacaaaaactatgaaacagatgcatatttcctcaacatactgtgtcaggtatactgttttataatttggttgttttagccttattgcacaccaactcccaaaatataggttactcttgttcaaaaggaaaaaaaaaattgtgattttctttgagtggtatatgttattaattaccattagcatttgctcttataaagggcaatgattatagtagacaatattgtaactcagtagacttgttgaatatgcaaacttactgtcaagtgacctcaaaaaaaaaatgaaaagatagaatacactagtagttcttatcctcttttgtaggaaaccaataatagccattgtggcaataattcatcagttgattttaaagcttcatgttatgcaaaaaagaatcctgctgttatacatgtgacagtgactttgtgctgaaatttcagctattccagataaacattgtatatcttgtaaattaatgtttaaaggtgtagttttgttcttacagaaagtgttgattgccaggttgcttatagcactttaagttattctaaaaatgaaattataagccaaatatttggcttaagtagatttagttgtatagcacttacatatttagttcttttgaaagtttagataattatttaaagaaagcataatgctaatggaaaagaaaatctgatgttctattataatatgctattgctgaatatgaatagaaatacagggcatcatttccttgtctcattataagttagtaacaatatatagattaaatgtttacaatatagggaattgtaaataaatatatcagtttttttccccttcggtcttccacagcagtattattgtctttgtggagttgactaatgataatttaaaaatcctgtaatggatttctactaaaataaggtcatagtggcatataccaaataaaatcaaata

SEQ ID NO: 21296 - DNA, 3599 bp, Homo sapiens
  source 1..3599: mol_type = unassigned DNA
gtcctctcaaactgtgagtaactaagtggtttgtgcatcattccagaagcaaagctaaaatttttagcggtgttgtcgacttgacctgctaatttcctgttctggaatcgagagaagactcctcaacaagttgctgcaatgtctgtgtctaatctatcatggctgaagaaaaagtcccagtcggtggatattaatgctccagggttcaaccctttggctggtgcaggaaagcaaacaccacaagccagtaagcccccggcacccaagacccccatcattgaagaagagcagaacaatgcagcaaatactcagaaacatccttccagaaggagcgaactgaagaggttctacacaattgacactggccaaaagaagaccctagacaagaaagatggaagacgaatgtcttttcagaaacctaaagggactattgagtatactgttgaatcaagggattctttgaatagcatagccctgaagtttgatacaacacctaacgaacttgttcaattaaataagttattctcccgagcagttgttactggacaggttctgtatgttcctgatcctgaatatgtctccagtgttgagagctctccatctctaagccccgtaagtcctctgtcaccaacatcatctgaggctgaatttgataagaccactaatcctgatgtccatccaacagaagcaactccctcatctactttcactggtattcgacctgcacgagttgtatcttcaacttctgaggaggaggaagcatttactgagaaatttcttaaaattaattgcaaatatattaccagtggcaagggcacagtcagtggtgtgctgctagttacaccaaataatataatgtttgatccacataaaaatgaccctttggttcaagagaatggctgtgaggaatatggcatcatgtgtccaatggaagaggtgatgtcagctgcaatgtacaaagaaattttggatagcaaaataaaggaatctttacccatagatatagatcagctatcaggaagggacttctgccattcaaagaaaatgacaggaagtaacactgaggaaatagactcaagaatccgagatgcaggtaatgatagtgccagcactgctcctaggagcactgaggagtctctttctgaagatgtgttcacagaatcagaactttcccctatacgagaggagcttgtatcttcagatgaactgcgacaagataaatcttctggtgcgtcatcagaatctgtgcaaactgtcaatcaggctgaagtagaaagtctgacagtcaaatcagaatctactggtactcctggtcacttaagatctgatactgaacattctacaaatgaagttgggactttatgtcataaaactgatttaaataatcttgaaatggccattaaggaagatcagattgcagataactttcaaggaatatcaggtcctaaagaagacagcacaagtataaaaggtaattcagaccaggattcttttcttcatgagaattcgttacaccaagaagagagtcaaaaagaaaatatgccttgtggggaaacagcagaatttaaacaaaagcaaagtgttaacaaaggaaaacaaggaaaggagcaaaatcaggactcacagacagaggcagaagagctacgcaaactttggaaaacccatactatgcaacaaactaaacagcaaagggaaaatattcaacaagtgtcacaaaaagaagctaagcataaaattacatctgctgatggacacatagaaagttctgcacttttaaaagaaaagcaaaggcatcgattacataagttcttgtgtctcagagttggaaaaccaatgaggaaaacgtttgtatctcaagcaagtgctacaatgcaacagtatgcacagagagataagaaacatgaatattggtttgctgtgccacaagaaaggacagatcacttgtatgccttcttcattcagtggagtccagaaatatatgcagaagatactggcgaatataccagagaacctggatttatagtagtaaaaaagattgaggagtctgaaacaattgaggattctagtaatcaagcagcagccagagaatgggagattactacaagggaagacataaattcaaagcaggttgctacagtgaaagcagacctggagtctgaatcttttcgaccaaacctaagtgatcccagtgaacttttactgccagatcaaattgaaaagcttaccaagcatcttccaccaagaacaattggctatccatggactcttgtttatggtactggaaaacatggcacaagcttgaaaactctttatcgaacaatgacaggtttagacaccccagtgctgatggtgattaaagacagtgatggacaggtttttggtgcgttagcatctgagccactgaaagtgagtgatggcttttatggtactggagagacctttgtttttacattctgtccggagtttgaggtctttaagtggacaggagataatatgttttttatcaaaggagacatggattcactagctttcggtggtggaggaggagaatttgcgctttggcttgatggagatctctaccatggaagaagccattcttgtaaaacgtttgggaatcgtacactttctaagaaggaagatttctttatccaagatattgaaatctgggcttttgaataaataaaatgctctctgtcttagcaggagaatggcccaaacctgacatggacaagcattgtttggaaagttcaagaagcaatacagtgtaacatgtcacttgtgctttaaaattagtctgtatcaccatttattacagttataattttggagtttatttttcaaatcatgttcttgtcccagagttctttaggttaacactagggactgcgtccatgtactagtataacagcttgggtttgttagaatttgggcaacattttgattataatgacaacttcattttcacatgttactcagttccctaataggatggtgctcttttgttgaacctgtattgatttttttttttttaactatattgattcgtttactagaacagtctaattggggcattgaggaaatgaagactggatacttctgtatctgtgaagttggcacaggtaacatttggacatgttcatcttattcttaggaaggaaaaaatcacttgccaaaataatacatacttcatagaccactgagttctagtttttattcacactacaacattctctttaacgatgttgcaggtattctcaatttccttttaagaaaaatgaaatgtgaggagaattctggttgtaatagatgacagtacatatgatctgcaggtttgggcatatgctttcatcattaaattatctgataaagttacaagtcacaaaggagaatgagaacttaatgattctattggatttaatatattagcaagaaaacatactatttacatatgtgtagcttagtaaggcattaacataagtacaaaaactatgaaacagatgcatatttcctcaacatactgtgtcaggtatactgttttataatttggttgttttagccttattgcacaccaactcccaaaatataggttactcttgttc

SEQ ID NO: 21297 - DNA, 2460 bp, Homo sapiens
  source 1..2460: mol_type = unassigned DNA
atttttagtttgttgaagttcgtgactgcttcactctctcattcttagcttgaatttggaaatgacttttgatgacctaaagatccagactgtgaaggaccagcctgatgagaagtcaaatggaaaaaaagctaaaggtcttcagtttctttactctccatggtggtgcctggctgctgcgactctaggggtcctttgcctgggattagtagtgaccattatggtgctgggcatgcaattatcccaggtgtctgacctcctaacacaagagcaagcaaacctaactcaccagaaaaagaaactggagggacagatctcagcccggcaacaagcagaagaagcttcacaggagtcagaaaacgaactcaaggaaatgatagaaacccttgctcggaagctgaatgagaaatccaaagagcaaatggaacttcaccaccagaatctgaatctccaagaaacactgaagagagtagcaaattgttcagctccttgtccgcaagactggatctggcatggagaaaactgttacctattttcctcgggctcatttaactgggaaaagagccaagagaagtgcttgtctttggatgccaagttgctgaaaattaatagcacagctgatctggacttcatccagcaagcaatttcctattccagttttccattctggatggggctgtctcggaggaaccccagctacccatggctctgggaggacggttctcctttgatgccccacttatttagagtccgaggcgctgtctcccagacatacccttcaggtacctgtgcatatatacaacgaggagctgtttatgcggaaaactgcattttagctgccttcagtatatgtcagaagaaggcaaacctaagagcacagtgaatttgaaggctctggaagaaaagaaaaaagtctttgagttttattctggaatttaagctattctttgtcacttgggtgccaaacatgagagcccagaaaactgtcatttagctggctgcagaactcctttgcagaaactggggttccaggagcctggcacctttatgtcaacatttttgattctagctacctgtattatttcacctagcttgtcccaagcttccctgccagcctgaagtccattttcccctttttattttaaaatttgactcctcttcaagcttgaaaaccctctgaactcagtcttctttacctcattatcaccttcccctcacactcctaaaattgcatgaaagacagaacatggagaacttgctcaagtgcaggcagagagcaaaaaggggaaatatgtctgggaaaaagtgcacgtgaagaaacaaagaaggacagaggccattccgaaatcaagaaactcatgttcttaactttaaaaaaggtatcaatccttggtttttaaactgtggtccatctccagactctaccacttacggacagacagacagacagacacacacacacacacacacacacattttgggacaagtggggagcccaagaaagtaattagtaagtgagtggtcttttctgtaagctaatccacaacctgttaccacttcctgaatcagttattatttcttcatttttttttctaccagaggacagattaatagatttaacccttcacaacagttcttgttagaatcatgggatgtgtggcccagaggtaagaatagaatttctttccctaaagaacataccttttgtagatgaactcttctcaactctgttttgctatgctataattccgaaacatacaagacaaaaaaaatgaagacactcaatctagaacaaactaagccaggtatgcaaatatcgctgaatagaaacagatggaattagaaatatatcttctatttttaggcttctatttcctttccacccactcttcacaggctattctactttaaaggaagcctttttattttgctgcacacaatctagcaggaatctttttttttttttaagagctgtgtcatccttatgtaggcaagagatgtttgcttttgttaaaagctttattgagatataattaacataaaataaactgaacatatttaaagtgtactatttgataagttttcacaccttgtggagaacatgcatactacaattaagagagtgaacatatccatcatccctcaaagtgtcacaatgctcctcctgatgactcctccccagaaaaccaccaatcggctttcattttgcattttgtagttttatgtgaatggaatcatatagtatgtcttttttttttgtctggcttctttcactttgcataattattttgagattcatatgtctccatcttgatgctcgtatgaattcattcttttaaatgttgaatattcccttgtatggatataccacaattcatttacccatttacttgttgatgacatttgggttgttttagttttgggatattacaaataaagctgctgtgaacatttgtgtac

SEQ ID NO: 21298 - DNA, 950 bp, Homo sapiens
  source 1..950: mol_type = unassigned DNA
agtttgttgaagttcgtgactgcttcactctctcattcttagcttgaatttggaaatgacttttgatgacctaaagatccagactgtgaaggaccagcctgatgagaagtcaaatggaaaaaaagctaaaggtcttcagtttctttactctccatggtggtgcctggctgctgcgactctaggggtcctttgcctgggattagtagtgaccattatggtgctgggcatgcaattatcccaggtgtctgacctcctaacacaagagcaagcaaacctaactcaccagaaaaagaaactggagggacagatctcagcccggcaacaagcagaagaagcttcacaggagtcagaaaacgaactcaaggaaatgatagaaacccttgctcggaagctgaatgagaaatccaaagagcaaatggaacttcaccaccagaatctgaatctccaagaaacactgaagagagtagcaaattgttcaggacttcatccagcaagcaatttcctattccagttttccattctggatggggctgtctcggaggaaccccagctacccatggctctgggaggacggttctcctttgatgccccacttatttagagtccgaggcgctgtctcccagacatacccttcaggtacctgtgcatatatacaacgaggagctgtttatgcggaaaactgcattttagctgccttcagtatatgtcagaagaaggcaaacctaagagcacagtgaatttgaaggctctggaagaaaagaaaaaagtctttgagttttattctggaatttaagctattctttgtcacttgggtgccaaacatgagagcccagaaaactgtcatttagctggctgcagaactcctttgcagaaactggggttccaggagcctggcacctttatgtcaacatttttgattctagctacctgtattatttcacctagcttgt

SEQ ID NO: 21299 - DNA, 1008 bp, Homo sapiens
  source 1..1008: mol_type = unassigned DNA
gtgactgcttcactctctcattcttagcttgaatttggaaatgacttttgatgacctaaagatccagactgtgaaggaccagcctgatgagaagtcaaatggaaaaaaagctaaaggtcttcagtttctttactctccatggtggtgcctggctgctgcgactctaggggtcctttgcctgggattagtagtgaccattatggtgctgggcatgcaattatcccaggtgtctgacctcctaacacaagagcaagcaaacctaactcaccagaaaaagaaactggagggacagatctcagcccggcaacaagcagaagaagcttcacaggagtcagaaaacgaactcaaggaaatgatagaaacccttgctcggaagctgaatgagaaatccaaagagcaaatggaacttcaccaccagaatctgaatctccaagaaacactgaagagagtagcaaattgttcagctccttgtccgcaagactggatctggcatggagaaaactgttacctattttcctcgggctcatttaactgggaaaagagccaagagaagtgcttgtctttggatgccaagttgctgaaaattaatagcacagctgatctgatttagagtccgaggcgctgtctcccagacatacccttcaggtacctgtgcatatatacaacgaggagctgtttatgcggaaaactgcattttagctgccttcagtatatgtcagaagaaggcaaacctaagagcacagtgaatttgaaggctctggaagaaaagaaaaaagtctttgagttttattctggaatttaagctattctttgtcacttgggtgccaaacatgagagcccagaaaactgtcatttagctggctgcagaactcctttgcagaaactggggttccaggagcctggcacctttatgtcaacatttttgattctagctacctgtattatttcacctagcttgtcccaagcttccctgccagcctgaagtccattttcccctttttattttaa

SEQ ID NO: 21300 - DNA, 4181 bp, Homo sapiens
  source 1..4181: mol_type = unassigned DNA
ctgagccggagacaggcagttgtgaaaaacttcaggacaaaaatgtttcatttaaggacttgtgctgctaagttgaggccattgacggcttcccagactgttaagacattttcacaaaacagaccagcagcagctaggacatttcaacagattcggtgctattctgcacctgttgctgctgagccctttctcagtgggactagttcgaactatgtggaggagatgtactgtgcttggctggaaaaccccaaaagtgtacataagtcatgggacattttttttcgcaacacgaatgccggagccccaccgggcactgcctaccagagtccccttcccctgagccgaggctccctggctgctgtggcccatgcacagtccctggtagaagcacagcccaacgtggacaagctcgtggaggaccacctggcagtgcagtcgctcatcagggcatatcagatacgagggcaccatgtagcacagctggaccccctggggattttggatgctgatctggactcctccgtgcccgctgacattatctcatccacagacaaacttgggttctatggcctggatgagtctgacctcgacaaggtcttccacttgcccaccaccactttcatcgggggacaggaatcagcacttcctctgcgggagatcatccgtcggctggagatggcctactgccagcatattggggtggagttcatgttcatcaatgacctggagcagtgccagtggatccggcagaagtttgagacccctgggatcatgcagttcacaaatgaggagaaacggaccctgctggccaggcttgtgcggtccaccaggtttgaggagttcctacagcggaagtggtcctctgagaagcgctttggtctagaaggctgcgaggtactgatccctgccctcaagaccatcattgacaagtctagtgagaatggcgtggactacgtgatcatgggcatgccacacagagggcggctgaacgtgcttgcaaatgtcatcaggaaggagctggaacagatcttctgtcaattcgattcaaagctggaggcagctgatgagggctccggagatgtgaagtaccacctgggcatgtatcaccgcaggatcaatcgtgtcaccgacaggaacattaccttgtccttggtggccaacccttcccaccttgaggccgctgaccccgtggtgatgggcaagaccaaagccgaacagttttactgtggcgacactgaagggaaaaaggtcatgtccatcctgttgcatggggatgctgcatttgctggccagggcattgtgtacgagaccttccacctcagcgacctgccatcctacacaactcatggcaccgtgcacgtggtcgtcaacaaccagatcggcttcaccaccgaccctcggatggcccgctcctccccctaccccactgacgtggcccgagtggtgaatgcccccattttccacgtgaactcagatgaccccgaggctgtcatgtacgtgtgcaaagtggcggccgagtggaggagcaccttccacaaggacgtggttgtcgatttggtgtgttaccggcgcaacggccacaacgagatggatgagcccatgttcacgcagccgctcatgtacaagcagatccgcaagcagaagcctgtgttacagaagtacgctgagctgctggtgtcgcagggtgtggtcaaccagcctgagtatgaggaggaaatttccaagtatgataagatctgtgaggaagcttttgccagatctaaagatgagaagatcttgcacattaagcactggctggactctccctggcctggcttcttcaccctggacgggcagcccaggagcatgtcctgcccctccacgggtctgacggaggatattctgacacacatcgggaatgtggctagttctgtgcctgtggaaaactttactattcatggagggctgagccggatcttgaagactcgtggggaaatggtgaagaaccggactgtggactgggctctagcggagtacatggcgtttggctcgctcctgaaggagggcatccacattcggctgagcggccaggacgtggagcggggcacattcagccaccgccaccatgtgctccatgaccagaatgtggacaagagaacctgcatccccatgaaccatctctggcccaatcaggccccctatactgtgtgcaacagctcactgtctgagtacggcgtgctgggctttgagctgggcttcgccatggccagtcctaatgccctggtcctctgggaagcccaatttggtgacttccacaacacggcccagtgtatcatcgaccagttcatctgcccgggacaagccaagtgggtgcggcagaatggcatcgtgttgctgctgccccatggcatggagggcatgggtccagaacattcctccgcccgcccagagcggttcttgcagatgtgcaacgatgacccagatgtcctgccagaccttaaagaagccaacttcgacatcaatcagctatatgactgcaattgggttgttgtcaactgctccactcctggcaacttcttccacgtgctacgacgccagatcctgctgccattccggaagccgttaattatcttcacccccaaatccctgttgcgccaccccgaggccagatccagctttgatgagatgcttccaggaacccacttccagcgggtgatcccagaagatggccctgcagctcagaacccagaaaatgtcaaaaggcttctcttctgcaccggcaaagtgtattatgacctcacccgggagcgcaaagcacgcgacatggtggggcaggtggccatcacaaggattgagcagctgtcgccattcccctttgacctcctgctgaaggaggtgcagaagtaccccaatgctgagctggcctggtgccaggaggagcacaagaaccaaggctactatgactacgtgaagccaagacttcggaccaccatcagccgcgccaagcccgtctggtatgccggccgggacccagcggctgctccagccaccggcaacaagaagacccacctgacggagctgcagcgcctcctggacacggccttcgacctggacgtcttcaagaacttctcgtagatgctgcctagggttgcttgggccactgccctctccacacccatgactgccccttgcttctcaactaaagaatagtgcctcagcgctgcccacaccaccgccctcctcgctgtgccaccacccctccctctgctctcataggagttaggctgtcgtccccctccagtgcttggctgccccacaggccacacgctgcccaggctctgctgacttctgagcagttttccaggaggccggggggagcaggaggaggaaaggtagcccccgagggatgtccttggggaggggtcagctctggccacaatcctccccaccagtctcacccactaggataggaactgggccttgtgtgctggcttccgctgtcacccagcaaggcacaggctcctgtatttgagactaggatagcttcatcttgagcctgagccttagaatctgtagaggagcctggagtcggatctagccatggctggcagaggtttctagggtgggccccagccgtggcgtgaactgaggatgacccggggcagctggcaggagagagccttggcctgacctggcacagaaagggcagcttcagtctctgcagtgtccattatctgctgttccttcgagggttccaggctgtgtgtggggcccaagcatgccccacccacccctcctgggcccaggcagcacctggagcccacagagtctgtgtgtagccaggaagccccgctcaggtagccaccaccggggcactggctgctctgtcttggtcctgttaaccctccacctcctctcttggactccctccccaccccaaccactctttctttctcctttaacccaatggagactttctgatgcatcgttttctttgctgtgccaaagcaggtcagaagagggagaggaggggctgggggtgaggggccaggccatggccaaggggccagctgcccctcatttatcactctgaccttcacagggacagatctgatttatttattttggttaaaaaaaaaaaaaaggaacagaaacaactttgcattgcattggcttgacccataaactaagttatatccgtg

SEQ ID NO: 21301 - DNA, 789 bp, Homo sapiens
  source 1..789: mol_type = unassigned DNA
tttggagccccggagtggggtgtcggcgcctcattcgggtggagctgagccggagacaggcagcgtccttgtgaactttccgcttggatcctgactctgctgttagtagcctatgaccttggatgaaatgcagttgtgaaaaacttcaggacaaaaatgtttcatttaaggacttgtgctgctaagttgaggccattgacggcttcccagactgttaagacattttcacaaaacagaccagcagcagctaggacatttcaacagattcggtgctattctgcacctgttgctgctgagccctttctcagtgggactagttcgaactatgtggaggagatgtactgtgcttggctggaaaaccccaaaagtgtacataagtcatgggacattttttttcgcaacacgaatgccggagccccaccgggcactgcctaccagagtccccttcccctgagccgaggctccctggctgctgtggcccatgcacagtccctggtagaagcacagcccaacgtggacaagctcgtggaggaccacctggcagtgcagtcgctcatcagggcatatcagatacgagggcaccatgtagcacagctggaccccctggggattttggatgctgatctggactcctccgtgcccgctgacattatctcatccacagacaaacttgggttctatggcctggatgagtctgacctcgacaaggtcttccacttgcccaccaccactttcatcgggggacaggaatcagcacttcctctgcgggagatcatccgtcggctggag

SEQ ID NO: 21302 - DNA, 1744 bp, Homo sapiens
  source 1..1744: mol_type = unassigned DNA
ccgagagtttggagccccggagtggggtgtcggcgcctcattcgggtggagctgagccggagacaggcagttgtgaaaaacttcaggacaaaaatgtttcatttaaggacttgtgctgctaagttgaggccattgacggcttcccagactgttaagacattttcacaaaacagaccagcagcagctaggacatttcaacagattcggtgctattctgcacctgttgctgctgagccctttctcagtgggactagttcgaactatgtggaggagatgtactgtgcttggctggaaaaccccaaaagtgtacataagtcatgggacattttttttcgcaacacgaatgccggagccccaccgggcactgcctaccagagtccccttcccctgagccgaggctccctggctgctgtggcccatgcacagtccctggtagaagcacagcccaacgtggacaagctcgtggaggaccacctggcagtgcagtcgctcatcagggcatatcagatacgagggcaccatgtagcacagctggaccccctggggattttggatgctgatctggactcctccgtgcccgctgacattatctcatccacagacaaacttgggttctatggcctggatgagtctgacctcgacaaggtcttccacttgcccaccaccactttcatcgggggacaggaatcagcacttcctctgcgggagatcatccgtcggctggagatggcctactgccagcatattggggtggagttcatgttcatcaatgacctggagcagtgccagtggatccggcagaagtttgagacccctgggatcatgcagttcacaaatgaggagaaacggaccctgctggccaggcttgtgcggtccaccaggtttgaggagttcctacagcggaagtggtcctctgagaagcgctttggtctagaaggctgcgaggtactgatccctgccctcaagaccatcattgacaagtctagtgagaatggcgtggactacgtgatcatgggcatgccacacagagggcggctgaacgtgcttgcaaatgtcatcaggaaggagctggaacagatcttctgtcaattcgattcaaagctggaggcagctgatgagggctccggagatgtgaagtaccacctgggcatgtatcaccgcaggatcaatcgtgtcaccgacaggaacattaccttgtccttggtggccaacccttcccaccttgaggccgctgaccccgtggtgatgggcaagaccaaagccgaacagttttactgtggcgacactgaagggaaaaaggtaaggcccagagagaggcgtgcaaggcagatcgtcaaggccccatgttccagcatggagttccgctcaccaacataacccagagccctgggtgcatctagactttaaaaaaatatttaaagtcggccgggcgcagtgtctcacgcctgtaatcccagcactttgggaggccgaggtgggcagatcacctgagttcgggagttggagaccagcctgaccaacatggagaaactccatctctactaaaaatacaaaattagctgggcgtggtggcgcgcgcctgtaatcccagctactcaggaggctgaggcaggagaatcgcttgaacccgggaggtggaggttgcagtgagccgagattacgccattgcactccagcctgggccaacaagagcgaaactctgtctcaaagaaaaaaataaataaataaaaaatatatgtatatg

SEQ ID NO: 21303 - DNA, 3266 bp, Homo sapiens
  source 1..3266: mol_type = unassigned DNA
attctgcacctgttgctgctgagccctttctcagtgggactagttcgaactatgtggaggagatgtactgtgcttggctggaaaaccccaaaagtgtacataagtcatgggacattttttttcgcaacacgaatgccggagccccaccgggcactgcctaccagagtccccttcccctgagccgaggctccctggctgctgtggcccatgcacagtccctggtagaagcacagcccaacgtggacaagctcgtggaggaccacctggcagtgcagtcgctcatcagggcatatcaggtcaggggtcaccacattgcaaaacttgatcctctcggaattagttgtgtaaattttgatgatgctccagtaactgtttcttcaaacgtggatcttgcagttttcaaggaacgacttcgaatgctaacagtaggagggttctatggcctggatgagtctgacctcgacaaggtcttccacttgcccaccaccactttcatcgggggacaggaatcagcacttcctctgcgggagatcatccgtcggctggagatggcctactgccagcatattggggtggagttcatgttcatcaatgacctggagcagtgccagtggatccggcagaagtttgagacccctgggatcatgcagttcacaaatgaggagaaacggaccctgctggccaggcttgtgcggtccaccaggtttgaggagttcctacagcggaagtggtcctctgagaagcgctttggtctagaaggctgcgaggtactgatccctgccctcaagaccatcattgacaagtctagtgagaatggcgtggactacgtgatcatgggcatgccacacagagggcggctgaacgtgcttgcaaatgtcatcaggaaggagctggaacagatcttctgtcaattcgattcaaagctggaggcagctgatgagggctccggagatgtgaagtaccacctgggcatgtatcaccgcaggatcaatcgtgtcaccgacaggaacattaccttgtccttggtggccaacccttcccaccttgaggccgctgaccccgtggtgatgggcaagaccaaagccgaacagttttactgtggcgacactgaagggaaaaaggtcatgtccatcctgttgcatggggatgctgcatttgctggccagggcattgtgtacgagaccttccacctcagcgacctgccatcctacacaactcatggcaccgtgcacgtggtcgtcaacaaccagatcggcttcaccaccgaccctcggatggcccgctcctccccctaccccactgacgtggcccgagtggtgaatgcccccattttccacgtgaactcagatgaccccgaggctgtcatgtacgtgtgcaaagtggcggccgagtggaggagcaccttccacaaggacgtggttgtcgatttggtgtgttaccggcgcaacggccacaacgagatggatgagcccatgttcacgcagccgctcatgtacaagcagatccgcaagcagaagcctgtgttacagaagtacgctgagctgctggtgtcgcagggtgtggtcaaccagcctgagtatgaggaggaaatttccaagtatgataagatctgtgaggaagcttttgccagatctaaagatgagaagatcttgcacattaagcactggctggactctccctggcctggcttcttcaccctggacgggcagcccaggagcatgtcctgcccctccacgggtctgacggaggatattctgacacacatcgggaatgtggctagttctgtgcctgtggaaaactttactattcatggagggctgagccggatcttgaagactcgtggggaaatggtgaagaaccggactgtggactgggctctagcggagtacatggcgtttggctcgctcctgaaggagggcatccacattcggctgagcggccaggacgtggagcggggcacattcagccaccgccaccatgtgctccatgaccagaatgtggacaagagaacctgcatccccatgaaccatctctggcccaatcaggccccctatactgtgtgcaacagctcactgtctgagtacggcgtgctgggctttgagctgggcttcgccatggccagtcctaatgccctggtcctctgggaagcccaatttggtgacttccacaacacggcccagtgtatcatcgaccagttcatctgcccgggacaagccaagtgggtgcggcagaatggcatcgtgttgctgctgccccatggcatggagggcatgggtccagaacattcctccgcccgcccagagcggttcttgcagatgtgcaacgatgacccagatgtcctgccagaccttaaagaagccaacttcgacatcaatcagctatatgactgcaattgggttgttgtcaactgctccactcctggcaacttcttccacgtgctacgacgccagatcctgctgccattccggaagccgttaattatcttcacccccaaatccctgttgcgccaccccgaggccagatccagctttgatgagatgcttccaggaacccacttccagcgggtgatcccagaagatggccctgcagctcagaacccagaaaatgtcaaaaggcttctcttctgcaccggcaaagtgtattatgacctcacccgggagcgcaaagcacgcgacatggtggggcaggtggccatcacaaggattgagcagctgtcgccattcccctttgacctcctgctgaaggaggtgcagaagtaccccaatgctgagctggcctggtgccaggaggagcacaagaaccaaggctactatgactacgtgaagccaagacttcggaccaccatcagccgcgccaagcccgtctggtatgccggccgggacccagcggctgctccagccaccggcaacaagaagacccacctgacggagctgcagcgcctcctggacacggccttcgacctggacgtcttcaagaacttctcgtagatgctgcctagggttgcttgggccactgccctctccacacccatgactgccccttgcttctcaactaaagaatagtgcctcagcgctgcccacaccaccgccctcctcgctgtgccaccacccctccctctgctctcataggagttaggctgtcgtccccctccagtgcttggctgccccacaggccacacgctgcccaggctctgctgacttctgagcagttttccaggaggccggggggagcaggaggaggaaaggtagcccccgagggatgtcctt

SEQ ID NO: 21304 - DNA, 3479 bp, Homo sapiens
  source 1..3479: mol_type = unassigned DNA
agagtttggagccccggagtggggtgtcggcgcctcattcgggtggagctgagccggagacaggcagttgtgaaaaacttcaggacaaaaatgtttcatttaaggacttgtgctgctaagttgaggccattgacggcttcccagactgttaagacattttcacaaaacagaccagcagcagctaggacatttcaacagattcggtgctattctgcacctgttgctgctgagccctttctcagtgggactagttcgaactatgtggaggagatgtactgtgcttggctggaaaaccccaaaagtgtacataagtcatgggacattttttttcgcaacacgaatgccggagccccaccgggcactgcctaccagagtccccttcccctgagccgaggctccctggctgctgtggcccatgcacagtccctggtagaagcacagcccaacgtggacaagctcgtggaggaccacctggcagtgcagtcgctcatcagggcatatcaggtcaggggtcaccacattgcaaaacttgatcctctcggaattagttgtgtaaattttgatgatgctccagtaactgtttcttcaaacgtggggttctatggcctggatgagtctgacctcgacaaggtcttccacttgcccaccaccactttcatcgggggacaggaatcagcacttcctctgcgggagatcatccgtcggctggagatggcctactgccagcatattggggtggagttcatgttcatcaatgacctggagcagtgccagtggatccggcagaagtttgagacccctgggatcatgcagttcacaaatgaggagaaacggaccctgctggccaggcttgtgcggtccaccaggtttgaggagttcctacagcggaagtggtcctctgagaagcgctttggtctagaaggctgcgaggtactgatccctgccctcaagaccatcattgacaagtctagtgagaatggcgtggactacgtgatcatgggcatgccacacagagggcggctgaacgtgcttgcaaatgtcatcaggaaggagctggaacagatcttctgtcaattcgattcaaagctggaggcagctgatgagggctccggagatgtgaagtaccacctgggcatgtatcaccgcaggatcaatcgtgtcaccgacaggaacattaccttgtccttggtggccaacccttcccaccttgaggccgctgaccccgtggtgatgggcaagaccaaagccgaacagttttactgtggcgacactgaagggaaaaaggtcatgtccatcctgttgcatggggatgctgcatttgctggccagggcattgtgtacgagaccttccacctcagcgacctgccatcctacacaactcatggcaccgtgcacgtggtcgtcaacaaccagatcggcttcaccaccgaccctcggatggcccgctcctccccctaccccactgacgtggcccgagtggtgaatgcccccattttccacgtgaactcagatgaccccgaggctgtcatgtacgtgtgcaaagtggcggccgagtggaggagcaccttccacaaggacgtggttgtcgatttggtgtgttaccggcgcaacggccacaacgagatggatgagcccatgttcacgcagccgctcatgtacaagcagatccgcaagcagaagcctgtgttacagaagtacgctgagctgctggtgtcgcagggtgtggtcaaccagcctgagtatgaggaggaaatttccaagtatgataagatctgtgaggaagcttttgccagatctaaagatgagaagatcttgcacattaagcactggctggactctccctggcctggcttcttcaccctggacgggcagcccaggagcatgtcctgcccctccacgggtctgacggaggatattctgacacacatcgggaatgtggctagttctgtgcctgtggaaaactttactattcatggagggctgagccggatcttgaagactcgtggggaaatggtgaagaaccggactgtggactgggctctagcggagtacatggcgtttggctcgctcctgaaggagggcatccacattcggctgagcggccaggacgtggagcggggcacattcagccaccgccaccatgtgctccatgaccagaatgtggacaagagaacctgcatccccatgaaccatctctggcccaatcaggccccctatactgtgtgcaacagctcactgtctgagtacggcgtgctgggctttgagctgggcttcgccatggccagtcctaatgccctggtcctctgggaagcccaatttggtgacttccacaacacggcccagtgtatcatcgaccagttcatctgcccgggacaagccaagtgggtgcggcagaatggcatcgtgttgctgctgccccatggcatggagggcatgggtccagaacattcctccgcccgcccagagcggttcttgcagatgtgcaacgatgacccagatgtcctgccagaccttaaagaagccaacttcgacatcaatcagctatatgactgcaattgggttgttgtcaactgctccactcctggcaacttcttccacgtgctacgacgccagatcctgctgccattccggaagccgttaattatcttcacccccaaatccctgttgcgccaccccgaggccagatccagctttgatgagatgcttccaggaacccacttccagcgggtgatcccagaagatggccctgcagctcagaacccagaaaatgtcaaaaggcttctcttctgcaccggcaaagtgtattatgacctcacccgggagcgcaaagcacgcgacatggtggggcaggtggccatcacaaggattgagcagctgtcgccattcccctttgacctcctgctgaaggaggtgcagaagtaccccaatgctgagctggcctggtgccaggaggagcacaagaaccaaggctactatgactacgtgaagccaagacttcggaccaccatcagccgcgccaagcccgtctggtatgccggccgggacccagcggctgctccagccaccggcaacaagaagacccacctgacggagctgcagcgcctcctggacacggccttcgacctggacgtcttcaagaacttctcgtagatgctgcctagggttgcttgggccactgccctctccacacccatgactgccccttgcttctcaactaaagaatagtgcctcagcgctgcccacaccaccgccctcctcgctgtgccaccacccctccctctgctctcataggagttaggctgtcgtccccctccagtgcttggctgccccacaggccacacgctgcccaggctctgctgacttctgagcagttttccaggaggccggggggagcaggaggaggaaaggtagcccccgagggatgtccttggggaggggtcagctctggccacaatcctccccaccagtctcacccacta

SEQ ID NO: 21305 - DNA, 5083 bp, Homo sapiens
  source 1..5083: mol_type = unassigned DNA
agaagagcgatgggagggggtgacgtggcagtgacaggcgcataaactgaaatgaatggcggaaacagcagccaatcggcgatcagattggccgggcattccgcattctcccgtcctccctgagcgctggaaacttcaggaaagcaccaatgagcttccccaaaagtctgattggcctttatctgaaccaatcaaaggtgggtctggcggacgcgtcccaccccaggctctcactgggcgctgtagaatgacaggcccgagagaaatgccaatatccgcggggtcttcctcaagtgacactcagcggcaccaatcgacgtccttcttcccggcggccgagccctcctccccgcggctggccgggcggggcggggacgctgcgcggcggtggctgatgcggtagccgtgtggggcgctccgggcggcgacggcggctctcgtaggcggttccggtcttgtatctccaggcggcggcggctcatggcggcgacggagctgagaggagtggtggggccaggcccggcagccattgcagcacttggcggcggcggcgccggtcccccagtggtgggaggaggcggcggccgcggagatgcggggccaggctccggggccgcgtcagggacggtggtcgcggcggcggcgggaggcccgggcccgggggccgggggagtggcggcggctggcccggcccctgcgccgccgactgggggctcgggcggctcgggcgctgggggttcgggctcggctcgagagggctggctcttcaaatggaccaattatatcaaaggctaccagcggcgatggttcgtgctgagcaacgggctcctgagctactacagatcaaaggcagaaatgagacatacctgccgtggtaccatcaacctcgccacagccaacatcaccgtggaggactcctgcaacttcatcatttccaatgggggtgctcagacctaccatctgaaagctagttcagaagttgagcggcagcgctgggtgacggccctggaactggccaaggccaaagctgtgaagatgctggcagagtcagatgaatcaggagatgaagagtctgtctcacaaactgacaagactgagctgcagaatacccttcggaccctctctagcaaagtagaggacttgagcacgtgcaatgacttgatagctaagcatggcacagctctgcagcgttctctcagtgagctggagtccctgaagttgcctgctgagagcaatgaaaagatcaaacaggtcaacgaacgagccacactctttaggataacatccaatgccatgatcaacgcctgcagagatttcctcatgttagcccagacccatagtaaaaaatggcaaaagtcactacagtatgaaagagaccagcgtatccgactggaagaaaccctcgagcagctggcgaagcagcataatcacctggagagggccttccgaggagccacggtgctgccggcaaacactcctggcaatgtgggttctggtaaagatcagtgctgctctggcaaaggggacatgagcgatgaagatgatgagaatgaattttttgatgcacctgagatcatcaccatgcctgaaaatttgggccacaaacgtactggcagcaatatcagtggagccagcagtgacatcagccttgatgaacagtacaagcatcagctggaggagaccaaaaaggaaaagagaaccagaataccatacaagccaaactatagcctcaatttatggagcatcatgaagaactgcattggaaaagaactctctaagatccccatgccggtaaactttaatgagcccttgtccatgcttcagcgccttactgaagatctggaataccatgagctgttagaccgagctgcaaaatgtgagaattctctagaacagctctgttatgttgcagctttcaccgtgtcctcctactccactactgtcttccgcaccagtaagccattcaacccactgcttggggagacctttgagctggaccgattagaggagaatgggtaccgatccctctgtgaacaggtgagtcatcatccccctgctgctgcgcaccatgctgagtccaaaaatggctggacattgcgtcaggaaatcaaaatcaccagcaagtttcgaggcaaatacctctccattatgcccctcggtaccattcattgtattttccatgcaactgggcaccactacacttggaagaaagttaccacaactgtacacaacattattgtgggcaagttgtggatagatcagtctggcgaaattgatattgtgaatcacaagacaggagacaagtgtaatcttaaatttgttccttatagctacttctctcgggatgtagcaagaaaggtgacgggggaagtgacagatccatcaggaaaagtccactttgctcttctggggacgtgggatgagaaaatggaatgtttcaaagtacagccagtcattggggaaaatgggggtgatgctcgacagagaggccatgaagcagaggaaagcagggtcatgctgtggaaaaggaatcctttaccgaagaatgcagaaaacatgtactacttctcagagcttgctctgactctcaatgcttgggaaagtggcactgcccccacagacagccggttacgacctgaccagagactgatggaaaatggacgctgggatgaagcaaatgcggagaagcagcgcctggaggaaaaacaaagactttccagaaagaagagagaagcggaagctatgaaagccacagaggatggcacaccatatgatccctataaggcactgtggtttgagcggaagaaggaccctgttaccaaggagttaacccatatttataggggagaatactgggagtgtaaagaaaaacaggactggagctcatgcccggacattttctgaaacggcagtaacaaaaaagaggagcatataatggagaagaggacagaggatgtgtgggaaagctggaagttgtgactctcttaccaagtgctttcctcaagtttgtctctcttgaccaatcattttttccaaatcaatcaccagaaggagacaccagtggtggtgattggctggttgccttagctgattgaaactgaaatcgacataggagatactatgtctgtaagggagaggtttagtggccgaaggttagtgttattccacatccacgaagtcaagtattcttggctcttctttctccctctgcccccatttaagacaatgtcactcaccctccccttgtagtatcctgctcagccaagatctgcctaagattatgattcaggggcattttggtgctgttaaaagcaagagccgaatttagaagttcccttaaaaagaaacacataagacttaccaatggaggcattgtgaatggttgcagtggagcttaggtataacatcatcaagtgtgttcacacgcggggtcggtttaatggagtgtccacgcggagataactgcgatattggaacacctgtgagagagattgttctatagggctggaatattcagagttacattcttggaagtttctgtttttacttgcatcaaacacccctctgttgttctccatcatctttaatagcaactggagaccactttggtcattggtaagggggtgcattctcctcacaaaggggttttatggacttcctcaggcggagagcttctgagaacacaggcaggatggaaaaagactactagccacttttgctttcccaaccccccttaatgccatccttcattgtctttctggcttctcttcttctggcacagtaccattttgggtctgtgccccagtgtggagcaaaacattgcctgtcccattctgatatacttcagaatttgagagcagaagttaatgtggaacaaaagttttcaccatctctcaagccccaaggactggagccacctctggaataatgtgttaaatatctgtatattatatatatgtagagaaaaatctaattttttggtttgatttccttcccattaagaatcttgttttttgatacccttgtctccctgagactctttcttggacacgtgttgatgtggatggcactcctgctctccatcttttatgggcagagagatttcaaaacctgagcaggatcatgtctggcagttactaaacagggactttgtccatggtttgtatcatggggtgcctactgctgtctaaactctgctctcctaattagctgactcttgaaaatgaaatcctaacctctttcctgcctcttttctttctcttttcaggaagagtgtgggtagaaagtccggagggcaacttccaatttaattctgctctgtccggcgcataggctgaattccaaaagaactttcttcctaggatgtggggcttaaagcaccgtcatgtggggtggatcagataattgctcctgtggggccctggcttccttctctgtttgtgcagtatttgtttttgttgtcttgttgagaaatatcccctgtgcaacccacccttggttgaggatcacaaattgaggtgccttccttgtatgctttttgttagtattttttgtttttgttccttaactgctgagcctcagccagcgtgggtcctgggggaaataccattccaaaggaagccatccctatggggaaattggttttactgggtaaattaatacttttatttcttcccctatcccttccttcctagttgtgataaacatgggagaggagtgactttgactgctggggaatttcctcctaagaaccttattcccaaaataagccagggattatgtcaaggcttctttcaaggaggctcataaaagcagtgacctcatccggggctttggatagagtgagaattccccaactaaattggacttctctgctttatccccttctcttccttcaccatctgcactacatttctggctgatcccaatcagattcccgctaatggaagaagtttagaatctttcaggtggaataaagtcacatgaaaacaaaacacaactatatatattttcagtttttttgccttattgatttttttccaaaaaaaaaaaactactaaattaaataattttttaaaagtca

SEQ ID NO: 21306 - DNA, 3403 bp, Homo sapiens
  source 1..3403: mol_type = unassigned DNA
atggcggcgacggagctgagaggagtggtggggccaggcccggcagccattgcagcacttggcggcggcggcgccggtcccccagtggtgggaggaggcggcggccgcggagatgcggggccaggctccggggccgcgcttcagcgccttactgaagatctggaataccatgagctgttagaccgagctgcaaaatgtgagaattctctagaacagctctgttatgttgcagctttcaccgtgtcctcctactccactactgtcttccgcaccagtaagccattcaacccactgcttggggagacctttgagctggaccgattagaggagaatgggtaccgatccctctgtgaacaggtgagtcatcatccccctgctgctgcgcaccatgctgagtccaaaaatggctggacattgcgtcaggaaatcaaaatcaccagcaagtttcgaggcaaatacctctccattatgcccctcggtaccattcattgtattttccatgcaactgggcaccactacacttggaagaaagttaccacaactgtacacaacattattgtgggcaagttgtggatagatcagtctggcgaaattgatattgtgaatcacaagacaggagacaagtgtaatcttaaatttgttccttatagctacttctctcgggatgtagcaagaaaggtgacgggggaagtgacagatccatcaggaaaagtccactttgctcttctggggacgtgggatgagaaaatggaatgtttcaaagtacagccagtcattggggaaaatgggggtgatgctcgacagagaggccatgaagcagaggaaagcagggtcatgctgtggaaaaggaatcctttaccgaagaatgcagaaaacatgtactacttctcagagcttgctctgactctcaatgcttgggaaagtggcactgcccccacagacagccggttacgacctgaccagagactgatggaaaatggacgctgggatgaagcaaatgcggagaagcagcgcctggaggaaaaacaaagactttccagaaagaagagagaagcggaagctatgaaagccacagaggatggcacaccatatgatccctataaggcactgtggtttgagcggaagaaggaccctgttaccaaggagttaacccatatttataggggagaatactgggagtgtaaagaaaaacaggactggagctcatgcccggacattttctgaaacggcagtaacaaaaaagaggagcatataatggagaagaggacagaggatgtgtgggaaagctggaagttgtgactctcttaccaagtgctttcctcaagtttgtctctcttgaccaatcattttttccaaatcaatcaccagaaggagacaccagtggtggtgattggctggttgccttagctgattgaaactgaaatcgacataggagatactatgtctgtaagggagaggtttagtggccgaaggttagtgttattccacatccacgaagtcaagtattcttggctcttctttctccctctgcccccatttaagacaatgtcactcaccctccccttgtagtatcctgctcagccaagatctgcctaagattatgattcaggggcattttggtgctgttaaaagcaagagccgaatttagaagttcccttaaaaagaaacacataagacttaccaatggaggcattgtgaatggttgcagtggagcttaggtataacatcatcaagtgtgttcacacgcggggtcggtttaatggagtgtccacgcggagataactgcgatattggaacacctgtgagagagattgttctatagggctggaatattcagagttacattcttggaagtttctgtttttacttgcatcaaacacccctctgttgttctccatcatctttaatagcaactggagaccactttggtcattggtaagggggtgcattctcctcacaaaggggttttatggacttcctcaggcggagagcttctgagaacacaggcaggatggaaaaagactactagccacttttgctttcccaaccccccttaatgccatccttcattgtctttctggcttctcttcttctggcacagtaccattttgggtctgtgccccagtgtggagcaaaacattgcctgtcccattctgatatacttcagaatttgagagcagaagttaatgtggaacaaaagttttcaccatctctcaagccccaaggactggagccacctctggaataatgtgttaaatatctgtatattatatatatgtagagaaaaatctaattttttggtttgatttccttcccattaagaatcttgttttttgatacccttgtctccctgagactctttcttggacacgtgttgatgtggatggcactcctgctctccatcttttatgggcagagagatttcaaaacctgagcaggatcatgtctggcagttactaaacagggactttgtccatggtttgtatcatggggtgcctactgctgtctaaactctgctctcctaattagctgactcttgaaaatgaaatcctaacctctttcctgcctcttttctttctcttttcaggaagagtgtgggtagaaagtccggagggcaacttccaatttaattctgctctgtccggcgcataggctgaattccaaaagaactttcttcctaggatgtggggcttaaagcaccgtcatgtggggtggatcagataattgctcctgtggggccctggcttccttctctgtttgtgcagtatttgtttttgttgtcttgttgagaaatatcccctgtgcaacccacccttggttgaggatcacaaattgaggtgccttccttgtatgctttttgttagtattttttgtttttgttccttaactgctgagcctcagccagcgtgggtcctgggggaaataccattccaaaggaagccatccctatggggaaattggttttactgggtaaattaatacttttatttcttcccctatcccttccttcctagttgtgataaacatgggagaggagtgactttgactgctggggaatttcctcctaagaaccttattcccaaaataagccagggattatgtcaaggcttctttcaaggaggctcataaaagcagtgacctcatccggggctttggatagagtgagaattccccaactaaattggacttctctgctttatccccttctcttccttcaccatctgcactacatttctggctgatcccaatcagattcccgctaatggaagaagtttagaatctttcaggtggaataaagtcacatgaaaacaaaacacaactatatatattttcagtttttttgccttattgatttttttccaaaaaaaaaaaactactaaattaaataattttttaaaagtca

SEQ ID NO: 21307 - DNA, 4340 bp, Homo sapiens
  source 1..4340: mol_type = unassigned DNA
gcccccgcctcgcgccgcgcgcacgtgactgcgcccccggccccgcccccggcctgccccccgcccccactggccgctcggccgcgcgcgggtcggccggctctatggggaaagcggcggctccgagccgaggcggcggctgtggcggccgctcccgcgggctctcgtcgctgttcacggttgtcccctgcctgtcgtgccacacggcggcgccgggcatgagcgcttccacgtccggctccgggccggagcccaagccccagccccagcccgtgcccgaaccggagcggggaccgctgtcagaacaggtgtcggaggcagtttcggaggcagtgccaagatcggaacctgtgtccgagacgacgtctgagccggagccaggggctgggcagccatcggaactgctgcaggggtcgcggccggggtcagagtcaagctcaggtgtaggggctgggcccttcactaaggccgcatcggagccgctctcccgggcggtggggagcgcgacctttctcagacccgagtcaggatcgctgccagcgttaaagcccctgcctcttctgcgaccaggacaggcgaagactcctcttggggttccaatgtcggggactggcacgacctccagtgccccactggccttactgcctctggacagcttcgagggctggcttctcaagtggaccaactatctgaagggctaccagcgccgctggttcgtgctgggcaatggtttgctctcttactacagaaatcagggtgaaatggcccacacgtgccgtggaaccatcaacctgtccaccgcgcacattgacacggaggactcttgtggtatcttgctgaccagtggggccaggagctaccacctcaaggccagctcagaggtggaccggcagcagtggatcaccgccctggagctggccaaggccaaggctgtccgcgtgatgaacactcattcagatgactctggggacgacgacgaggctaccaccccagccgacaagagcgagctgcaccacaccctgaagaatctttccctgaagttagatgacctcagcacgtgcaatgacctcatcgccaagcacggcgctgcactccagcgctccctgacagagctggacggcctcaagatcccatctgagagtggggagaagctgaaggtggtgaatgagcgggccaccctcttccgcatcacatccaatgctatgatcaacgcctgcagggacttcttggaactagcagagatacacagtcggaaatggcagcgggcactgcagtatgagcaggagcagcgcgtgcacttggaggaaaccattgagcagctggcgaagcagcacaacagcctcgagcgggccttccacagtgcccctggccggccggccaacccctccaagagcttcattgagggaagcctcttgactcccaaaggagaggacagtgaggaagatgaagataccgagtactttgatgccatggaagactccacatccttcatcaccgtgatcaccgaggccaaggaagacagcagaaaagctgaaggtagcaccgggacaagttccgtggactggagctcagcagacaatgtactagatggtgcctcgctcgtgcccaagggttcatccaaagtcaagaggcgagtccgcattcccaacaagcccaactacagccttaacctctggagcatcatgaagaactgcatcggccgggagctctccaggatccccatgccggtgaacttcaatgagcccctgtccatgctccagcggctgacagaggacctggagtaccaccacctgctggacaaggcagtgcactgcaccagctcagtggagcagatgtgcctggtggccgccttctctgtgtcctcctactccaccacagtgcaccgcatcgccaagcccttcaaccccatgctgggggagaccttcgagctggaccgcctcgacgacatgggcctgcgctccctctgtgagcaggtgagccaccaccccccctcagctgcgcactacgtgttctccaagcatggctggagcctctggcaggagatcaccatctccagcaagttccggggaaaatacatctccatcatgccgctaggtgccatccacttagaattccaggccagtgggaatcactacgtgtggaggaagagcacctcaactgttcacaacatcatcgtgggcaagctctggatcgaccagtcaggggacatcgagattgtgaaccataagaccaatgaccggtgccagctgaagttcctgccctacagctacttctccaaagaggcagcccggaaggtgacaggagtggtgagtgacagccagggcaaggcccattacgtgctgtccggctcgtgggatgaacaaatggagtgctccaaggtcatgcatagcagtcccagcagccccagctctgacgggaagcagaagacagtgtaccagaccctgtcagccaagctgctgtggaagaagtacccgctgccggagaacgcggagaacatgtactacttctcagagctggccctgaccctcaacgagcacgaggagggcgtagcgccaaccgacagccgcctgcggcccgaccagcggctgatggagaagggccgttgggacgaggccaataccgagaagcagcggctggaggagaagcagcgcctgtcgcggcgccggcggctggaggcctgcgggccgggcagcagctgcagctcggaggaagagaaggaggcggatgcctacacgccactgtggtttgagaagaggctggatccgctgaccggggagatggcctgtgtgtacaagggcggctactgggaggccaaggagaagcaagactggcatatgtgccccaacatcttctgagcgccacccttgcaacaaatacaggcgcctgcacagcctggcccacctgttcattaatgcactcaatttagtactgaatggtctttctcccagcccattcccagcccttcctatttcctttcctattttttttttctccccacactttcttgggactcccaccttggaaggaggaagggctgacctgggttctctccagcccccaggtgcgccgggtcacccgtgccccttcattatggacctgggccctaccggaacccctgccccagttaccacaactcaggccggctggcccgggccatgggctgcgcaaatcaccagcccccaacccagggaggaactggcccctcctagggagcctcttcgacttttttagaaaaatgatctccatttctttccagccatgatgtttagtaaatatttttagtaccgcacttagcagacagctttccaagtgtgctttcttgccacaaaagtgtcctggcaagagccccttatttttaagacatcaggaagccagaccgctttgagttgggagaattttgtagctcaacatatcaagtcctcgatggtatctgagctgcccacacccccacctgccaaggccccacagagcccaaaacagaagggggctgccccagcccagcagagcacagagtttctggagctcccatccacagatgcaggagggggtactgatggtaacccccatgtggatttgagggcagcagtccctggcctcaccctagccagcctgggtggctccctagccccaagaggccaggaagggctggaaggcagggcctgcaggtgctccccgccctgagacccaggccccaaatcagcaataatgaacaaacccttggcccagcctgggctggtgacctgggcaccagagaccttgcatccctcctcatcctaggaggcccctaggggtgccccatctcagtgtcccctgaactctttatttgcctaatttatatatatatatatgagatatataaatatatataaaatagctattttgcttaaatttctacagtatgtaaaagtgaaaaaatgatgaagacgggtgcacctgtctgagtttggccctcatgtgagctgtgcccttccctctcctcatgcccccttccagcggcttctgccaaccatggggggctggaccaccatggccactgacccagcccctcagaatcccacactccaatcctttccatttcagtttagtcctaaaagttcatcacagggtctttctttctactccaggactggttttgtttttatatatataaaaaaaaaaagtgaaaacaccaatgtgtgaaatgccttacaatgcccactggagaggcggggcggggtggggcaggatggccccactggggctcctacagagctgtggaatgtacctctccccaacactgttttgttagcgagcaccttttgaccagtaataaaaaaccttggctttggagttttccactg

SEQ ID NO: 21308 - DNA, 2992 bp, Homo sapiens
  source 1..2992: mol_type = unassigned DNA
actggccgctcggccgcgcgcgggtcggccggctctatggggaaagcggcggctccgagccgaggcggcggctgtggcggccgctcccgcgggctctcgtcgctgttcacggttgtcccctgcctgtcgtgccacacggcggcgccgggcatgagcgcttccacgtccggctccgggccggagcccaagccccagccccagcccgtgcccgaaccggagcggggaccgctgtcagaacaggtgtcggaggcagtttcggaggcagtgccaagatcggaacctgtgtccgagacgacgtctgagccggagccaggggctgggcagccatcggaactgctgcaggggtcgcggccggggtcagagtcaagctcaggtgtaggggctgggcccttcactaaggccgcatcggagccgctctcccgggcggtggggagcgcgacctttctcagacccgagtcaggatcgctgccagcgttaaagcccctgcctcttctgcgaccaggacaggcgaagactcctcttggggttccaatgtcggggactggcacgacctccagtgccccactggccttactgcctctggacagcttcgagggctggcttctcaagtggaccaactatctgaagggctaccagcgccgctggttcgtgctgggcaatggtttgctctcttactacagaaatcagggtgaaatggcccacacgtgccgtggaaccatcaacctgtccaccgcgcacattgacacggaggactcttgtggtatcttgctgaccagtggggccaggagctaccacctcaaggccagctcagaggtggaccggcagcagtggatcaccgccctggagctggccaaggccaaggctgtccgcgtgatgaacactcattcagatgactctggggacgacgacgaggctaccaccccagccgacaagagcgagctgcaccacaccctgaagaatctttccctgaagttagatgacctcagcacgtgcaatgacctcatcgccaagcacggcgctgcactccagcgctccctgacagagctggacggcctcaagatcccatctgagagtggggagaagctgaaggtggtgaatgagcgggccaccctcttccgcatcacatccaatgctatgatcaacgcctgcagggacttcttggaactagcagagatacacagtcggaaatggcagcgggcactgcagtatgagcaggagcagcgcgtgcacttggaggaaaccattgagcagctggcgaagcagcacaacagcctcgagcgggccttccacagtgcccctggccggccggccaacccctccaagagcttcattgagggaagcctcttgactcccaaaggagaggacagtgaggaagatgaagataccgagtactttgatgccatggaagactccacatccttcatcaccgtgatcaccgaggccaaggaagacagcagaaaagctgaaggtagcaccgggacaagttccgtggactggagctcagcagacaatgtgaacttcaatgagcccctgtccatgctccagcggctgacagaggacctggagtaccaccacctgctggacaaggcagtgcactgcaccagctcagtggagcagatgtgcctggtggccgccttctctgtgtcctcctactccaccacagtgcaccgcatcgccaagcccttcaaccccatgctgggggagaccttcgagctggaccgcctcgacgacatgggcctgcgctccctctgtgagcaggtgagccaccaccccccctcagctgcgcactacgtgttctccaagcatggctggagcctctggcaggagatcaccatctccagcaagttccggggaaaatacatctccatcatgccgctaggtgccatccacttagaattccaggccagtgggaatcactacgtgtggaggaagagcacctcaactgttcacaacatcatcgtgggcaagctctggatcgaccagtcaggggacatcgagattgtgaaccataagaccaatgaccggtgccagctgaagttcctgccctacagctacttctccaaagaggcagcccggaaggtgacaggagtggtgagtgacagccagggcaaggcccattacgtgctgtccggctcgtgggatgaacaaatggagtgctccaaggtcatgcatagcagtcccagcagccccagctctgacgggaagcagaagacagtgtaccagaccctgtcagccaagctgctgtggaagaagtacccgctgccggagaacgcggagaacatgtactacttctcagagctggccctgaccctcaacgagcacgaggagggcgtagcgccaaccgacagccgcctgcggcccgaccagcggctgatggagaagggccgttgggacgaggccaataccgagaagcagcggctggaggagaagcagcgcctgtcgcggcgccggcggctggaggcctgcgggccgggcagcagctgcagctcggaggaaggtgaggccgggcgggaagggcgccccggaggggaggaaaggggtgcccgggtgggggtgccgcagggacggattccgggggagcaggccacaagcccacccaccagcccactgtgcctgcccagcagagaaggaggcggatgcctacacgccactgtggtttgagaagaggctggatccgctgaccggggagatggcctgtgtgtacaagggcggctactgggaggccaaggagaagcaagactggcatatgtgccccaacatcttctgagcgccacccttgcaacaaatacaggcgcctgcacagcctggcccacctgttcattaatgcactcaatttagtactgaatggtctttctcccagcccattcccagcccttcctatttcctttcctattttttttttctccccacactttcttgggactcccaccttggaaggaggaagggctgacctgggttctctccagcccccaggtgcgccgggtcacccgtg

SEQ ID NO: 21309 - DNA, 2747 bp, Homo sapiens
  source 1..2747: mol_type = unassigned DNA
catggtgaaaccccgtttctactaaaaatacaaaatttagctgggcatggtgcgggccgtggaattccagctactagggaggccaaggcaggagaatcgcttgaacctgggaagcggaggctgcagtgaaccaagatcacgccactgcattccagcctgggctaccgagtgagactcagtctcaaaaaggaaaaaaaaaaaaagcggaaaaaaaaattcgctgatgttttaaccattctggggtcacagcctcctttgttatggacctactctggaaaaatgcacagacagagaacccgaacgatgtcgtcactggcagcgaagcgccttggcatgaaccgtaggccagctggctcaggaggtggaggcggtgaggcggccacttggggccaccgcttctggcggccgcaggagcgacccacagacagaaatcagggtgaaatggcccacacgtgccgtggaaccatcaacctgtccaccgcgcacattgacacggaggactcttgtggtatcttgctgaccagtggggccaggagctaccacctcaaggccagctcagaggtggaccggcagcagtggatcaccgccctggagctggccaaggccaaggctgtccgcgtgatgaacactcattcagatgactctggggacgacgacgaggctaccaccccagccgacaagagcgagctgcaccacaccctgaagaatctttccctgaagttagatgacctcagcacgtgcaatgacctcatcgccaagcacggcgctgcactccagcgctccctgacagagctggacggcctcaagatcccatctgagagtggggagaagctgaaggtggtgaatgagcgggccaccctcttccgcatcacatccaatgctatgatcaacgcctgcagggacttcttggaactagcagagatacacagtcggaaatggcagcgggcactgcagtatgagcaggagcagcgcgtgcacttggaggaaaccattgagcagctggcgaagcagcacaacagcctcgagcgggccttccacagtgcccctggccggccggccaacccctccaagagcttcattgagggaagcctcttgactcccaaaggagaggacagtgaggaagatgaagataccgagtactttgatgccatggaagactccacatccttcatcaccgtgatcaccgaggccaaggaagacagaaaagctgaaggtagcaccgggacaagttccgtggactggagctcagcagacaatgtactagatggtgcctcgctcgtgcccaagggttcatccaaagtcaagaggcgagtccgcattcccaacaagcccaactacagccttaacctctggagcatcatgaagaactgcatcggccgggagctctccaggatccccatgccggtgaacttcaatgagcccctgtccatgctccagcggctgacagaggacctggagtaccaccacctgctggacaaggcagtgcactgcaccagctcagtggagcagatgtgcctggtggccgccttctctgtgtcctcctactccaccacagtgcaccgcatcgccaagcccttcaaccccatgctgggggagaccttcgagctggaccgcctcgacgacatgggcctgcgctccctctgtgagcaggtgagccaccaccccccctcagctgcgcactacgtgttctccaagcatggctggagcctctggcaggagatcaccatctccagcaagttccggggaaaatacatctccatcatgccgctaggtgccatccacttagaattccaggccagtgggaatcactacgtgtggaggaagagcacctcaactgttcacaacatcatcgtgggcaagctctggatcgaccagtcaggggacatcgagattgtgaaccataagaccaatgaccggtgccagctgaagttcctgccctacagctacttctccaaagaggcagcccggaaggtgacaggagtggtgagtgacagccagggcaaggcccattacgtgctgtccggctcgtgggatgaacaaatggagtgctccaaggtcatgcatagcagtcccagcagccccagctctgacgggaagcagaagacagtgtaccagaccctgtcagccaagctgctgtggaagaagtacccgctgccggagaacgcggagaacatgtactacttctcagagctggccctgaccctcaacgagcacgaggagggcgtagcgccaaccgacagccgcctgcggcccgaccagcggctgatggagaagggccgttgggacgaggccaataccgagaagcagcggctggaggagaagcagcgcctgtcgcggcgccggcggctggaggcctgcgggccgggcagcagctgcagctcggaggaagagaaggaggcggatgcctacacgccactgtggtttgagaagaggctggatccgctgaccggggagatggcctgtgtgtacaagggcggctactgggaggccaaggagaagcaagactggcatatgtgccccaacatcttctgagcgccacccttgcaacaaatacaggcgcctgcacagcctggcccacctgttcattaatgcactcaatttagtactgaatggtctttctcccagcccattcccagcccttcctatttcctttcctattttttttttctccccacactttcttgggactcccaccttggaaggaggaagggctgacctgggttctctccagcccccaggtgcgccgg

SEQ ID NO: 21310 - DNA, 2470 bp, Homo sapiens
  source 1..2470: mol_type = unassigned DNA
gagtgtccgccgcctccgccgggcggcccaccgagctgtgcacgcgtccgtgcaagcccccgggacccggcgccatgtagcgccccgccgattggaggctgccccgccgcgggaaatgaagggacgcggctgctgggacacggcctccgtgcgctccttctgcagctccggctgcctgaataaatttaagaaggatgactctggggacgacgacgaggctaccaccccagccgacaagagcgagctgcaccacaccctgaagaatctttccctgaagttagatgacctcagcacgtgcaatgacctcatcgccaagcacggcgctgcactccagcgctccctgacagagctggacggcctcaagatcccatctgagagtggggagaagctgaaggtggtgaatgagcgggccaccctcttccgcatcacatccaatgctatgatcaacgcctgcagggacttcttggaactagcagagatacacagtcggaaatggcagcgggcactgcagtatgagcaggagcagcgcgtgcacttggaggaaaccattgagcagctggcgaagcagcacaacagcctcgagcgggccttccacagtgcccctggccggccggccaacccctccaagagcttcattgagggaagcctcttgactcccaaaggagaggacagtgaggaagatgaagataccgagtactttgatgccatggaagactccacatccttcatcaccgtgatcaccgaggccaaggaagacagcagaaaagctgaaggtagcaccgggacaagttccgtggactggagctcagcagacaatgtactagatggtgcctcgctcgtgcccaagggttcatccaaagtcaagaggcgagtccgcattcccaacaagcccaactacagccttaacctctggagcatcatgaagaactgcatcggccgggagctctccaggatccccatgccggtgaacttcaatgagcccctgtccatgctccagcggctgacagaggacctggagtaccaccacctgctggacaaggcagtgcactgcaccagctcagtggagcagatgtgcctggtggccgccttctctgtgtcctcctactccaccacagtgcaccgcatcgccaagcccttcaaccccatgctgggggagaccttcgagctggaccgcctcgacgacatgggcctgcgctccctctgtgagcaggtgagccaccaccccccctcagctgcgcactacgtgttctccaagcatggctggagcctctggcaggagatcaccatctccagcaagttccggggaaaatacatctccatcatgccgctaggtgccatccacttagaattccaggccagtgggaatcactacgtgtggaggaagagcacctcaactgttcacaacatcatcgtgggcaagctctggatcgaccagtcaggggacatcgagattgtgaaccataagaccaatgaccggtgccagctgaagttcctgccctacagctacttctccaaagaggcagcccggaaggtgacaggagtggtgagtgacagccagggcaaggcccattacgtgctgtccggctcgtgggatgaacaaatggagtgctccaaggtcatgcatagcagtcccagcagccccagctctgacgggaagcagaagacagtgtaccagaccctgtcagccaagctgctgtggaagaagtacccgctgccggagaacgcggagaacatgtactacttctcagagctggccctgaccctcaacgagcacgaggagggcgtagcgccaaccgacagccgcctgcggcccgaccagcggctgatggagaagggccgttgggacgaggccaataccgagaagcagcggctggaggagaagcagcgcctgtcgcggcgccggcggctggaggcctgcgggccgggcagcagctgcagctcggaggaagcagagaaggaggcggatgcctacacgccactgtggtttgagaagaggctggatccgctgaccggggagatggcctgtgtgtacaagggcggctactgggaggccaaggagaagcaagactggcatatgtgccccaacatcttctgagcgccacccttgcaacaaatacaggcgcctgcacagcctggcccacctgttcattaatgcactcaatttagtactgaatggtctttctcccagcccattcccagcccttcctatttcctttcctattttttttttctccccacactttcttgggactcccaccttggaaggaggaagggctgacctgggttctctccagcccccaggtgcgccgggtcacccgtgccccttcattatggacctgggccctaccggaacccctgccccagttaccacaactcaggccggctggcccgggccatgggctgcgcaaatcaccagcccccaacccagggaggaactggcccctcctagggagcctcttcgactttttta

SEQ ID NO: 21311 - DNA, 2045 bp, Homo sapiens
  source 1..2045: mol_type = unassigned DNA
agcattctgagaacagcagggccacgccaggcgcctgcctctccccacagcacagccaggatggggcctggagaaggccggcagcagcagaggagaccctgggagtcagggatggacaccaggcctgcagggacttcttggaactagcagagatacacagtcggaaatggcagcgggcactgcagtatgagcaggagcagcgcgtgcacttggaggaaaccattgagcagctggcgaagcagcacaacagcctcgagcgggccttccacagtgcccctggccggccggccaacccctccaagagcttcattgagggaagcctcttgactcccaaaggagaggacagtgaggaagatgaagataccgagtactttgatgccatggaagactccacatccttcatcaccgtgatcaccgaggccaaggaagacagaaaagctgaaggtagcaccgggacaagttccgtggactggagctcagcagacaatgtactagatggtgcctcgctcgtgcccaagggttcatccaaagtcaagaggcgagtccgcattcccaacaagcccaactacagccttaacctctggagcatcatgaagaactgcatcggccgggagctctccaggatccccatgccggtgaacttcaatgagcccctgtccatgctccagcggctgacagaggacctggagtaccaccacctgctggacaaggcagtgcactgcaccagctcagtggagcagatgtgcctggtggccgccttctctgtgtcctcctactccaccacagtgcaccgcatcgccaagcccttcaaccccatgctgggggagaccttcgagctggaccgcctcgacgacatgggcctgcgctccctctgtgagcaggtgagccaccaccccccctcagctgcgcactacgtgttctccaagcatggctggagcctctggcaggagatcaccatctccagcaagttccggggaaaatacatctccatcatgccgctaggtgccatccacttagaattccaggccagtgggaatcactacgtgtggaggaagagcacctcaactgttcacaacatcatcgtgggcaagctctggatcgaccagtcaggggacatcgagattgtgaaccataagaccaatgaccggtgccagctgaagttcctgccctacagctacttctccaaagaggcagcccggaaggtgacaggagtggtgagtgacagccagggcaaggcccattacgtgctgtccggctcgtgggatgaacaaatggagtgctccaaggtcatgcatagcagtcccagcagccccagctctgacgggaagcagaagacagtgtaccagaccctgtcagccaagctgctgtggaagaagtacccgctgccggagaacgcggagaacatgtactacttctcagagctggccctgaccctcaacgagcacgaggagggcgtagcgccaaccgacagccgcctgcggcccgaccagcggctgatggagaagggccgttgggacgaggccaataccgagaagcagcggctggaggagaagcagcgcctgtcgcggcgccggcggctggaggcctgcgggccgggcagcagctgcagctcggaggaagagaaggaggcggatgcctacacgccactgtggtttgagaagaggctggatccgctgaccggggagatggcctgtgtgtacaagggcggctactgggaggccaaggagaagcaagactggcatatgtgccccaacatcttctgagcgccacccttgcaacaaatacaggcgcctgcacagcctggcccacctgttcattaatgcactcaatttagtactgaatggtctttctcccagcccattcccagcccttcctatttcctttcctattttttttttctccccacactttcttgggactcccaccttggaaggaggaagggctgacctgggttctctccagcccccaggtgcgccgggtcacccgtgccccttcattatggacctgggccctaccggaacccctgccccagttaccacaactca

SEQ ID NO: 21312 - DNA, 6600 bp, Homo sapiens
  source 1..6600: mol_type = unassigned DNA
catttcccggggatttggagcaggcacgcgcggcccgggcgtccggagctgtagcagcagcagcagccgccgtgccggggccgccaccgcggcgggcacccgcgtcccgggcgcccacggaccatggagagggcagtccagggcacagacggcggcgggggtagcaacagcagcagccgcagcagcagccgtgctacctcggcgggctcctcgccctcctgctctctggcgggccggggggtctccagccggtcggcggcggccgggctcggcggcgggggaagccgcagcagcccgggctctgtggccgctagcccgtccgggggaggcggccgcaggagggagccggcgctcgagggcgtgctcagcaaatacaccaacctcctccagggctggcagaacaggtacttcgtactggatttcgaggctggcatcctgcagtattttgtgaatgagcaaagcaaacaccagaagcctcgaggagtcctgtctttatctggagccatagtgtccctgagcgatgaagctccccacatgctggtggtgtactctgctaatggagagatgtttaaactgagagctgctgatgcaaaagagaaacaattctgggtgactcagcttcgagcttgtgccaaataccacatggaaatgaattctaagagtgctccaagctcccgaagccgaagtctcactttgctcccacatggaacacccaattctgcgtctccctgtagccagagacacctcagtgtgggggcccccggtgttgtcacaatcacgcatcacaagtcgcctgcagccgcccgaagagccaagagtcagtattccggccagcttcacgaagtcagagagatgatgaaccaggtggaagggcagcagaagaaccttgtgcacgccattgagtccctgccagggtccggccccctcactgccttggaccaggacctgctgctcctgaaagctacctctgctgccaccctcagctgccttggggagtgcctcaacttgttacagcagagtgtgcaccaggcgggccagcccagccagaagccaggagcctcggaaaacatcctgggatggcacgggtccaagtcacattccacagagcagctgaaaaatgggacacttggctctttgccatcagccagtgccaacataacctgggcaattttaccaaactctgctgaagacgaacaaacctcacagccagagccagagccaaactcaggctctgaattggttttgtctgaagatgaaaaaagtgacaatgaagataaggaagagacggaattgggcgtcatggaggatcagcgtagtataattcttcatctcatttcacaactcaaacttggaatggatttgaccaaggtggtgcttcccacctttatcctggagaagcgatctttgctggagatgtatgcagatttcatggcgcacccagacctactgctggccatcaccgctggggccacaccagaggagagagtcatttgcttcgttgagtattatctcacagcctttcacgagggccgcaagggcgctttagccaagaagccctacaaccccatcataggcgagacatttcactgctcctgggaagttcccaaggacagggtcaagcctaagaggactgcttcccgctctcctgccagctgtcacgaacacccaatggccgatgacccttccaaaagctacaaactaaggtttgtggctgagcaagtgtcccatcacccacccatctcctgcttctactgtgagtgcgaggagaagagactgtgcgtcaacactcatgtatggaccaaaagcaagttcatgggcatgtccgtgggggtctctatgataggggaaggtgtgttgaggctcctggaacacggggaggagtacgtattcaccctgcctagtgcctacgcccggtccattctcaccatcccgtgggtggagctcggaggaaaagtcagcatcaactgtgccaagactgggtactcagcgacagtgatattccacacgaagcctttctatggagggaaagtccacagggttaccgcagaagtgaagcacaacccaaccaacaccattgtttgtaaagcccatggggaatggaatggtactttagagttcacctacaacaatggagaaaccaaagtcatcgacacaaccacactgccagtgtatcccaagaagatcagacctcttgagaagcagggacccatggagtccaggaacctctggcgggaggtgacccgatacctgcggctgggggacattgacgcagccaccgagcagaagcggcacctggaggagaagcaacgggtggaggaacggaagcgcgagaacctccgcacaccatggaagcccaaatattttatccaggagggcgatggctgggtatacttcaatcccctctggaaagcacactgatggggtggaggtgcagagctttccagtatagccctgtttttgtaggaatattaaagtagtagagtatcagggttttgttggcattcactgagaccttgtattagcatccaagaaatgatgagagagagagaaattatatactatgaaaagtgcacccccacactctgctagaggaatgaatttattcaagagccattcggggcacgtgtgtgtacacaccgtatacgttcacacacatgcactatgtaaacatctgagtatgattacacatttaaatactgcactcaccaaggttaaagtgggtaatcataagctcctttttatcaatgaagtttgaagtttttctatttttcactttgccaaaaatgttttacactcacaaagatattctcacttagtcaactcctgtcaaaatgaaggtgaactggcatggcccgatcactgtccataagggagaaagtggctcattcctggtagaagtatgggtggttatcatttcaaaattattgtgattctcacctccctccccacctcagtgttttgtctgtccgcgcccaagaaagataagcaagtatttcctgctggatgggggttggcaggaagctgttaaagatttatgccagagccttgcaggatggagcacctctgggacaactaagagccaaggcccaccaaggagttttccacccgtctctcatggtcacagcgctagtcattcatttttgagaagttgcttcttttacatcagaaaaccagtcaatcatatggagacttcttttgtgatgaaaaagggctttagaagttaaatacatgcatgcacatgaaaacatgcacaaccacagcctcaatcttgtatttagtttggggaaagagaagagaatttcctgtggattattttttcctcaagtgcacctctctggttaacccaaactctgcaagaaagcactgtgactaaaacatacataacgcctgcataaatattccatggtttcagttaaatttcagtttttagcctttacacatgaggtcaaaggagtgacgaaaatacaaagcaaggaaaaaatgaaatatctggtttttgctgaatgcttaatttattttttactgtgccactccaatatttatcaaatccaaatagcatgaatgcttctctgtagtaatactaattttgtgccttttgtctgctttcttaagaccagttgttcacactttgtagatattagacaaatatatttcgattgaatacatatctgtgtctgtgttttattttcagggattcaacagttctattaaattggtggctctaagtgagctcaacttttcctggttaaatatttctagttattgatatgaagagcaatcatatctatatggaaaaagtatttaacacatttaaaaatgtaccagataaacatttatgaatattttctggtaagtccataagaacatttaactcctacccagtgagtgttgtttcacgagaagagtcactgccagaagtcacaatagaagcctacttaggtccacagtctttaaagcatctgggtgaatcaagtatctggaaccatcttatttctgacagagaaagtggaacaaatgctattttgagaaaaagaagaaaactcaactcaatgagactgaaaagtaatcactgtgttgttggattttccagtctgactacaaagcataaaccatctgggaagtaaaacatggagagggctcacttttcttttgaggccaggggtacatttaaaattgtgaaatgttatgtgtcaggagatttacataaaacatatgtactccaggaataattataaatacccttgtagccactgcttaagcaaagaaacctgtttaccagtaccttaaaagccactattgtgcccctatacaattgtatccctctccatgccttcctggaataaccatccccttatgggttttttgttgttcttttagactatacacactatgtgtgtatttctaaacagtgtgattggttttacccatttttgtaaaaattgaatcataccctagtttgcctatttgagccaatattttctttctagttcaatccttgttgctctatttgttcattttcttgctgagttcatattatgttttattgtggtaaaatatatgtaacaaaatctaccattttaactattttttttttcccagatggagtctcactctgtcacccaggctggagtgcaatggcgcgcaatctctgctcactgcaacctctgccttccgggttcaagcgattctcctgcttcagcctcccgagtagctgggattacaggcgtgtgccaccatgcccagctaatttttgtatttttagtagagatggggtttcaccatgttggccaggctggtctcaaactcctgacctcaggtgattcacccacctgagcctcccaaagtgctgggattacaggtgtgagccactgtgcccagcctggcattttaaaaatatactgagaagtggaattgctatatcatatgaaaattctggtttaagttttaaggaattgccacacagtttctcacaagagctggctgccacattttgcaatgccactagcaatgcacaagggatccaatttctccacatcctcaccaatacctattattttgtttttacttttgttgtttctttaaccccatcctaatggctatgaagtgccatctcaatgtggttttgatttatatttccctaatgattagtgatgttgagcatgtgtttttgtggttttggccatttgtaaatctttggagaaatgtttattcaaatccttttgcccattttaaaattaggttctttttgttgagttttaggagtcctttatgggtattaatcctttctggatattaatcctttatcagatatgatgtgcaaatattttcttctgactctttggttgcctcttcactgttaatggtgtcctctgatgtacaaaagtatttaattttgataatgtctaatttatttttctttgtacttgtgcttttgatgtcatatccaagaaatcattgacaaatacaatgctgtgaagtttttgtcctatgatttcttctaagagttttatagttttaggtcttactggggggtagggggtactttgatccattttgagttggtttttatatatggtgttagataagggtccaacttcattcttttgcatgtggatatccagtttccccaacaccatttgttgaaaagactctgcattccccattgagtgatcttggtaccttgttgaaaatcactggctatatacacgaatgtttatttatggcctattcttttccaatggtcgatgtcagtctttatgccagtaccacactcttttagttactgtagctttgtagcaagttacaagattaggaagtatgagacctccaacttttttattcttttttcaatattgtttcgtctgtacagggtcatttaagattccatgtgaattttaggatgaaattttctatttttgcaaaaaactctgggattttgatagggattgcattgaatctgtagatccctttgagtagcattgtcttaacagtaagtcttccaatctgttaaccagaatatctttccatttatttatctgtcttaatttctttcagcatgttttgtagttttcactgggcaagtcttcctcagttaagtttaattcttaagtattttactctttttggtactactgtaagtagatctttctcagtttcctttttggattgttcaatgttggcatataaaagtgtaagtgccaggcacagtgtcacatgcctatagttccagctactcaggaggctgagacaggaggattgcttgggcccaggagtttgagatttcagcatgctatgattgctcctgtgaatagccactgcactccagcctgggcaacataacaagacctcatttcgtaaaaaacacataatactgatttttgtgcattggttttgtatcctttgctgaatttgtttattctaacagttttttggggggtgtgtgggatctaggattttctagatacaatcatgtcatttgctaacagattttacttcttccaaatttggatgtcttttatttcttgttcttgcctaattgctgtacctagaacttcaaatactgtgttgaaggaaggaggcaaaaaaaaaaaaaaaaaaaaa

SEQ ID NO: 21313 - DNA, 2624 bp, Homo sapiens
  source 1..2624: mol_type = unassigned DNA
tttcccggggatttggagcaggcacgcgcggcccgggcgtccggagctgtagcagcagcagcagccgccgtgccggggccgccaccgcggcgggcacccgcgtcccgggcgcccacggaccatggagagggcagtccagggcacagacggcggcgggggtagcaacagcagcagccgcagcagcagccgtgctacctcggcgggctcctcgccctcctgctctctggcgggccggggggtctccagccggtcggcggcggccgggctcggcggcgggggaagccgcagcagcccgggctctgtggccgctagcccgtccgggggaggcggccgcaggagggagccggcgctcgagggcgtgctcagcaaatacaccaacctcctccagggctggcagaacaggtacttcgtactggatttcgaggctggcatcctgcagtattttgtgaatgagcaaagcaaacaccagaagcctcgaggagtcctgtctttatctggagccatagtgtccctgagcgatgaagctccccacatgctggtggtgtactctgctaatggagagatgtttaaactgagagctgctgatgcaaaagagaaacaattctgggtgactcagcttcgagcttgtgccaaataccacatggaaatgaattctaagatgatgaaccaggtggaagggcagcagaagaaccttgtgcacgccattgagtccctgccagggtccggccccctcactgccttggaccaggacctgctgctcctgaaagctacctctgctgccaccctcagctgccttggggagtgcctcaacttgttacagcagagtgtgcaccaggcgggccagcccagccagaagccaggagcctcggaaaacatcctgggatggcacgggtccaagtcacattccacagagcagctgaaaaatgggacacttggctctttgccatcagccagtgccaacataacctgggcaattttaccaaactctgctgaagacgaacaaacctcacagccagagccagagccaaactcaggctctgaattggttttgtctgaagatgaaaaaagtgacaatgaagataaggaagagacggaattgggcgtcatggaggatcagcgtagtataattcttcatctcatttcacaactcaaacttggaatggatttgaccaaggtggtgcttcccacctttatcctggagaagcgatctttgctggagatgtatgcagatttcatggcgcacccagacctactgctggccatcaccgctggggccacaccagaggagagagtcatttgcttcgttgagtattatctcacagcctttcacgagggccgcaagggcgctttagccaagaagccctacaaccccatcataggcgagacatttcactgctcctgggaagttcccaaggacagggtcaagcctaagaggactgcttcccgctctcctgccagctgtcacgaacacccaatggccgatgacccttccaaaagctacaaactaaggtttgtggctgagcaagtgtcccatcacccacccatctcctgcttctactgtgagtgcgaggagaagagactgtgcgtcaacactcatgtatggaccaaaagcaagttcatgggcatgtccgtgggggtctctatgataggggaaggtgtgttgaggctcctggaacacggggaggagtacgtattcaccctgcctagtgcctacgcccggtccattctcaccatcccgtgggtggagctcggaggaaaagtcagcatcaactgtgccaagactgggtactcagcgacagtgatattccacacgaagcctttctatggagggaaagtccacagggttaccgcagaagtgaagcacaacccaaccaacaccattgtttgtaaagcccatggggaatggaatggtactttagagttcacctacaacaatggagaaaccaaagtcatcgacacaaccacactgccagtgtatcccaagaagatcagacctcttgagaagcagggacccatggagtccaggaacctctggcgggaggtgacccgatacctgcggctgggggacattgacgcagccaccgagcagaagcggcacctggaggagaagcaacgggtggaggaacggaagcgcgagaacctccgcacaccatggaagcccaaatattttatccaggagggcgatggctgggtatacttcaatcccctctggaaagcacactgatggggtggaggtgcagagctttccagtatagccctgtttttgtaggaatattaaagtagtagagtatcagggttttgttggcattcactgagaccttgtattagcatccaagaaatgatgagagagagagaaattatatactatgaaaagtgcacccccacactctgctagaggaatgaatttattcaagagccattcggggcacgtgtgtgtacacaccgtatacgttcacacacatgcactatgtaaacatctgagtatgattacacatttaaatactgcactcaccaaggttaaagtgggtaatcataagctcctttttatcaatgaagtttgaagtttttctatttttcactttgccaaaaatgttttacactcacaaagatattctcacttagtc

SEQ ID NO: 21314 - DNA, 4191 bp, Homo sapiens
  source 1..4191: mol_type = unassigned DNA
cacttaagtcttctcgccggatgctttttcctccttgcttttgccggaaaggagagagatacatgtgaaggatatctgtcctcgttgcttcccctgccctctcaaaagtttaacttctgtgggaatgtgtatcttccttttctggaccatttgacagtcccgccccagccgccgtgtgatttagcaaccggtatcatattcagatcaaatcttaaaaaaaaaaagtcacctacagaactacagaattgttctctcccgctcaagaagggcaagtggactttggcgttaagatgcaggggggtgaaccagtgtccacaatgaaagtctcggagagcgaaggaaagctggagggccaggccacagcggtgaccccgaacaagaacagcagctgtggaggtggaatcagtagcagcagcagcagccgcggtggcagtgcaaaaggctggcagtacagtgatcacatggaaaatgtgtatggctatttaatgaagtataccaaccttgtcactgggtggcagtacaggttttttgttttaaacaatgaagctgggctgttggagtactttgtgaatgaacagtctagaaatcagaaacctagaggaactttgcagcttgcaggagctgtaatatcacccagtgatgaggattctcacaccttcactgtaaacgctgccagtggggaacaatataaactcagagctacagatgcaaaagagcgacagcactgggttagcagacttcagatatgtacacagcatcatactgaagctattggaaagaataatcctcctctgaagtcacggagcttctcacttgcatctagtagtaattctcctatatcgcagaggagaccaagtcaaaatgccatttctttttttaatgttggacattccaaactgcaatcactgagcaaaagaactaatttacctccagaccatcttgtggaagtcagagaaatgatgtctcatgctgaaggacaacaaagagacttaattagacgaattgaatgccttcctacttctggccatcttagttccttggaccaggatctcttaatgctcaaagctacttccatggcaactatgaactgcttaaatgactgctttcatattctccagttacagcatgcatcacatcagaagggctcattgccttcaggaacgacaatcgagtggttagaaccaaagatatctttatcaaaccactataaaaatggagctgaccagccctttgcaactgatcagagtaagccggtggcagtcccagaagagcagcctgttgcagaatctggactattagcgagggagcctgaagaaataaatgcagatgatgagatagaggatacatgtgaccacaaagaggatgacctgggagctgtagaagaacaacgtagtgtcatcctacatctcttgtcacagcttaagctgggcatggatttaacaagagtggtgcttcctacatttatcctagagaagcgttccttgctggaaatgtatgcagactttatgtctcatccagacctatttatagccatcactaatggagccacagctgaggacagaatgattcgctttgttgagtactaccttacctcatttcatgaaggccgtaagggagccattgctaaaaaaccatacaatcctatcattggagaaacatttcactgttcctggaagatgccaaaaagcgaggtagcatccagtgtttttagcagttcttccacccagggagtcacaaatcatgctcctttatcgggggagtctttgacccaggtgggatcagactgttacacagtcagatttgttgctgagcaggtttctcatcatcctccagtctcaggattttatgcagaatgtacagagaggaagatgtgtgtaaatgcgcatgtctggactaagagcaagttcttaggcatgtcaataggcgtgacaatggttggagaaggtatccttagtctgttggagcatggagaagagtacacattttctctaccctgtgcatatgctcggtcaattttgactgttccttgggtagaactgggtggcaaagtcagtgtcaactgtgcaaaaactggatattcagccagcatcacttttcataccaagccattttatggtggcaaactgcatcgggttacagctgaagtaaagcacaacatcaccaacactgtggtatgcagagtgcaaggggaatggaatagtgttcttgagttcacatatagcaatggagagacaaagtatgtggacttgactaaattggcagtgacgaagaaaagagtgagacctctggagaagcaggatccatttgaatccaggcgattgtggaaaaatgtgacagactcgctgagagaatctgaaattgataaggccacagagcataagcataccctggaagaacgtcagaggactgaagaaaggcatcgtactgaaacaggcacaccttggaaaaccaaatattttattaaagagggagatggctgggtttatcataaaccactttggaaaataattccaacaacacaaccagcagagtgacacatactatctaaaactcgaccaaatgaggttcttctctgtttaccctaaatcctcccagaatggagtcattgcactgagtgacctgcttcctgattgcgcagactgaaactagctaaacctgaatgtacctactagggcaccataatactgcagcaagaccaaagtggtaaagaaacacagtggaccttttaccaacctgttcatgtgatgtgagcaataccatcttaaaacttgttacctgaatcagtagatgaatcttttatccagttcttgctcctaaagttaagtttgaatcccctatttttgcacaggggcagcagatacacacaacaatgagaactcagtgactttgatttctttgtagtgaaaagtgaagtctccgtttcagagtttgtgtctttctttctgtccataactgaagtattcactactcttgtaaaccaaccaagaggaggagaaagatgacccagaagtggattcagccattgtgcctgaaatcagtgtttaaaaaaaaaaatcaaccaggttgtggtaacaaggcattctatttcttcaaaaagactgtatgcctgtgtctgaggaacttacctattatccacctctgttggaactctcttttaaaaagtacatttatagattgatcagaattataaccatggagaattttttcttctgagcattttaatatacttgaaaacaacattgacttgaaaaatttcagaacatttttcagtacctagttttattaaatattacacttgagagacactttttaaaaatgtgttaatgtcaatatgatgagattttagcctttctccagaactaaggcattaaagaaaatagcaaatattaaaaaataaaactgttacttttttccttctttcttttcacctttaggttaatatccagtattatgtgttatccctttggataagtatgctttattttacctctgttaaaaattaaaataaatgattctattcatatttgtcagtaattcaaaacttatatgtgtaactgaacgcgcatgtaaggtatggttttatttattttttttttttttgaggaaatttaaatgctaaagaaacaacgaaatgaaaaggtatcaggaaaaaaagatcaggaagttgtattcaggtacaaatctttttttaaataagtattttgttgaggttgaagaattgctggcaattaaaagaatagagctaattatggctttcatcattcattcatgtatttattgagcacctacttattatggtgctcaacacttgttactgcaagctaccttaatttcccaagagtggtgccttactctgttttttctgatatggtcttccaatcagtgtgtgtaacatacctgttgtttatcagccattgtaggtggctgtgtctgttgcatcatcataagaagtttaagctttgtgctctgataaattgtgttctgttaaagaggttagtaggatgaaaacagcaaaacaataattttttcaacaaattgtaaattataagaaaaagagttggtttgtgtacaacaattttaatgattcccttgttcatttttgctgtgaaatgcactgaaaaaaatcctcaaaatgagttatagttcctgtgttgggaaaattgacaaataataaaactagagaacaaacaa

SEQ ID NO: 21315 - DNA, 4195 bp, Homo sapiens
  source 1..4195: mol_type = unassigned DNA
ctgcggggaggggcggcgccacctcgcgctccgccgtggtcccggcgccgggtcccggagacagacgttacgcgggctcgagcgtcctcggggagtgccagccagagttggtgacgaccacttcctcgacgtggggcgggcggacgggaagcctggggtcgtggccaccgcctcgggagctctgggagcccgggtgaccgcgtagaaatgaacacagaagcggagcaacagcttctccatcacgccagaaatggcaatgctgaagaagtaagacaactattagagaccatggcgaggaatgaagtgattgctgacattaattgcaaaggaagaagtaagtctaacttgggctggacacctctacatctggcatgctattttggacacagacaagtggtccaggatctgttgaaggctggtgcagaagtgaatgtgttgaatgacatgggagacacgccgcttcatcgagctgcctttacaggacgaaaggagttggtaatgcttctcttagaatataatgctgatactactattgttaatgggagtggacagacagcaaaagaagttactcatgctgaagaaatcagaagcatgcttgaagctgtagaaaggactcaacaaagaaagcttgaagaattacttttagcagcagcaagagaaggcaaaacaacagaactcacagctctgctcaacaggcccaatcctcctgatgttaactgttcggatcagttaggaaatacacccttgcattgtgcagcttaccgggcccataaacaatgtgccttaaagcttctaagaagtggagcagaccctaatctgaagaacaaaaatgatcagaaacctcttgaccttgcccagggtgctgaaatgaaacacattcttgttggtaataaggtcatctacaaagcattgaaacgatatgagggccctctctggaagagttcaagattttttggctggagattattctgggtagtgttagagcatggagtcctttcatggtataggaaacagcctgatgcagttcataatatttatcgccagggatgcaaacacctgactcaagcagtatgcacggtaaaatccactgatagctgcctcttctttattaaatgctttgatgacaccattcatggcttccgggttcctaagaatagccttcagcagtcaagagaggactggctggaagcaatagaagaacattctgcttacagcactcactactgttcccaggaccagctgactgatgaggaggaggaagatacggtttctgctgcagacctgaagaaatcattagagaaagcacagtcatgccaacagcgactagatagggaaatttccaactttctcaaaatgattaaggagtgtgacatggctaaagaaatgcttccatcatttcttcagaaagttgaagttgtctcagaagcttctagagaaacttgtgtagctttgactgattgccttaatctcttcaccaaacaagaaggggtgaggaattttaaattggaacaagagcaagaaaaaaacaaaatcttgtcagaagcactggagacgctggccactgaacatcatgaattagagcagtctctggtgaaaggctctccacccgccagcatccttagcgaggacgagttctatgatgcgctgtcagattccgagtccgaaaggtccctgagtagattggaagcagtgacagcacgctcctttgaagaggaaggagagcatttgggcagtagaaaacacagaatgtccgaagaaaaagactgtggtggcggagatgctctctccaatggcatcaagaaacacagaacaagtttgccttctcctatgttttccagaaatgacttcagtatctggagcatcctcagaaaatgtattggaatggaactatccaagatcacgatgccagttatatttaatgagcctctgagcttcctacagcgcctaactgaatacatggagcatacttacctcatccacaaggccagttcactctctgatcctgtggaaaggatgcagtgtgtagctgcgtttgctgtatctgctgttgcttctcagtgggaacggactggaaaacctttcaacccactgctgggagagacttatgaattagtgcgagatgaccttggatttagactcatctccgaacaggtcagccatcacccaccaatcagtgcatttcatgctgaaggattaaacaatgacttcatctttcatggctctatctatcccaaactgaaattctgggggaagagtgtagaagcagaacccaaaggaaccatcaccttggagctccttgaacacaatgaggcatatacatggacaaatcccacctgctgtgtgcataatatcattgtgggtaaactgtggatcgaacagtatggcaatgtggaaattataaaccacaagactggggacaaatgtgtgttgaattttaagccatgtggcctttttggtaaggaattacacaaagttgaaggctacattcaagataaaagcaaaaagaagctctgtgccctctatgggaagtggactgaatgtttatacagtgttgaccctgccacgtttgacgcttacaaaaaaaatgataagaaaaatacagaagagaagaagaacagcaaacagatgagcacctctgaggagttggatgaaatgccagtgccggattctgaaagtgtattcattatccctggaagcgttcttctatggcgaatagccccacggcctccaaattctgcccagatgtataattttactagttttgcaatggttttgaatgaagtagacaaagacatggagagtgtgattcccaagacagactgcaggttacggcctgacatcagagccatggaaaatggagagatagatcaagctagtgaagaaaaaaaacgacttgaggaaaaacaaagagcagcccgcaaaaacaggtccaagtcagaagaggactggaagacgaggtggttccatcaaggtcctaatccctacaatggagcacaggactggatttactctggcagctactgggacagaaattacttcaatttgcctgacatttattaaaatgcatacaagtcagggtgtttggctaatctacaaataagtcttaaacctatgtttttaaatttttttcccttggtttctacttatcttttaaaaaaaaaaatgaaaaaacactcatgagataactgcatttcacccaacaaaagcagggtataaggcgatattggtgatgaaagtcttaggaaaaatgcataattttgctataaaatgtacttatttggaatactattttatatagaggtaagagaacactgctggggaatatgctttttatggttgctgttgccatatttactgaaggtttatacctaaatgtaactttagctttatggaactatatagtaatcccaaatcaagttattttgaatatttttatgctgtcatgcttgaatgttttagatgtaacctttgacatatttagaactctcctcctatacaatgtttattctcagatatagaggttatgtcattttataaagacttcattgataagatggcttttattcatactaatcctcccaatgttaccccttccatcttccaagaagaaaaaaaatgcctgaatattcagaatagatatttctgatttgaaaattctaaagaattaaactggaaaagtatttcatttacttagtgctctgaatttacttttacagttttctgcagtcagtatcattaaaatggttaagtttacatttgaactgaaaatatgtataaaatctagcaattcacaaaaatgccctagaaatatagattttaatcaccattacataatgacaaaccttgttaaatgcttccacttccagtggcaaatgccactagggaaagtaagttgcactcatgtaagtatcaaactatataaaaggaggccttgtgcatttcaagtttgcaaagtacctgtgtacttaaaatatgtgtggagacctactgtacagtagttttgcccctttaattggggcacattcatcttaaatcttatagtatttatccacccaaaccccagactgagatactgctcccaggggcctaggtagctgccagtccgtgattttaattgctgtcttgaagttaacaagtgttataatgaaataatctacctgatgctaaataaaggctttagaatgttccccaaaag

SEQ ID NO: 21316 - DNA, 1859 bp, Homo sapiens
  source 1..1859: mol_type = unassigned DNA
gaagtcttctgaagtgacaccagtgccttatccctagaggaatatcagcatagaaagcacagtcatgccaacagcgactagatagggaaatttccaactttctcaaaatgattaaggagtgtgacatggctaaagaaatgcttccatcatttcttcagaaagttgaagttgtctcagaagcttctagagaaacttgtgtagctttgactgattgccttaatctcttcaccaaacaagaaggggtgaggaattttaaattggaacaagagcaagaaaaaaacaaaatcttgtcagaagcactggagacgctggccactgaacatcatgaattagagcagtctctggtgaaaggctctccacccgccagcatccttagcgaggacgagttctatgatgcgctgtcagattccgagtccgaaaggtccctgagtagattggaagcagtgacagcacgctcctttgaagaggaaggagagcatttgggcagtagaaaacacagaatgtccgaagaaaaagactgtggtggcggagatgctctctccaatggcatcaagaaacacagaacaagtttgccttctcctatgttttccagaaatgacttcagtatctggagcatcctcagaaaatgtattggaatggaactatccaagatcacgatgccagttatatttaatgagcctctgagcttcctacagcgcctaactgaatacatggagcatacttacctcatccacaaggccagttcactctctgatcctgtggaaaggatgcagtgtgtagctgcgtttgctgtatctgctgttgcttctcagtgggaacggactggaaaacctttcaacccactgctgggagagacttatgaattagtgcgagatgaccttggatttagactcatctccgaacaggtcagccatcacccaccaatcagtgcatttcatgctgaaggattaaacaatgacttcatctttcatggctctatctatcccaaactgaaattctgggggaagagtgtagaagcagaacccaaaggaaccatcaccttggagctccttgaacacaatgaggcatatacatggacaaatcccacctgctgtgtgcataatatcattgtgggtaaactgtggatcgaacagtatggcaatgtggaaattataaaccacaagactggggacaaatgtgtgttgaattttaagccatgtggcctttttggtaaggaattacacaaagttgaaggctacattcaagataaaagcaaaaagaagctctgtgccctctatgggaagtggactgaatgtttatacagtgttgaccctgccacgtttgacgcttacaaaaaaaatgataagaaaaatacagaagagaagaagaacagcaaacagatgagcacctctgaggagttggatgaaatgccagtgccggattctgaaagtgtattcattatccctggaagcgttcttctatggcgaatagccccacggcctccaaattctgcccagatgtataattttactagttttgcaatggttttgaatgaagtagacaaagacatggagagtgtgattcccaagacagactgcaggttacggcctgacatcagagccatggaaaatggagagatagatcaagctagtgaagaaaaaaaacgacttgaggaaaaacaaagagcagcccgcaaaaacaggtccaagtcagaagaggactggaagacgaggtggttccatcaaggtcctaatccctacaatggagcacaggactggatttactctggcagctactgggacagaaattacttcaatttgcctgacatttattaaaatgcatacaagtcagggtgtttggctaatctacaaataagtctt

SEQ ID NO: 21317 - DNA, 1886 bp, Homo sapiens
  source 1..1886: mol_type = unassigned DNA
gcgggctcgagcgtcctcggggagtgccagccagagttggtgacgaccacttcctcgacgtggggcgggcggacgggaagcctggggtcgtggccaccgcctcgggagctctgggagcccgggtgaccgcgtaggtcagtttctcgcggctgtccacgcctggagttcgaggccggttcccgcgctgacgggttcccgccgggctgcgctcgggagaaatgaacacagaagcggagcaacagcttctccatcacgccagaaatggcaatgctgaagaagtaagacaactattagagaccatggcgaggaatgaagtgattgctgacattaattgcaaaggaagaagtaagtctaacttgggctggacacctctacatctggcatgctattttggacacagacaagtggtccaggatctgttgaaggctggtgcagaagtgaatgtgttgaatgacatgggagacacgccgcttcatcgagctgcctttacaggacgaaagatctgttctcagggaagctgagatggagatgagtgggcagcaggtttatggagtgctcgtggcatcacacctgtgcacgagggtggggaagaagtggacaggagtggacaagtcaagtagtgctgccggctcaagcgatgcctcagcctttctgctgtgtgcgaagctttgcagaggagatgatgcttcaaagttgtccctgttggggatgagcagccaggcctttatacactgggacagtcagtcatggatacgtggatactctggaaaccctcatccctggaggtctgagcccctggataccatgcccttcttaggctggagttgctgcccttgtccatttaccataaaaattggacaagagaataccaggacacacctgagtttctcatcgtatgctaaacctgttcttccacgtacatccccaatgtgtacagccctacttttttctgctgatcaagttcaattacttctgctaagatggtgactattcttgcctgctggtccttggatgcaaggaccccaatgttcaggcagcctttggtgccttctagcatacgaatcagagcattatctttaggtgtggaataagctgccccaaaacctgttgaagccaaccaggcactgtgctcccttctgttatgggaagtgcaagatgcagtaatttattcttctgaggaagtgtcttgtcattgcccagaccagtgaacttctaaaaatttactgacatggaaaagctcctgaattcttcctaagttttacctcccacccactggatcagatatgtcttaccaaggctttgaacatcctagcctcgtggagaagaagcctcttctcctggttctgttagcatgatgttatgaaaggaaattaaattttgggaccccaaactcattttgccaaagggaaaaatcaagctgagaactgggtcatgcaaacctgcctcccccttttggttcctaaataaggtggctacaagaggaaaagctacatgcctcccccatattttgctcacaaggaaattcctagtgagcaatgcaaagtgatagcttatctttacaggtgcagtcacccaggcccaccacacgcaaatgcatatctaattgttcccctgccccattttgtctgtgttatgtagaatgcagattccctacgtttttcttctgccccgtttatgtcatcttatgtaaaaacatgcagattcatggagccagacaaaggcatgactatcttttcccacccacccccttacctgaaaattgtgtacttctcaatatcctgccctttcccctttaaatttgaagccctcaaaaatcatcttcagagaaagatgtctgtctcctgggtgcgtgtccttaactttggcaaataaatctaaaatgattg

SEQ ID NO: 21318 - DNA, 3318 bp, Homo sapiens
  source 1..3318: mol_type = unassigned DNA
ccagggccggtgtctccaggagagggccgagcgcacagcagctctaggacctcgcaggcgcctcggcgcggcactcacgtagagcccaaggagcagtccccgacctctcctcggagggccgtgcaggcttccccggcggtccctacctgcgcctccgcccgccagcggcgctggggaaggggaggagcggcccggacgctgcccgccgcgcgcagggagccgcccgccgcaggccttgccgccgcccgcccgcgctctccccgcgagccccggagggcgggtctgcggccgagccagcggcggcggaggggcagcgcagacctctgcggcccgggcgggcgcggcgcgggagtcctgggccgctggcgggcaacgcctctgcccgacctcgctggggaaggctggcgctgctgcccggccggagccaggggcaggctgcgcaaaggtgacttagggagaccttgcgggccgccctgggtcgcgcctcccggatcggctcgcctcggctcgactggaggggaggaggaggagcaggccgagcgcattcgcgctggagcttgcgaggagcgcagggtggagcgcgccagccggggtcctcggatctggcccaggtgaggaattttaaattggaacaagagcaagaaaaaaacaaaatcttgtcagaagcactggagacgctggccactgaacatcatgaattagagcagtctctggtgaaaggctctccacccgccagcatccttagcgaggacgagttctatgatgcgctgtcagattccgagtccgaaaggtccctgagtagattggaagcagtgacagcacgctcctttgaagaggaaggagagcatttgggcagtagaaaacacagaatgtccgaagaaaaagactgtggtggcggagatgctctctccaatggcatcaagaaacacagaacaagtttgccttctcctatgttttccagaaatgacttcagtatctggagcatcctcagaaaatgtattggaatggaactatccaagatcacgatgccagttatatttaatgagcctctgagcttcctacagcgcctaactgaatacatggagcatacttacctcatccacaaggccagttcactctctgatcctgtggaaaggatgcagtgtgtagctgcgtttgctgtatctgctgttgcttctcagtgggaacggactggaaaacctttcaacccactgctgggagagacttatgaattagtgcgagatgaccttggatttagactcatctccgaacaggtcagccatcacccaccaatcagtgcatttcatgctgaaggattaaacaatgacttcatctttcatggctctatctatcccaaactgaaattctgggggaagagtgtagaagcagaacccaaaggaaccatcaccttggagctccttgaacacaatgaggcatatacatggacaaatcccacctgctgtgtgcataatatcattgtgggtaaactgtggatcgaacagtatggcaatgtggaaattataaaccacaagactggggacaaatgtgtgttgaattttaagccatgtggcctttttggtaaggaattacacaaagttgaaggctacattcaagataaaagcaaaaagaagctctgtgccctctatgggaagtggactgaatgtttatacagtgttgaccctgccacgtttgacgcttacaaaaaaaatgataagaaaaatacagaagagaagaagaacagcaaacagatgagcacctctgaggagttggatgaaatgccagtgccggattctgaaagtgtattcattatccctggaagcgttcttctatggcgaatagccccacggcctccaaattctgcccagatgtataattttactagttttgcaatggttttgaatgaagtagacaaagacatggagagtgtgattcccaagacagactgcaggttacggcctgacatcagagccatggaaaatggagagatagatcaagctagtgaagaaaaaaaacgacttgaggaaaaacaaagagcagcccgcaaaaacaggtccaagtcagaagaggactggaagacgaggtggttccatcaaggtcctaatccctacaatggagcacaggactggatttactctggcagctactgggacagaaattacttcaatttgcctgacatttattaaaatgcatacaagtcagggtgtttggctaatctacaaataagtcttaaacctatgtttttaaatttttttcccttggtttctacttatcttttaaaaaaaaaaatgaaaaaacactcatgagataactgcatttcacccaacaaaagcagggtataaggcgatattggtgatgaaagtcttaggaaaaatgcataattttgctataaaatgtacttatttggaatactattttatatagaggtaagagaacactgctggggaatatgctttttatggttgctgttgccatatttactgaaggtttatacctaaatgtaactttagctttatggaactatatagtaatcccaaatcaagttattttgaatatttttatgctgtcatgcttgaatgttttagatgtaacctttgacatatttagaactctcctcctatacaatgtttattctcagatatagaggttatgtcattttataaagacttcattgataagatggcttttattcatactaatcctcccaatgttaccccttccatcttccaagaagaaaaaaaatgcctgaatattcagaatagatatttctgatttgaaaattctaaagaattaaactggaaaagtatttcatttacttagtgctctgaatttacttttacagttttctgcagtcagtatcattaaaatggttaagtttacatttgaactgaaaatatgtataaaatctagcaattcacaaaaatgccctagaaatatagattttaatcaccattacataatgacaaaccttgttaaatgcttccacttccagtggcaaatgccactagggaaagtaagttgcactcatgtaagtatcaaactatataaaaggaggccttgtgcatttcaagtttgcaaagtacctgtgtacttaaaatatgtgtggagacctactgtacagtagttttgcccctttaattggggcacattcatcttaaatcttatagtatttatccacccaaaccccagactgagatactgctcccaggggcctaggtagctgccagtccgtgattttaattgctgtcttgaagttaacaagtgttataatgaaataatctacctgatgctaaataaaggctttagaatgttccccaaaag

SEQ ID NO: 21319 - DNA, 877 bp, Homo sapiens
  source 1..877: mol_type = unassigned DNA
gagggacccgcgtccagatcttcagtgtctattggatttttccaagagaaagtttgtaaaattccttacactgtagatgtggatcagatacgatgattcagtagaagagcacatgtcaggggcagtggaggctggctgctgaaggatgaacggagaggaagaattctttgatgccgtcacaggctttgattctgataactcttctggggaattttcagaggcaaatcagaaagtcacgggaatgattgacttagacaccagcaaaaataataggattgggaaaactggggagaggccctctcaagagaacggaattcagaaacacaggacatcgctgccggctcccatgttcagcagaagcgacttcagcgtgtggaccatcctgaagaagtgtgttggcctggagctgtccaagatcacgatgccaatcgccttcaacgagcctctgagcttcttgcagcggatcacggagtacatggagcacgtgtacctcatccacagggcctcctgccagccccagcccctggagaggatgcagtctgtggctgcttttgctgtttcggctgtggcttcccagtgggagaggaccggcaaaccatttaatccactcttgggagaaacgtatgaattaatcagggaagatttaggattcagatttatatcggaacaggtcagtcaccacccccccatcagtgcgttccactcggaaggtctcaaccatgacttcctgttccatggctccatctaccccaagctcaagttctggggcaaaagcgtggaggcggagccccgaggcaccatcaccctggagctgctcaatgtcaaccaaagacacctcagagcaaaacacaagtctccaacaaatgccggccgctaa

SEQ ID NO: 21320 - DNA, 3970 bp, Homo sapiens
  source 1..3970: mol_type = unassigned DNA
agtgggtcgcgggcctacggggcgggggcggggcggcagtgagctcggccggcaaccgagggacccgcgtccagatcttcagtgtctattggatttttccaagagaaagtttgtaaaattccttacactgtagatgtggatcagatacgatgattcagtagaagagcacatgtcaggggcagtggaggctggctgctgaaggatgaacggagaggaagaattctttgatgccgtcacaggctttgattctgataactcttctggggaattttcagaggcaaatcagaaagtcacgggaatgattgacttagacaccagcaaaaataataggattgggaaaactggggagaggccctctcaagagaacggaattcagaaacacaggacatcgctgccggctcccatgttcagcagaagcgacttcagcgtgtggaccatcctgaagaagtgtgttggcctggagctgtccaagatcacgatgccaatcgccttcaacgagcctctgagcttcttgcagcggatcacggagtacatggagcacgtgtacctcatccacagggcctcctgccagccccagcccctggagaggatgcagtctgtggctgcttttgctgtttcggctgtggcttcccagtgggagaggaccggcaaaccatttaatccactcttgggagaaacgtatgaattaatcagggaagatttaggattcagatttatatcggaacaggtcagtcaccacccccccatcagtgcgttccactcggaaggtctcaaccatgacttcctgttccatggctccatctaccccaagctcaagttctggggcaaaagcgtggaggcggagccccgaggcaccatcaccctggagctgctcaaacataatgaagcctacacctggaccaaccccacctgctgcgtccacaacgtcatcatcgggaagctgtggatagagcagtatgggacagtggagattttaaaccacagaactggacataagtgtgtgcttcactttaaaccgtgtggattatttggaaaagaacttcacaaggtggaaggacacattcaagacaaaaacaaaaagaagctctttatgatctatggcaaatggacggaatgtttgtggggcatagatcctgtttcgtatgaatccttcaagaagcaggagaggagaggtgaccacctgagaaaggccaagctggatgaagactccgggaaggctgacagcgacgtggctgacgacgtgcctgtggcccaggagaccgtgcaggtcattcctggcagcaagctgctctggaggatcaacacccggccccccaactctgcccagatgtataatttcaccagtttcactgtgagcctcaacgagctggagacaggcatggagaagaccctgccacccacggactgccgcctgcgccctgacatccgcggcatggagaatggcaacatggatctggccagccaggagaaggagcggctggaggagaagcagagagaagcacggagggagcgggccaaggaggaggcagagtggcagacgaggtggttctacccaggcaataacccctacactgggacccccgactggttgtatgcaggggattactttgagcggaatttctccgactgcccagatatctactgagggcctggaggggcctggggcccgggaccggaggctgacgaggctggacttcctcgagtggccactgtgagcctcgtcacagcagaaaccaacttttctaacgactgagttcgcggagatagcatcatccctgatcaaggatgtaattctaattaactgttgattgccaaacatttcactctgctgtgccgtctcttcataaagcttcacttgggatcatcgtcttcattaaggtttcaacagggaaattcttcacggcgcccttttatgtggcagaaatcagctggggcttgtttagcttccagcacactctcagtcatagcatgtgtagctaaaggaagtaatgggaaggggttcatgttctctttataatgcagtggcaaaaggttctgaaagccttttaaactcgaaccagtgggggaaagatggatcttgaagctaatcctgcagagagttttatagaggccagggattgccttctaaattatgataaaacagaagtgaagagtttcagagcatcagattgagtgaaaagttgtcagattctgtattttttaacaatcttcaataatgtaaagattacttttaaaatatttaagttaaaactacttgaatagtattttgctgaagagcaagatatgcattaatcaccggttttatactgtccaaaatgaagcatccccgtgacaaaccagagtgggcagaagcatcgagagcgtgacaggaaatcccaagactgcttccgcctcagaggcgtcccggctgcgattcgctgccctgttgtcagtgaggcctggctgtcaccgcacaccgcgtccgtgtctccagggggttcctttcttctcacacgtcgcgtgtacccatagcactcttgtgtttctgtttttcccagtatgcatgtttaaaatagaagtgacaagaatcacatccggttgtgtcctgtgggagggtcagaggcagaatctacttacagtggtgtaattaaagttatttaaccaaaaataggtatgtgtccatctcagcattcacctttatcaagtgactgatttttttttcttttctttccttttttttttttttttgagacggagtttcactcttgttgcccaggctggagtgcaatggcatgatctcggctcaccgcaacctccgcctcccgggttcaagcgattctcctgcctcagcctcccaagtagctgggattacaggcacgcgccaccacacctggctgattttgtatttttagtagacacgggttttcaccatgttggtcaggctggtctcaaactcccgacctcaagtagtctgcctgcctcaacctcccaaagtgctgggattacaggcgtgagccactgcgcctggccgtgactgattttttttcatgtagaattgtcaacacgagagatcacagtggagcactttgaaagaccgtcggttgtgtgcacgcacgcacacactcatgcacacgctgacacgcggttgcatggagtccaggttactcaggccggcacttctgagtgacaggtgccacctgcgtgtgtcttggcgtccacatcacacctgtgacggaagcacttctggaagtgaacactcgttttgaaagcttgattttgtagctttggaagctggaagcgatggtgtttggtgccgagtcctgtgtcatcctcggggcctatgagctccgtaccagccactcaaaagtgtctgaacagaaccgctccgtgactggtagctgggtctgaggattcaggattgtggcgttattcaaagaggagactttgaaattccccgatggctggaatgtggagcccaggtgcctctggtggagggtcatctgcttttccagactgtggttgtgaaccggctccttctccaagaaaggttgcaagctgagaacatccagaggtgagactcagacacattgaaagtgactgcatttagggaggtttaacgagttcttactgatcattccacttgttactggttaagataatttgcccacgggtttgtttccaagtcctcttctaggaccaggctcctggtatttcaggggctggttggctgcacagacagcccctcttctgctgtccttgaggacagacaccaaaccagaggtggaggaagaacggtaggaaggctgatggcaaaagcggctgtgtgtcgaggttattttaactttttactactttttgttactgtttctgcaaatgctaacacataaaccatgacctaacttttgtcaccttggatatctattgaatgttaaacatctctaataaagatggccaccacttaatgtgtggaaagtgatggccttctcgtggg

SEQ ID NO: 21321 - DNA, 3934 bp, Homo sapiens
  source 1..3934: mol_type = unassigned DNA
agtgggtcgcgggcctacggggcgggggcggggcggcagtgagctcggccggcaaccgagggacccgcgtccagatcttcagtgtctattggatttttccaagagaaagtttgtaaaattccttacactgtagatgtggatcagatacgatgattcagtagaagagcacatgtcaggggcagtggaggctggctgctgaaggatgaacggagaggaagaattctttgatgccgtcacagaggcaaatcagaaagtcacgggaatgattgacttagacaccagcaaaaataataggattgggaaaactggggagaggccctctcaagagaacggaattcagaaacacaggacatcgctgccggctcccatgttcagcagaagcgacttcagcgtgtggaccatcctgaagaagtgtgttggcctggagctgtccaagatcacgatgccaatcgccttcaacgagcctctgagcttcttgcagcggatcacggagtacatggagcacgtgtacctcatccacagggcctcctgccagccccagcccctggagaggatgcagtctgtggctgcttttgctgtttcggctgtggcttcccagtgggagaggaccggcaaaccatttaatccactcttgggagaaacgtatgaattaatcagggaagatttaggattcagatttatatcggaacaggtcagtcaccacccccccatcagtgcgttccactcggaaggtctcaaccatgacttcctgttccatggctccatctaccccaagctcaagttctggggcaaaagcgtggaggcggagccccgaggcaccatcaccctggagctgctcaaacataatgaagcctacacctggaccaaccccacctgctgcgtccacaacgtcatcatcgggaagctgtggatagagcagtatgggacagtggagattttaaaccacagaactggacataagtgtgtgcttcactttaaaccgtgtggattatttggaaaagaacttcacaaggtggaaggacacattcaagacaaaaacaaaaagaagctctttatgatctatggcaaatggacggaatgtttgtggggcatagatcctgtttcgtatgaatccttcaagaagcaggagaggagaggtgaccacctgagaaaggccaagctggatgaagactccgggaaggctgacagcgacgtggctgacgacgtgcctgtggcccaggagaccgtgcaggtcattcctggcagcaagctgctctggaggatcaacacccggccccccaactctgcccagatgtataatttcaccagtttcactgtgagcctcaacgagctggagacaggcatggagaagaccctgccacccacggactgccgcctgcgccctgacatccgcggcatggagaatggcaacatggatctggccagccaggagaaggagcggctggaggagaagcagagagaagcacggagggagcgggccaaggaggaggcagagtggcagacgaggtggttctacccaggcaataacccctacactgggacccccgactggttgtatgcaggggattactttgagcggaatttctccgactgcccagatatctactgagggcctggaggggcctggggcccgggaccggaggctgacgaggctggacttcctcgagtggccactgtgagcctcgtcacagcagaaaccaacttttctaacgactgagttcgcggagatagcatcatccctgatcaaggatgtaattctaattaactgttgattgccaaacatttcactctgctgtgccgtctcttcataaagcttcacttgggatcatcgtcttcattaaggtttcaacagggaaattcttcacggcgcccttttatgtggcagaaatcagctggggcttgtttagcttccagcacactctcagtcatagcatgtgtagctaaaggaagtaatgggaaggggttcatgttctctttataatgcagtggcaaaaggttctgaaagccttttaaactcgaaccagtgggggaaagatggatcttgaagctaatcctgcagagagttttatagaggccagggattgccttctaaattatgataaaacagaagtgaagagtttcagagcatcagattgagtgaaaagttgtcagattctgtattttttaacaatcttcaataatgtaaagattacttttaaaatatttaagttaaaactacttgaatagtattttgctgaagagcaagatatgcattaatcaccggttttatactgtccaaaatgaagcatccccgtgacaaaccagagtgggcagaagcatcgagagcgtgacaggaaatcccaagactgcttccgcctcagaggcgtcccggctgcgattcgctgccctgttgtcagtgaggcctggctgtcaccgcacaccgcgtccgtgtctccagggggttcctttcttctcacacgtcgcgtgtacccatagcactcttgtgtttctgtttttcccagtatgcatgtttaaaatagaagtgacaagaatcacatccggttgtgtcctgtgggagggtcagaggcagaatctacttacagtggtgtaattaaagttatttaaccaaaaataggtatgtgtccatctcagcattcacctttatcaagtgactgatttttttttcttttctttccttttttttttttttttgagacggagtttcactcttgttgcccaggctggagtgcaatggcatgatctcggctcaccgcaacctccgcctcccgggttcaagcgattctcctgcctcagcctcccaagtagctgggattacaggcacgcgccaccacacctggctgattttgtatttttagtagacacgggttttcaccatgttggtcaggctggtctcaaactcccgacctcaagtagtctgcctgcctcaacctcccaaagtgctgggattacaggcgtgagccactgcgcctggccgtgactgattttttttcatgtagaattgtcaacacgagagatcacagtggagcactttgaaagaccgtcggttgtgtgcacgcacgcacacactcatgcacacgctgacacgcggttgcatggagtccaggttactcaggccggcacttctgagtgacaggtgccacctgcgtgtgtcttggcgtccacatcacacctgtgacggaagcacttctggaagtgaacactcgttttgaaagcttgattttgtagctttggaagctggaagcgatggtgtttggtgccgagtcctgtgtcatcctcggggcctatgagctccgtaccagccactcaaaagtgtctgaacagaaccgctccgtgactggtagctgggtctgaggattcaggattgtggcgttattcaaagaggagactttgaaattccccgatggctggaatgtggagcccaggtgcctctggtggagggtcatctgcttttccagactgtggttgtgaaccggctccttctccaagaaaggttgcaagctgagaacatccagaggtgagactcagacacattgaaagtgactgcatttagggaggtttaacgagttcttactgatcattccacttgttactggttaagataatttgcccacgggtttgtttccaagtcctcttctaggaccaggctcctggtatttcaggggctggttggctgcacagacagcccctcttctgctgtccttgaggacagacaccaaaccagaggtggaggaagaacggtaggaaggctgatggcaaaagcggctgtgtgtcgaggttattttaactttttactactttttgttactgtttctgcaaatgctaacacataaaccatgacctaacttttgtcaccttggatatctattgaatgttaaacatctctaataaagatggccaccacttaatgtgtggaaagtgatggccttctcgtggg

SEQ ID NO: 21322 - DNA, 1780 bp, Homo sapiens
  source 1..1780: mol_type = unassigned DNA
agtgggtcgcgggcctacggggcgggggcggggcggcagtgagctcggccggcaaccgagggacccgcgtccagatcttcagtgtctattggatttttccaagagaaagtttgtaaaattccttacactgtagatgtggatcagatacgatgattcagtagaagagcacatgtcaggggcagtggaggctggctgctgaaggatgaacggagaggaagaattctttgatgccgtcacaggacatcgctgccggctcccatgttcagcagaagcgacttcagcgtgtggaccatcctgaagaagtgtgttggcctgacttacggaaaatcacaaaatagcacagagcattcctgtagacccaccacccagctcccctgatgccggcatctctcggaataaccataggagctgtccaagatcacgatgccaatcgccttcaacgagcctctgagcttcttgcagcggatcacggagtacatggagcacgtgtacctcatccacagggcctcctgccagccccagcccctggagaggatgcagtctgtggctgcttttgctgtttcggctgtggcttcccagtgggagaggaccggcaaaccatttaatccactcttgggagaaacgtatgaattaatcagggaagatttaggattcagatttatatcggaacaggtcagtcaccacccccccatcagtgcgttccactcggaaggtctcaaccatgacttcctgttccatggctccatctaccccaagctcaagttctggggcaaaagcgtggaggcggagccccgaggcaccatcaccctggagctgctcaaacataatgaagcctacacctggaccaaccccacctgctgcgtccacaacgtcatcatcgggaagctgtggatagagcagtatgggacagtggagattttaaaccacagaactggacataagtgtgtgcttcactttaaaccgtgtggattatttggaaaagaacttcacaaggtggaaggacacattcaagacaaaaacaaaaagaagctctttatgatctatggcaaatggacggaatgtttgtggggcatagatcctgtttcgtatgaatccttcaagaagcaggagaggagaggtgaccacctgagaaaggccaagctggatgaagactccgggaaggctgacagcgacgtggctgacgacgtgcctgtggcccaggagaccgtgcaggtcattcctggcagcaagctgctctggaggatcaacacccggccccccaactctgcccagatctggccagccaggagaaggagcggctggaggagaagcagagagaagcacggagggagcgggccaaggaggaggcagagtggcagacgaggtggttctacccaggcaataacccctacactgggacccccgactggttgtatgcaggggattactttgagcggaatttctccgactgcccagatatctactgagggcctggaggggcctggggcccgggaccggaggctgacgaggctggacttcctcgagtggccactgtgagcctcgtcacagcagaaaccaacttttctaacgactgagttcgcggagatagcatcatccctgatcaaggatgtaattctaattaactgttgattgccaaacatttcactctgctgtgccgtctcttcataaagcttcacttgggatcatcgtcttcattaaggtttcaacagggaaattcttcacggcgcccttttatgtggcagaaatcagctggggcttgtttagcttccagcacactctc

SEQ ID NO: 21323 - DNA, 494 bp, Homo sapiens
  source 1..494: mol_type = unassigned DNA
tctgtggctgcttttgctgtttcggctgtggcttcccagtgggagaggaccggcaaaccatttaatccactcttgggagaaacgtatgaattaatcagggaagatttaggattcagatttatatcggaacaggtcagtcaccacccccccatcagtgcgttccactcggaaggtctcaaccatgacttcctgttccatggctccatctaccccaagctcaagttctggggcaaaagcgtggaggcggagccccgaggcaccatcaccctggagctgctcaatgtcaaccaaagacacctcagagcaaaacacaagtctccaacaaatgccggccgctaagacccgacagacacagaccggatgctggcgtcctcctgggccaccagttctgagacgtgagtcttgccaagccactgcctgcagtcttgttgtaggcagcaggtcctaacaaatacatacagaaataagtaataaacgacaccttgcctgatgaa

SEQ ID NO: 21324 - DNA, 6760 bp, Homo sapiens
  source 1..6760: mol_type = unassigned DNA
ggcgcgcgccgagaagttctgggcaaagtactcagaactggccgcgtgctggtggcgcccgccagccggcccgggagaggggacttgagcgcttcgcggccggtgcgcagcgcggctccggccccgcagtctgtctgcaagtggccatccccgcccccgactcctgcggccggtgcgggagctgtcagctgcacgttgcgggggtaccggagaagccggggttgccttctcccggttctgtgcgctaaccccggagcccggccccggggaactagggagcgtctccggctgcacagcgctcaggttttagggtttcctttgggccacccaaaatgttttttaaatactttggataagagctaaaccacctgccactggggacttccatactctcggctcccttgtcatctgatggcattttgattgtctcgaggccaagtgacttgctgtccatgatgagtgatgagaagaaccttggtgtgtcccaaaaattggtatcaccttcaaggagcacaagtagctgctcttccaagcaaggaagtcgacaggacagctgggaagtggtggaaggactgaggggggagatgaattacacccaggagccaccagttcagaaaggatttttgctgaaaaagaggaagtggcccttaaaaggctggcataagagattcttctatctggacaaaggaatcttgaaatatgccaagagccaaaccgatatagagagagagaagctgcatggctgcattgatgtcgggctctcagtgatgtctgtaaagaagtcatcaaaatgcatagaccttgacaccgaggagcacatctaccatctgaaggtcaagtcagaagaagtctttgatgagtgggtatcgaaacttcgccaccacagaatgtatcgtcagaatgaaattgccatgtttccacatgaagttaaccactttttctcagggtccaccatcacagactcttcatctggggtgtttgactccatttcaagtaggaagcgtagcagtatatcaaagcagaatttatttcaaactggaagcaatgtatcattttcttgtggtggtgagacacgagttccattatggttacagtcttcagaggacatggaaaaatgctccaaagacctggcgcactgtcatgcctacctggtagaaatgagccagctcctgcaaagcatggacgtcctgcatcggacatactcggcaccagctatcaacgccatccagggtggatcttttgaaagtcccaaaaaggaaaaaagatcgcacaggaggtggcggtccagagctattggcaaagatgctaaaggaacactgcaggtcccgaaacctttttctggcccagtaagactacactcctccaatcctaatttgtcaacactagattttggagaagagaaaaattattctgatggctctgaaacctcatcagagttttctaaaatgcaagaagatctgtgtcatattgcccataaagtttacttcactttaaggtcagcttttaatatcatgtcagcggagagagagaaactgaagcagctgatggagcaggatgcctcctcctccccgtctgctcaggtcattggtctgaagaacgccctgtcatccgccctagcacaaaacacagatcttaaagaacgcttacgcagaatccatgccgagtctctgctcctcgactcccccgctgtcgccaagtcgggtgacaatctggcagaggaaaactccagagatgaaaaccgagctctagttcatcagctttctaatgaaagtagactctccatcactgactccctttctgagttttttgatgctcaggaagttctgttatctccaagctcttcagaaaacgagatttctgatgatgactcatatgtcagtgacataagtgataatctttccttagataatctcagtaatgatttagataatgagagacagaccttggggcctgtccttgatagtggtcgggaagcgaagtcccggagaagaacgtgcctgccggcgccctgcccgagcagcagtaacatcagcctgtggaacatcctgaggaacaacatcgggaaggacctgtccaaggtggccatgccggtggagctgaacgagcccctgaacacgctgcagaggctctgcgaggagctggagtacagcgagctcctggacaaggccgcgcagattcccagccccctggaaaggatggtatatgtggcagcctttgccatatcagcgtatgcatctagctactaccgagctggaagcaagccatttaatccggttcttggagaaacatatgaatgtattcgggaggacaagggcttccagtttttttcagaacaggtcagccaccatccgcctatctctgcgtgtcatgctgagtctagaaattttgttttctggcaagatgtgagatggaaaaacaaattctggggcaaatccatggaaattgttccaattggcacaacccatgtgactctgccagtttttggggatcattttgagtggaacaaagtgacctcttgcatccataacatcttaagcgggcagaggtggattgagcactatggagagattgtcatcaagaacctgcatgatgattcctgctactgcaaagtgaattttataaaggcaaaatactggagcactaatgcccatgagattgaaggcacagtgtttgacaggagtggaaaagcggttcatcggctgtttgggaaatggcatgaaagcatctactgtggcggcggctcctcttctgcctgtgtatggagagcaaatcctatgccgaaaggctacgagcaatactatagcttcacacagtttgcgctggaattaaatgaaatggatccatcatcaaagtctttattgccacctactgacactcgatttaggccagaccagaggtttctagaggaagggaacttagaagaagctgaaatacaaaagcagaggattgaacaactgcagagagaaaggcggcgggtcttagaagaaaatcatgtggagcaccagcctcggtttttcaggaaatccgacgatgactcttgggtgagcaacggcacctatttggaacttagaaaagatcttggtttttccaaactggaccatcctgtcttatggtgaaaaagtaaagaagaaagataacattagtgtatttctcctgtgcttgccttctgaagtggcacaaacctgtgtttatatatttaaaagatactctaggatgatcacttgtgcttagcttagcattgtaactctttaagtctatattttcctcagtgcgtttctttacaatttcaaatgttaccctgattgtttatatgaatgtagaacaccttgacatttctttttatatataaactatttaataaaaatgaaagattgaatgttcatgtgtgggttaaaaaaagaagctttaacactaattttccaaaggttagggaagattccaattaaatttatgccttataaaattatgttgtagaaaaaaaatcaacctctcccaggtgcattaagaaataagaattcccagggttactcacccatgcgtaagctacccaagtttaatttggtagctgaaatatctttttgcctcagacagctcttgaattgctcatacagaacaattctgctggtgctggagtctgaagaatattttcatttgcattttagtggttagggagaggatataagattaatggaatgtatatttttatataagacgtatacggcaccttcttgaaaaggaagcatttgaacttgttcctccctatagttctattgccttatatgcaaaattgtaccctgttgctcagagaaattattcataagagaaaagaattccaattaattaaatatcacaatagcatcccagagagacagtaggaaatttctccttagtgagagctgagtccttgagaagttaagagactgtttcctgcttcccaccccaccccgttttttgtccctccgtttgatcacctccctgttgagtatggaatgtcccagtttaatataaaacatacagtttattccacacagcagtttgactttgtaaaagtttagcaaaataactgattgttttggataactcaacatgtttttcttaaatgctgttttagtattttctacctcttaataagcaccatattttagatcttgtataaaaagttgccatctgccttatagacaaatgtagagaattgatgttcttgctttgtgttgtgttctggtaaagctttaagtgagtgtcttacccctttcctatactttcttgttatccatatcattcttttgtgagttttgcagcagtcttgaataatacagattataactactgaaaggggaaccttcgtctttttaaatgtgttatttcacattacaataatatgtgtagtagttgaattgtgttatcaaagcatgtccaacttctgtccagatgacattaaaaccaaagcctaattgttaagcctcttattctaaagtccatagcaatgctatggaatatcaagtataatgatgtagtaaaaagatttctccagaaaacactttgagatacttaaagaaattcagagcatatcgaatgttatgaatgaagagtaaaataattacaggaaaagaatgcatgatttttcattgtcacaccaaataaccagttggacaatattgcattttcaaaatggagagttatttaaagtggatgtgtagccttctggaatctgcacgtgactggcattttaaaacaactcattaaatattggattcattttatcgagatgccaagatgaacacaatgtgaatatcatttccatttctaagcagttgaatgacacagtcagattctttggtgtatgctttgttctttccatctcaagcatttatccaaattctgctcacagacatgaggaagcaggctgtagatttaagggcactcaaggggaaaacaaatgtagtttccacagtgtgaggataaatgtagaatcgtggtaatattggctgttaaattggcctgctccagagactggctcaaaaaagaaagaagcaacgaaaacaaaatgcacagcctgaatggacgtagcactgtcatgtggcatttggaaaatctttaattatcctaatgttatttcacttgcccttatgctttattttagagtcccagggacaactggatgaaacattacgtctgtagtcatcttatttgagatgggggtgggaacgaattaaaatatgatagagaactatatgcagattttaaaatctagtcagtactagcatctataaagggcttttctgaaatttaaacagcttggtgatgcatcctgatattataagcttaaaactatcttgagggggaaatgacttcttttctccttctgtcccttttctcaaaagcatctttcccccaaatgtatgtctctaggacattttatagttttaagaggaagaaaacagaaacgtggcatcatttgggaagaaccaaggtagaatttaattttctggactttaaatctcctggttaaataatgctaatcactgtaccatttgagttacatgttttaacctcttttttttttctaattattccatccaaaatttctggtgaattacacagaaatttttggaaatgggactttgtgcaggtaaccaccctgcacttcaggtaatgttcctgtcacagctgtcgactaccccacgctgcaggaaatccattcagaaatgagctaacagtctccagtgtagcaggagagccagtcacttccctccccaggccccaaagcaccccaaggctggtattccttgagtcataggtattaataataaaagcctcaatgcagcttctccatgtagttcctctcctacaagccaggtggattctggtcctaactaaagagatgggagttcacctgagggcaagaagtacccaggatgcccaaacagccgcacaggtgtcctgtgcttcctgtgagacttcctgggggaaatatacaaactaatatattttttaatgtttacgtcatttacactgctgcttttctcatattctgcttttaattacttgtagtaaatcatttgtttgggcttcaagcactgtcttccatctgcatcttccagatttatcatgagtgatcttgttctactgttaaagatgtcaagcctaaaaagtaataaagtttttatttggctgttgaaccttgatgtagcccctactacatacactacaagttatgccttctggctactacagaatctccgcagaccttttagttatgagtagaagcaataagaaggtgtccttatggtcttaggaataatagttccaatgtattggcataatttgtttgaatgtctttattttgatattaacaccggcataaatctatttttgctaccagatgatagctattttcatttgctctattttcctctgcattgtactaatctgttactcagtgttagtcttcatttttctgtgttggaaacctgcgtcatgtaaatatctgcaaatcatgacagtctaaagtgcaaaccattttcagagactttggggaatgcagtgatcagaagtggctaatttattttatttctgattattttatccagagggtacttttttaatggatatttgtaaatcttccacttaaccactgaaaattattttgttttaatcccacccttccatccatacctctgcctccccaaaaagctcctattaatttgcttatccccctcatgtagctagttgaatgtgaataaataacatggaaaaaaag

SEQ ID NO: 21325 - DNA, 6612 bp, Homo sapiens
  source 1..6612: mol_type = unassigned DNA
gctggtggcgcccgccagccggcccgggagaggggacttgagcgcttcgcggccggtgcgcagcgcggctccggccccgcagtctgtctgcaagtggccatccccgcccccgactcctgcggccggtgcgggagctgtcagctgcacgttgcgggggtaccggagaagccggggttgccttctcccggttctgtgcgctaaccccggagcccggccccggggaactagggagcgtctccggctgcacagcgctcaggttttagggtttcctttgggccacccaaaatgttttttaaatactttggataagagctaaaccacctgccactggggacttccatactctcggctcccttgtcatctgatggcattttgattgtctcgaggccaagtgacttgctgtccatgatgagtgatgagaagaaccttggtgtgtcccaaaaattggtatcaccttcaaggagcacaagtagctgctcttccaagcaaggaagtcgacaggacagctgggaagtggtggaaggactgaggggggagatgaattacacccaggagccaccagttcagaaaggatttttgctgaaaaagaggaagtggcccttaaaaggctggcataagagattcttctatctggacaaaggaatcttgaaatatgccaagagccaaaccgatatagagagagagaagctgcatggctgcattgatgtcgggctctcagtgatgtctgtaaagaagtcatcaaaatgcatagaccttgacaccgaggagcacatctaccatctgaaggtcaagtcagaagaagtctttgatgagtgggtatcgaaacttcgccaccacagaatgtatcgtcagaatgaaattgccatgtttccacatgaagttaaccactttttctcagggtccaccatcacagactcttcatctggggtgtttgactccatttcaagtaggaagcgtagcagtatatcaaagcagaatttatttcaaactggaagcaatgtatcattttcttgtggtggtgagacacgagttccattatggttacagtcttcagaggacatggaaaaatgctccaaagacctggcgcactgtcatgcctacctggtagaaatgagccagctcctgcaaagcatggacgtcctgcatcggacatactcggcaccagctatcaacgccatccaggtcccgaaacctttttctggcccagtaagactacactcctccaatcctaatttgtcaacactagattttggagaagagaaaaattattctgatggctctgaaacctcatcagagttttctaaaatgcaagaagatctgtgtcatattgcccataaagtttacttcactttaaggtcagcttttaatatcatgtcagcggagagagagaaactgaagcagctgatggagcaggatgcctcctcctccccgtctgctcaggtcattggtctgaagaacgccctgtcatccgccctagcacaaaacacagatcttaaagaacgcttacgcagaatccatgccgagtctctgctcctcgactcccccgctgtcgccaagtcgggtgacaatctggcagaggaaaactccagagatgaaaaccgagctctagttcatcagctttctaatgaaagtagactctccatcactgactccctttctgagttttttgatgctcaggaagttctgttatctccaagctcttcagaaaacgagatttctgatgatgactcatatgtcagtgacataagtgataatctttccttagataatctcagtaatgatttagataatgagagacagaccttggggcctgtccttgatagtggtcgggaagcgaagtcccggagaagaacgtgcctgccggcgccctgcccgagcagcagtaacatcagcctgtggaacatcctgaggaacaacatcgggaaggacctgtccaaggtggccatgccggtggagctgaacgagcccctgaacacgctgcagaggctctgcgaggagctggagtacagcgagctcctggacaaggccgcgcagattcccagccccctggaaaggatggtatatgtggcagcctttgccatatcagcgtatgcatctagctactaccgagctggaagcaagccatttaatccggttcttggagaaacatatgaatgtattcgggaggacaagggcttccagtttttttcagaacaggtcagccaccatccgcctatctctgcgtgtcatgctgagtctagaaattttgttttctggcaagatgtgagatggaaaaacaaattctggggcaaatccatggaaattgttccaattggcacaacccatgtgactctgccagtttttggggatcattttgagtggaacaaagtgacctcttgcatccataacatcttaagcgggcagaggtggattgagcactatggagagattgtcatcaagaacctgcatgatgattcctgctactgcaaagtgaattttataaaggcaaaatactggagcactaatgcccatgagattgaaggcacagtgtttgacaggagtggaaaagcggttcatcggctgtttgggaaatggcatgaaagcatctactgtggcggcggctcctcttctgcctgtgtatggagagcaaatcctatgccgaaaggctacgagcaatactatagcttcacacagtttgcgctggaattaaatgaaatggatccatcatcaaagtctttattgccacctactgacactcgatttaggccagaccagaggtttctagaggaagggaacttagaagaagctgaaatacaaaagcagaggattgaacaactgcagagagaaaggcggcgggtcttagaagaaaatcatgtggagcaccagcctcggtttttcaggaaatccgacgatgactcttgggtgagcaacggcacctatttggaacttagaaaagatcttggtttttccaaactggaccatcctgtcttatggtgaaaaagtaaagaagaaagataacattagtgtatttctcctgtgcttgccttctgaagtggcacaaacctgtgtttatatatttaaaagatactctaggatgatcacttgtgcttagcttagcattgtaactctttaagtctatattttcctcagtgcgtttctttacaatttcaaatgttaccctgattgtttatatgaatgtagaacaccttgacatttctttttatatataaactatttaataaaaatgaaagattgaatgttcatgtgtgggttaaaaaaagaagctttaacactaattttccaaaggttagggaagattccaattaaatttatgccttataaaattatgttgtagaaaaaaaatcaacctctcccaggtgcattaagaaataagaattcccagggttactcacccatgcgtaagctacccaagtttaatttggtagctgaaatatctttttgcctcagacagctcttgaattgctcatacagaacaattctgctggtgctggagtctgaagaatattttcatttgcattttagtggttagggagaggatataagattaatggaatgtatatttttatataagacgtatacggcaccttcttgaaaaggaagcatttgaacttgttcctccctatagttctattgccttatatgcaaaattgtaccctgttgctcagagaaattattcataagagaaaagaattccaattaattaaatatcacaatagcatcccagagagacagtaggaaatttctccttagtgagagctgagtccttgagaagttaagagactgtttcctgcttcccaccccaccccgttttttgtccctccgtttgatcacctccctgttgagtatggaatgtcccagtttaatataaaacatacagtttattccacacagcagtttgactttgtaaaagtttagcaaaataactgattgttttggataactcaacatgtttttcttaaatgctgttttagtattttctacctcttaataagcaccatattttagatcttgtataaaaagttgccatctgccttatagacaaatgtagagaattgatgttcttgctttgtgttgtgttctggtaaagctttaagtgagtgtcttacccctttcctatactttcttgttatccatatcattcttttgtgagttttgcagcagtcttgaataatacagattataactactgaaaggggaaccttcgtctttttaaatgtgttatttcacattacaataatatgtgtagtagttgaattgtgttatcaaagcatgtccaacttctgtccagatgacattaaaaccaaagcctaattgttaagcctcttattctaaagtccatagcaatgctatggaatatcaagtataatgatgtagtaaaaagatttctccagaaaacactttgagatacttaaagaaattcagagcatatcgaatgttatgaatgaagagtaaaataattacaggaaaagaatgcatgatttttcattgtcacaccaaataaccagttggacaatattgcattttcaaaatggagagttatttaaagtggatgtgtagccttctggaatctgcacgtgactggcattttaaaacaactcattaaatattggattcattttatcgagatgccaagatgaacacaatgtgaatatcatttccatttctaagcagttgaatgacacagtcagattctttggtgtatgctttgttctttccatctcaagcatttatccaaattctgctcacagacatgaggaagcaggctgtagatttaagggcactcaaggggaaaacaaatgtagtttccacagtgtgaggataaatgtagaatcgtggtaatattggctgttaaattggcctgctccagagactggctcaaaaaagaaagaagcaacgaaaacaaaatgcacagcctgaatggacgtagcactgtcatgtggcatttggaaaatctttaattatcctaatgttatttcacttgcccttatgctttattttagagtcccagggacaactggatgaaacattacgtctgtagtcatcttatttgagatgggggtgggaacgaattaaaatatgatagagaactatatgcagattttaaaatctagtcagtactagcatctataaagggcttttctgaaatttaaacagcttggtgatgcatcctgatattataagcttaaaactatcttgagggggaaatgacttcttttctccttctgtcccttttctcaaaagcatctttcccccaaatgtatgtctctaggacattttatagttttaagaggaagaaaacagaaacgtggcatcatttgggaagaaccaaggtagaatttaattttctggactttaaatctcctggttaaataatgctaatcactgtaccatttgagttacatgttttaacctcttttttttttctaattattccatccaaaatttctggtgaattacacagaaatttttggaaatgggactttgtgcaggtaaccaccctgcacttcaggtaatgttcctgtcacagctgtcgactaccccacgctgcaggaaatccattcagaaatgagctaacagtctccagtgtagcaggagagccagtcacttccctccccaggccccaaagcaccccaaggctggtattccttgagtcataggtattaataataaaagcctcaatgcagcttctccatgtagttcctctcctacaagccaggtggattctggtcctaactaaagagatgggagttcacctgagggcaagaagtacccaggatgcccaaacagccgcacaggtgtcctgtgcttcctgtgagacttcctgggggaaatatacaaactaatatattttttaatgtttacgtcatttacactgctgcttttctcatattctgcttttaattacttgtagtaaatcatttgtttgggcttcaagcactgtcttccatctgcatcttccagatttatcatgagtgatcttgttctactgttaaagatgtcaagcctaaaaagtaataaagtttttatttggctgttgaaccttgatgtagcccctactacatacactacaagttatgccttctggctactacagaatctccgcagaccttttagttatgagtagaagcaataagaaggtgtccttatggtcttaggaataatagttccaatgtattggcataatttgtttgaatgtctttattttgatattaacaccggcataaatctatttttgctaccagatgatagctattttcatttgctctattttcctctgcattgtactaatctgttactcagtgttagtcttcatttttctgtgttggaaacctgcgtcatgtaaatatctgcaaatcatgacagtctaaagtgcaaaccattttcagagactttggggaatgcagtgatcagaagtggctaatttattttatttctgattattttatccagagggtacttttttaatggatatttgtaaatcttccacttaaccactgaaaattattttgttttaatcccacccttccatccatacctctgcctccccaaaaagctcctattaatttgcttatccccctcatgtagctagttgaatgtgaataaataacatgg

SEQ ID NO: 21326 - DNA, 6597 bp, Homo sapiens
  source 1..6597: mol_type = unassigned DNA
gctggtggcgcccgccagccggcccgggagaggggacttgagcgcttcgcggccggtgcgcagcgcggctccggccccgcagtctgtctgcaagtggccatccccgcccccgactcctgcggccggtgcgggagctgtcagctgcacgttgcgggggtaccggagaagccggggttgccttctcccggttctgtgcgctaaccccggagcccggccccggggaactagggagcgtctccggctgcacagcgctcaggttttagggtttcctttgggccacccaaaatgttttttaaatactttggataagagctaaaccacctgccactggggacttccatactctcggctcccttgtcatctgatggcattttgattgtctcgaggccaagtgacttgctgtccatgatgagtgatgagaagaaccttggtgtgtcccaaaaattggtatcaccttcaaggagcacaagtagctgctcttccaagcaaggaagtcgacaggacagctgggaagtggtggaaggactgaggggggagatgaattacacccaggagccaccagttcagaaaggatttttgctgaaaaagaggaagtggcccttaaaaggctggcataagagattcttctatctggacaaaggaatcttgaaatatgccaagagccaaaccgatatagagagagagaagctgcatggctgcattgatgtcgggctctcagtgatgtctgtaaagaagtcatcaaaatgcatagaccttgacaccgaggagcacatctaccatctgaaggtcaagtcagaagaagtctttgatgagtgggtatcgaaacttcgccaccacagaatgtatcgtcagaatgaaattgccatgtttccacatgaagttaaccactttttctcagggtccaccatcacagactcttcatctggggtgtttgactccatttcaagtaggaagcgtagcagtatatcaaagcagaatttatttcaaactggaagcaatgtatcattttcttgtggtggtgagacacgagttccattatggttacagtcttcagaggacatggaaaaatgctccaaagacctggcgcactgtcatgcctacctggtagaaatgagccagctcctgcaaagcatggacgtcctgcatcggacatactcggcaccagctatcaacgccatccagggtggatcttttgaaagtcccaaaaaggaaaaaagatcgcacaggaggtggcggtccagagctattggcaaagatgctaaaggaacactgcaggtcccgaaacctttttctggcccagtaagactacactcctccaatcctaatttgtcaacactagattttggagaagagaaaaattattctgatggctctgaaacctcatcagagttttctaaaatgcaagaagatctgtgtcatattgcccataaagtttacttcactttaaggtcagcttttaatatcatgtcagcggagagagagaaactgaagcagctgatggagcaggatgcctcctcctccccgtctgctcaggtcattggtctgaagaacgccctgtcatccgaaaactccagagatgaaaaccgagctctagttcatcagctttctaatgaaagtagactctccatcactgactccctttctgagttttttgatgctcaggaagttctgttatctccaagctcttcagaaaacgagatttctgatgatgactcatatgtcagtgacataagtgataatctttccttagataatctcagtaatgatttagataatgagagacagaccttggggcctgtccttgatagtggtcgggaagcgaagtcccggagaagaacgtgcctgccggcgccctgcccgagcagcagtaacatcagcctgtggaacatcctgaggaacaacatcgggaaggacctgtccaaggtggccatgccggtggagctgaacgagcccctgaacacgctgcagaggctctgcgaggagctggagtacagcgagctcctggacaaggccgcgcagattcccagccccctggaaaggatggtatatgtggcagcctttgccatatcagcgtatgcatctagctactaccgagctggaagcaagccatttaatccggttcttggagaaacatatgaatgtattcgggaggacaagggcttccagtttttttcagaacaggtcagccaccatccgcctatctctgcgtgtcatgctgagtctagaaattttgttttctggcaagatgtgagatggaaaaacaaattctggggcaaatccatggaaattgttccaattggcacaacccatgtgactctgccagtttttggggatcattttgagtggaacaaagtgacctcttgcatccataacatcttaagcgggcagaggtggattgagcactatggagagattgtcatcaagaacctgcatgatgattcctgctactgcaaagtgaattttataaaggcaaaatactggagcactaatgcccatgagattgaaggcacagtgtttgacaggagtggaaaagcggttcatcggctgtttgggaaatggcatgaaagcatctactgtggcggcggctcctcttctgcctgtgtatggagagcaaatcctatgccgaaaggctacgagcaatactatagcttcacacagtttgcgctggaattaaatgaaatggatccatcatcaaagtctttattgccacctactgacactcgatttaggccagaccagaggtttctagaggaagggaacttagaagaagctgaaatacaaaagcagaggattgaacaactgcagagagaaaggcggcgggtcttagaagaaaatcatgtggagcaccagcctcggtttttcaggaaatccgacgatgactcttgggtgagcaacggcacctatttggaacttagaaaagatcttggtttttccaaactggaccatcctgtcttatggtgaaaaagtaaagaagaaagataacattagtgtatttctcctgtgcttgccttctgaagtggcacaaacctgtgtttatatatttaaaagatactctaggatgatcacttgtgcttagcttagcattgtaactctttaagtctatattttcctcagtgcgtttctttacaatttcaaatgttaccctgattgtttatatgaatgtagaacaccttgacatttctttttatatataaactatttaataaaaatgaaagattgaatgttcatgtgtgggttaaaaaaagaagctttaacactaattttccaaaggttagggaagattccaattaaatttatgccttataaaattatgttgtagaaaaaaaatcaacctctcccaggtgcattaagaaataagaattcccagggttactcacccatgcgtaagctacccaagtttaatttggtagctgaaatatctttttgcctcagacagctcttgaattgctcatacagaacaattctgctggtgctggagtctgaagaatattttcatttgcattttagtggttagggagaggatataagattaatggaatgtatatttttatataagacgtatacggcaccttcttgaaaaggaagcatttgaacttgttcctccctatagttctattgccttatatgcaaaattgtaccctgttgctcagagaaattattcataagagaaaagaattccaattaattaaatatcacaatagcatcccagagagacagtaggaaatttctccttagtgagagctgagtccttgagaagttaagagactgtttcctgcttcccaccccaccccgttttttgtccctccgtttgatcacctccctgttgagtatggaatgtcccagtttaatataaaacatacagtttattccacacagcagtttgactttgtaaaagtttagcaaaataactgattgttttggataactcaacatgtttttcttaaatgctgttttagtattttctacctcttaataagcaccatattttagatcttgtataaaaagttgccatctgccttatagacaaatgtagagaattgatgttcttgctttgtgttgtgttctggtaaagctttaagtgagtgtcttacccctttcctatactttcttgttatccatatcattcttttgtgagttttgcagcagtcttgaataatacagattataactactgaaaggggaaccttcgtctttttaaatgtgttatttcacattacaataatatgtgtagtagttgaattgtgttatcaaagcatgtccaacttctgtccagatgacattaaaaccaaagcctaattgttaagcctcttattctaaagtccatagcaatgctatggaatatcaagtataatgatgtagtaaaaagatttctccagaaaacactttgagatacttaaagaaattcagagcatatcgaatgttatgaatgaagagtaaaataattacaggaaaagaatgcatgatttttcattgtcacaccaaataaccagttggacaatattgcattttcaaaatggagagttatttaaagtggatgtgtagccttctggaatctgcacgtgactggcattttaaaacaactcattaaatattggattcattttatcgagatgccaagatgaacacaatgtgaatatcatttccatttctaagcagttgaatgacacagtcagattctttggtgtatgctttgttctttccatctcaagcatttatccaaattctgctcacagacatgaggaagcaggctgtagatttaagggcactcaaggggaaaacaaatgtagtttccacagtgtgaggataaatgtagaatcgtggtaatattggctgttaaattggcctgctccagagactggctcaaaaaagaaagaagcaacgaaaacaaaatgcacagcctgaatggacgtagcactgtcatgtggcatttggaaaatctttaattatcctaatgttatttcacttgcccttatgctttattttagagtcccagggacaactggatgaaacattacgtctgtagtcatcttatttgagatgggggtgggaacgaattaaaatatgatagagaactatatgcagattttaaaatctagtcagtactagcatctataaagggcttttctgaaatttaaacagcttggtgatgcatcctgatattataagcttaaaactatcttgagggggaaatgacttcttttctccttctgtcccttttctcaaaagcatctttcccccaaatgtatgtctctaggacattttatagttttaagaggaagaaaacagaaacgtggcatcatttgggaagaaccaaggtagaatttaattttctggactttaaatctcctggttaaataatgctaatcactgtaccatttgagttacatgttttaacctcttttttttttctaattattccatccaaaatttctggtgaattacacagaaatttttggaaatgggactttgtgcaggtaaccaccctgcacttcaggtaatgttcctgtcacagctgtcgactaccccacgctgcaggaaatccattcagaaatgagctaacagtctccagtgtagcaggagagccagtcacttccctccccaggccccaaagcaccccaaggctggtattccttgagtcataggtattaataataaaagcctcaatgcagcttctccatgtagttcctctcctacaagccaggtggattctggtcctaactaaagagatgggagttcacctgagggcaagaagtacccaggatgcccaaacagccgcacaggtgtcctgtgcttcctgtgagacttcctgggggaaatatacaaactaatatattttttaatgtttacgtcatttacactgctgcttttctcatattctgcttttaattacttgtagtaaatcatttgtttgggcttcaagcactgtcttccatctgcatcttccagatttatcatgagtgatcttgttctactgttaaagatgtcaagcctaaaaagtaataaagtttttatttggctgttgaaccttgatgtagcccctactacatacactacaagttatgccttctggctactacagaatctccgcagaccttttagttatgagtagaagcaataagaaggtgtccttatggtcttaggaataatagttccaatgtattggcataatttgtttgaatgtctttattttgatattaacaccggcataaatctatttttgctaccagatgatagctattttcatttgctctattttcctctgcattgtactaatctgttactcagtgttagtcttcatttttctgtgttggaaacctgcgtcatgtaaatatctgcaaatcatgacagtctaaagtgcaaaccattttcagagactttggggaatgcagtgatcagaagtggctaatttattttatttctgattattttatccagagggtacttttttaatggatatttgtaaatcttccacttaaccactgaaaattattttgttttaatcccacccttccatccatacctctgcctccccaaaaagctcctattaatttgcttatccccctcatgtagctagttgaatgtgaataaataacatgg

SEQ ID NO: 21327 - DNA, 2707 bp, Homo sapiens
  source 1..2707: mol_type = unassigned DNA
tggataagagctaaaccacctgccactggggacttccatactctcggctcccttgtcatctgatggcattttgattgtctcgaggccaagtgacttgctgtccatgatgagtgatgagaagaaccttggtgtgtcccaaaaattggtatcaccttcaaggagcacaagtagctgctcttccaagcaaggaagtcgacaggacagctgggaagtggtggaaggactgaggggggagatgaattacacccaggagccaccagttcagaaaggatttttgctgaaaaagaggaagtggcccttaaaaggctggcataagagattcttctatctggacaaaggaatcttgaaatatgccaagagccaaaccgatatagagagagagaagctgcatggctgcattgatgtcgggctctcagtgatgtctgtaaagaagtcatcaaaatgcatagaccttgacaccgaggagcacatctaccatctgaaggtcaagtcagaagaagtctttgatgagtgggtatcgaaacttcgccaccacagaatgtatcgtcagaatgaaattgccatgtttccacatgaagttaaccactttttctcagggtccaccatcacagactcttcatctggggtgtttgactccatttcaagtaggaagcgtagcagtatatcaaagcagaatttatttcaaactggaagcaatgtatcattttcttgtggtggtgagacacgagttccattatggttacagtcttcagaggacatggaaaaatgctccaaagacctggcgcactgtcatgcctacctggtagaaatgagccagctcctgcaaagcatggacgtcctgcatcggacatactcggcaccagctatcaacgccatccagggtggatcttttgaaagtcccaaaaaggaaaaaagatcgcacaggaggtggcggtccagagctattggcaaagatgctaaaggaacactgcaggtcccgaaacctttttctggcccagtaagactacactcctccaatcctaatttgtcaacactagattttggagaagagaaaaattattctgatggctctgaaacctcatcagagttttctaaaatgcaagaagatctgtgtcatattgcccataaagtttacttcactttaaggtcagcttttaatatcatgtcagcggagagagagaaactgaagcagctgatggagcaggatgcctcctcctccccgtctgctcaggtcattggtctgaagaacgccctgtcatccgaaaactccagagatgaaaaccgagctctagttcatcagctttctaatgaaagtagactctccatcactgactccctttctgagttttttgatgctcaggaagttctgttatctccaagctcttcagaaaacgagatttctgatgatgactcatatgtcagtgacataagtgataatctttccttagataatctcagtaatgatttagataatgagagacagaccttggggcctgtccttgatagtggtcgggaagcgaagtcccggagaagaacgtgcctgccggcgccctgcccgagcagcagtaacatcagcctgtggaacatcctgaggaacaacatcgggaaggacctgtccaaggtggccatgccggtggagctgaacgagcccctgaacacgctgcagaggctctgcgaggagctggagtacagcgagctcctggacaaggccgcgcagattcccagccccctggaaaggatggtatatgtggcagcctttgccatatcagcgtatgcatctagctactaccgagctggaagcaagccatttaatccggttcttggagaaacatatgaatgtattcgggaggacaagggcttccagtttttttcagaacaggtcagccaccatccgcctatctctgcgtgtcatgctgagtctagaaattttgttttctggcaagatgtgagatggaaaaacaaattctggggcaaatccatggaaattgttccaattggcacaacccatgtgactctgccagtttttggggatcattttgagtggaacaaagtgacctcttgcatccataacatcttaagcgggcagaggtggattgagcactatggagagattgtcatcaagaacctgcatgatgattcctgctactgcaaagtgaattttataaaggcaaaatactggagcactaatgcccatgagattgaaggcacagtgtttgacaggagtggaaaagcggttcatcggctgtttgggaaatggcatgaaagcatctactgtggcggcggctcctcttctgcctgtgtatggagagcaaatcctatgccgaaaggctacgagcaatactatagcttcacacagtttgcgctggaattaaatgaaatggatccatcatcaaagtctttattgccacctactgacactcgatttaggccagaccagaggtttctagaggaagggaacttagaagaagctgaaatacaaaagcagaggattgaacaactgcagagagaaaggcggcgggtcttagaagaaaatcatgtggagcaccagcctcggtttttcaggaaatccgacgatgactcttgggtgagcaacggcacctatttggaacttagaaaagatcttggtttttccaaactggaccatcctgtcttatggtgaaaaagtaaagaagaaagataacattagtgtatttctcctgtgcttgcc

SEQ ID NO: 21328 - DNA, 2969 bp, Homo sapiens
  source 1..2969: mol_type = unassigned DNA
tttcctttgggccacccaaaatgttttttaaatactttggataagagctaaaccacctgccactggggacttccatactctcggctcccttgtcatctgatggcattttgattgtctcgaggccaagtgacttgctgtccatgatgagtgatgagaagaaccttggtgtgtcccaaaaattggtatcaccttcaaggagcacaagtagctgctcttccaagcaaggaagtcgacaggacagctgggaagtggtggaaggactgaggggggagatgaattacacccaggagccaccagttcagaaaggatttttgctgaaaaagaggaagtggcccttaaaaggctggcataagagattcttctatctggacaaaggaatcttgaaatatgccaagagccaaaccgatatagagagagagaagctgcatggctgcattgatgtcgggctctcagtgatgtctgtaaagaagtcatcaaaatgcatagaccttgacaccgaggagcacatctaccatctgaaggtcaagtcagaagaagtctttgatgagtgggtatcgaaacttcgccaccacagaatgtatcgtcagaatgaaattgccatgtttccacatgaagttaaccactttttctcagggtccaccatcacagactcttcatctggggtgtttgactccatttcaagtaggaagcgtagcagtatatcaaagcagaatttatttcaaactggaagcaatgtatcattttcttgtggtggtgagacacgagttccattatggttacagtcttcagaggacatggaaaaatgctccaaagacctggcgcactgtcatgcctacctggtagaaatgagccagctcctgcaaagcatggacgtcctgcatcggacatactcggcaccagctatcaacgccatccaggtcccgaaacctttttctggcccagtaagactacactcctccaatcctaatttgtcaacactagattttggagaagagaaaaattattctgatggctctgaaacctcatcagagttttctaaaatgcaagaagatctgtgtcatattgcccataaagtttacttcactttaaggtcagcttttaatatcatgtcagcggagagagagaaactgaagcagctgatggagcaggatgcctcctcctccccgtctgctcaggtcattggtctgaagaacgccctgtcatccgccctagcacaaaacacagatcttaaagaacgcttacgcagaatccatgccgagtctctgctcctcgactcccccgctgtcgccaagtcgggtgacaatctggcagaggaaaactccagagatgaaaaccgagctctagttcatcagctttctaatgaaagtagactctccatcactgactccctttctgagttttttgatgctcaggaagttctgttatctccaagctcttcagaaaacgagatttctgatgatgactcatatgtcagtgacataagtgataatctttccttagataatctcagtaatgatttagataatgagagacagaccttggggcctgtccttgatagtggtcgggaagcgaagtcccggagaagaacgtgcctgccggcgccctgcccgagcagcagtaacatcagcctgtggaacatcctgaggaacaacatcgggaaggacctgtccaaggtggccatgccggtggagctgaacgagcccctgaacacgctgcagaggctctgcgaggagctggagtacagcgagctcctggacaaggccgcgcagattcccagccccctggaaaggatggtatatgtggcagcctttgccatatcagcgtatgcatctagctactaccgagctggaagcaagccatttaatccggttcttggagaaacatatgaatgtattcgggaggacaagggcttccagtttttttcagaacaggtcagccaccatccgcctatctctgcgtgtcatgctgagtctagaaattttgttttctggcaagatgtgagatggaaaaacaaattctggggcaaatccatggaaattgttccaattggcacaacccatgtgactctgccagtttttggggatcattttgagtggaacaaagtgacctcttgcatccataacatcttaagcgggcagaggtggattgagcactatggagagattgtcatcaagaacctgcatgatgattcctgctactgcaaagtgaattttataaaggcaaaatactggagcactaatgcccatgagattgaaggcacagtgtttgacaggagtggaaaagcggttcatcggctgtttgggaaatggcatgaaagcatctactgtggcggcggctcctcttctgcctgtgtatggagagcaaatcctatgccgaaaggctacgagcaatactatagcttcacacagtttgcgctggaattaaatgaaatggatccatcatcaaagtctttattgccacctactgacactcgatttaggccagaccagaggtttctagaggaagggaacttagaagaagctgaaatacaaaagcagaggattgaacaactgcagagagaaaggcggcgggtcttagaagaaaatcatgtggagcaccagcctcggtttttcaggaaatccgacgatgactcttgggtgagcaacggcacctatttggaacttagaaaagatcttggtttttccaaactggaccatcctgtcttatggtgaaaaagtaaagaagaaagataacattagtgtatttctcctgtgcttgccttctgaagtggcacaaacctgtgtttatatatttaaaagatactctaggatgatcacttgtgcttagcttagcattgtaactctttaagtctatattttcctcagtgcgtttctttacaatttcaaatgttaccctgattgtttatatgaatgtagaacaccttgacatttctttttatatataaactatttaataaaaatgaaagattg

SEQ ID NO: 21329 - DNA, 2614 bp, Homo sapiens
  source 1..2614: mol_type = unassigned DNA
tggataagagctaaaccacctgccactggggacttccatactctcggctcccttgtcatctgatggcattttgattgtctcgaggccaagtgacttgctgtccatgatgagtgatgagaagaaccttggtgtgtcccaaaaattggtatcaccttcaaggagcacaagtagctgctcttccaagcaaggaagtcgacaggacagctgggaagtggtggaaggactgaggggggagatgaattacacccaggagccaccagttcagaaaggatttttgctgaaaaagaggaagtggcccttaaaaggctggcataagagattcttctatctggacaaaggaatcttgaaatatgccaagagccaaaccgatatagagagagagaagctgcatggctgcattgatgtcgggctctcagtgatgtctgtaaagaagtcatcaaaatgcatagaccttgacaccgaggagcacatctaccatctgaaggtcaagtcagaagaagtctttgatgagtgggtatcgaaacttcgccaccacagaatgtatcgtcagaatgaaattgccatgtttccacatgaagttaaccactttttctcagggtccaccatcacagactcttcatctggggtgtttgactccatttcaagtaggaagcgtagcagtatatcaaagcagaatttatttcaaactggaagcaatgtatcattttcttgtggtggtgagacacgagttccattatggttacagtcttcagaggacatggaaaaatgctccaaagacctggcgcactgtcatgcctacctggtagaaatgagccagctcctgcaaagcatggacgtcctgcatcggacatactcggcaccagctatcaacgccatccaggtcccgaaacctttttctggcccagtaagactacactcctccaatcctaatttgtcaacactagattttggagaagagaaaaattattctgatggctctgaaacctcatcagagttttctaaaatgcaagaagatctgtgtcatattgcccataaagtttacttcactttaaggtcagcttttaatatcatgtcagcggagagagagaaactgaagcagctgatggagcaggatgcctcctcctccccgtctgctcaggtcattggtctgaagaacgccctgtcatccgaaaactccagagatgaaaaccgagctctagttcatcagctttctaatgaaagtagactctccatcactgactccctttctgagttttttgatgctcaggaagttctgttatctccaagctcttcagaaaacgagatttctgatgatgactcatatgtcagtgacataagtgataatctttccttagataatctcagtaatgatttagataatgagagacagaccttggggcctgtccttgatagtggtcgggaagcgaagtcccggagaagaacgtgcctgccggcgccctgcccgagcagcagtaacatcagcctgtggaacatcctgaggaacaacatcgggaaggacctgtccaaggtggccatgccggtggagctgaacgagcccctgaacacgctgcagaggctctgcgaggagctggagtacagcgagctcctggacaaggccgcgcagattcccagccccctggaaaggatggtatatgtggcagcctttgccatatcagcgtatgcatctagctactaccgagctggaagcaagccatttaatccggttcttggagaaacatatgaatgtattcgggaggacaagggcttccagtttttttcagaacaggtcagccaccatccgcctatctctgcgtgtcatgctgagtctagaaattttgttttctggcaagatgtgagatggaaaaacaaattctggggcaaatccatggaaattgttccaattggcacaacccatgtgactctgccagtttttggggatcattttgagtggaacaaagtgacctcttgcatccataacatcttaagcgggcagaggtggattgagcactatggagagattgtcatcaagaacctgcatgatgattcctgctactgcaaagtgaattttataaaggcaaaatactggagcactaatgcccatgagattgaaggcacagtgtttgacaggagtggaaaagcggttcatcggctgtttgggaaatggcatgaaagcatctactgtggcggcggctcctcttctgcctgtgtatggagagcaaatcctatgccgaaaggctacgagcaatactatagcttcacacagtttgcgctggaattaaatgaaatggatccatcatcaaagtctttattgccacctactgacactcgatttaggccagaccagaggtttctagaggaagggaacttagaagaagctgaaatacaaaagcagaggattgaacaactgcagagagaaaggcggcgggtcttagaagaaaatcatgtggagcaccagcctcggtttttcaggaaatccgacgatgactcttgggtgagcaacggcacctatttggaacttagaaaagatcttggtttttccaaactggaccatcctgtcttatggtgaaaaagtaaagaagaaagataacattagtgtatttctcctgtgcttgcc

SEQ ID NO: 21330 - DNA, 534 bp, Homo sapiens
  source 1..534: mol_type = unassigned DNA
acctgtgcttgtcattatgtgcgtcgaggataagccaacctttataggttttagggtttcctttgggccacccaaaatgttttttaaatactttggataagagctaaaccacctgccactggggacttccatactctcggctcccttgtcatctgatggcattttgattgtctcgaggccaagtgacttgctgtccatgatgagtgatgagaagaaccttggtgtgtcccaaaaattggtatcaccttcaaggagcacaagtagctgctcttccaagcaaggaagtcgacaggacagctgggaagtggtggaaggactgaggggggagatgaattacacccaggagccaccagttcagaaaggatttttgctgaaaaagaggaagtggcccttaaaaggctggcataagagattcttctatctggacaaaggaatcttgaaatatgccaagagccaaaccgatatagagagagagaagctgcatggctgcattgatgtcgggctctcagtgatgtctgtaaagaagtcatcaaa

SEQ ID NO: 21331 - DNA, 568 bp, Homo sapiens
  source 1..568: mol_type = unassigned DNA
agacatttcgcgagggggatggttccagaaagcgaagatctgagcgtggtgaatgaaatgtgaacagaatagctccggaaagagtctcagaaaccttgaattggggtcagtttggagactgaaaatgcgtcgagcgctgcaggtggtggttggcagggggatttaacactgtggagcccttactccgtcccaggcgctgagcccagcgagccacgcgcggtgcccagctcggtgaggttttagggtttcctttgggccacccaaaatgttttttaaatactttggataagagctaaaccacctgccactggggacttccatactctcggctcccttgtcatctgatggcattttgattgtctcgaggccaagtgacttgctgtccatgatgagtgatgagaagaaccttggtgtgtcccaaaaattggtatcaccttcaaggagcacaagtagctgctcttccaagcaaggaagtcgacaggacagctgggaagtggtggaaggactgaggggggagatgaattacacccaggagccaccagttcagaaaggatttttgctgaaaaag

SEQ ID NO: 21332 - DNA, 6504 bp, Homo sapiens
  source 1..6504: mol_type = unassigned DNA
gctggtggcgcccgccagccggcccgggagaggggacttgagcgcttcgcggccggtgcgcagcgcggctccggccccgcagtctgtctgcaagtggccatccccgcccccgactcctgcggccggtgcgggagctgtcagctgcacgttgcgggggtaccggagaagccggggttgccttctcccggttctgtgcgctaaccccggagcccggccccggggaactagggagcgtctccggctgcacagcgctcaggttttagggtttcctttgggccacccaaaatgttttttaaatactttggataagagctaaaccacctgccactggggacttccatactctcggctcccttgtcatctgatggcattttgattgtctcgaggccaagtgacttgctgtccatgatgagtgatgagaagaaccttggtgtgtcccaaaaattggtatcaccttcaaggagcacaagtagctgctcttccaagcaaggaagtcgacaggacagctgggaagtggtggaaggactgaggggggagatgaattacacccaggagccaccagttcagaaaggatttttgctgaaaaagaggaagtggcccttaaaaggctggcataagagattcttctatctggacaaaggaatcttgaaatatgccaagagccaaaccgatatagagagagagaagctgcatggctgcattgatgtcgggctctcagtgatgtctgtaaagaagtcatcaaaatgcatagaccttgacaccgaggagcacatctaccatctgaaggtcaagtcagaagaagtctttgatgagtgggtatcgaaacttcgccaccacagaatgtatcgtcagaatgaaattgccatgtttccacatgaagttaaccactttttctcagggtccaccatcacagactcttcatctggggtgtttgactccatttcaagtaggaagcgtagcagtatatcaaagcagaatttatttcaaactggaagcaatgtatcattttcttgtggtggtgagacacgagttccattatggttacagtcttcagaggacatggaaaaatgctccaaagacctggcgcactgtcatgcctacctggtagaaatgagccagctcctgcaaagcatggacgtcctgcatcggacatactcggcaccagctatcaacgccatccaggtcccgaaacctttttctggcccagtaagactacactcctccaatcctaatttgtcaacactagattttggagaagagaaaaattattctgatggctctgaaacctcatcagagttttctaaaatgcaagaagatctgtgtcatattgcccataaagtttacttcactttaaggtcagcttttaatatcatgtcagcggagagagagaaactgaagcagctgatggagcaggatgcctcctcctccccgtctgctcaggtcattggtctgaagaacgccctgtcatccgaaaactccagagatgaaaaccgagctctagttcatcagctttctaatgaaagtagactctccatcactgactccctttctgagttttttgatgctcaggaagttctgttatctccaagctcttcagaaaacgagatttctgatgatgactcatatgtcagtgacataagtgataatctttccttagataatctcagtaatgatttagataatgagagacagaccttggggcctgtccttgatagtggtcgggaagcgaagtcccggagaagaacgtgcctgccggcgccctgcccgagcagcagtaacatcagcctgtggaacatcctgaggaacaacatcgggaaggacctgtccaaggtggccatgccggtggagctgaacgagcccctgaacacgctgcagaggctctgcgaggagctggagtacagcgagctcctggacaaggccgcgcagattcccagccccctggaaaggatggtatatgtggcagcctttgccatatcagcgtatgcatctagctactaccgagctggaagcaagccatttaatccggttcttggagaaacatatgaatgtattcgggaggacaagggcttccagtttttttcagaacaggtcagccaccatccgcctatctctgcgtgtcatgctgagtctagaaattttgttttctggcaagatgtgagatggaaaaacaaattctggggcaaatccatggaaattgttccaattggcacaacccatgtgactctgccagtttttggggatcattttgagtggaacaaagtgacctcttgcatccataacatcttaagcgggcagaggtggattgagcactatggagagattgtcatcaagaacctgcatgatgattcctgctactgcaaagtgaattttataaaggcaaaatactggagcactaatgcccatgagattgaaggcacagtgtttgacaggagtggaaaagcggttcatcggctgtttgggaaatggcatgaaagcatctactgtggcggcggctcctcttctgcctgtgtatggagagcaaatcctatgccgaaaggctacgagcaatactatagcttcacacagtttgcgctggaattaaatgaaatggatccatcatcaaagtctttattgccacctactgacactcgatttaggccagaccagaggtttctagaggaagggaacttagaagaagctgaaatacaaaagcagaggattgaacaactgcagagagaaaggcggcgggtcttagaagaaaatcatgtggagcaccagcctcggtttttcaggaaatccgacgatgactcttgggtgagcaacggcacctatttggaacttagaaaagatcttggtttttccaaactggaccatcctgtcttatggtgaaaaagtaaagaagaaagataacattagtgtatttctcctgtgcttgccttctgaagtggcacaaacctgtgtttatatatttaaaagatactctaggatgatcacttgtgcttagcttagcattgtaactctttaagtctatattttcctcagtgcgtttctttacaatttcaaatgttaccctgattgtttatatgaatgtagaacaccttgacatttctttttatatataaactatttaataaaaatgaaagattgaatgttcatgtgtgggttaaaaaaagaagctttaacactaattttccaaaggttagggaagattccaattaaatttatgccttataaaattatgttgtagaaaaaaaatcaacctctcccaggtgcattaagaaataagaattcccagggttactcacccatgcgtaagctacccaagtttaatttggtagctgaaatatctttttgcctcagacagctcttgaattgctcatacagaacaattctgctggtgctggagtctgaagaatattttcatttgcattttagtggttagggagaggatataagattaatggaatgtatatttttatataagacgtatacggcaccttcttgaaaaggaagcatttgaacttgttcctccctatagttctattgccttatatgcaaaattgtaccctgttgctcagagaaattattcataagagaaaagaattccaattaattaaatatcacaatagcatcccagagagacagtaggaaatttctccttagtgagagctgagtccttgagaagttaagagactgtttcctgcttcccaccccaccccgttttttgtccctccgtttgatcacctccctgttgagtatggaatgtcccagtttaatataaaacatacagtttattccacacagcagtttgactttgtaaaagtttagcaaaataactgattgttttggataactcaacatgtttttcttaaatgctgttttagtattttctacctcttaataagcaccatattttagatcttgtataaaaagttgccatctgccttatagacaaatgtagagaattgatgttcttgctttgtgttgtgttctggtaaagctttaagtgagtgtcttacccctttcctatactttcttgttatccatatcattcttttgtgagttttgcagcagtcttgaataatacagattataactactgaaaggggaaccttcgtctttttaaatgtgttatttcacattacaataatatgtgtagtagttgaattgtgttatcaaagcatgtccaacttctgtccagatgacattaaaaccaaagcctaattgttaagcctcttattctaaagtccatagcaatgctatggaatatcaagtataatgatgtagtaaaaagatttctccagaaaacactttgagatacttaaagaaattcagagcatatcgaatgttatgaatgaagagtaaaataattacaggaaaagaatgcatgatttttcattgtcacaccaaataaccagttggacaatattgcattttcaaaatggagagttatttaaagtggatgtgtagccttctggaatctgcacgtgactggcattttaaaacaactcattaaatattggattcattttatcgagatgccaagatgaacacaatgtgaatatcatttccatttctaagcagttgaatgacacagtcagattctttggtgtatgctttgttctttccatctcaagcatttatccaaattctgctcacagacatgaggaagcaggctgtagatttaagggcactcaaggggaaaacaaatgtagtttccacagtgtgaggataaatgtagaatcgtggtaatattggctgttaaattggcctgctccagagactggctcaaaaaagaaagaagcaacgaaaacaaaatgcacagcctgaatggacgtagcactgtcatgtggcatttggaaaatctttaattatcctaatgttatttcacttgcccttatgctttattttagagtcccagggacaactggatgaaacattacgtctgtagtcatcttatttgagatgggggtgggaacgaattaaaatatgatagagaactatatgcagattttaaaatctagtcagtactagcatctataaagggcttttctgaaatttaaacagcttggtgatgcatcctgatattataagcttaaaactatcttgagggggaaatgacttcttttctccttctgtcccttttctcaaaagcatctttcccccaaatgtatgtctctaggacattttatagttttaagaggaagaaaacagaaacgtggcatcatttgggaagaaccaaggtagaatttaattttctggactttaaatctcctggttaaataatgctaatcactgtaccatttgagttacatgttttaacctcttttttttttctaattattccatccaaaatttctggtgaattacacagaaatttttggaaatgggactttgtgcaggtaaccaccctgcacttcaggtaatgttcctgtcacagctgtcgactaccccacgctgcaggaaatccattcagaaatgagctaacagtctccagtgtagcaggagagccagtcacttccctccccaggccccaaagcaccccaaggctggtattccttgagtcataggtattaataataaaagcctcaatgcagcttctccatgtagttcctctcctacaagccaggtggattctggtcctaactaaagagatgggagttcacctgagggcaagaagtacccaggatgcccaaacagccgcacaggtgtcctgtgcttcctgtgagacttcctgggggaaatatacaaactaatatattttttaatgtttacgtcatttacactgctgcttttctcatattctgcttttaattacttgtagtaaatcatttgtttgggcttcaagcactgtcttccatctgcatcttccagatttatcatgagtgatcttgttctactgttaaagatgtcaagcctaaaaagtaataaagtttttatttggctgttgaaccttgatgtagcccctactacatacactacaagttatgccttctggctactacagaatctccgcagaccttttagttatgagtagaagcaataagaaggtgtccttatggtcttaggaataatagttccaatgtattggcataatttgtttgaatgtctttattttgatattaacaccggcataaatctatttttgctaccagatgatagctattttcatttgctctattttcctctgcattgtactaatctgttactcagtgttagtcttcatttttctgtgttggaaacctgcgtcatgtaaatatctgcaaatcatgacagtctaaagtgcaaaccattttcagagactttggggaatgcagtgatcagaagtggctaatttattttatttctgattattttatccagagggtacttttttaatggatatttgtaaatcttccacttaaccactgaaaattattttgttttaatcccacccttccatccatacctctgcctccccaaaaagctcctattaatttgcttatccccctcatgtagctagttgaatgtgaataaataacatgg

SEQ ID NO: 21333 - DNA, 540 bp, Homo sapiens
  source 1..540: mol_type = unassigned DNA
attatgtgcgtcgaggataagccaacctttataggtaagagtgctagtcattttatggactcataggatcactgaatttgaaagctagacaggatcgtcaggctgaaggaatcttggtaaatgggttttagggtttcctttgggccacccaaaatgttttttaaatactttggataagagctaaaccacctgccactggggacttccatactctcggctcccttgtcatctgatggcattttgattgtctcgaggccaagtgacttgctgtccatgatgagtgatgagaagaaccttggtgtgtcccaaaaattggtatcaccttcaaggagcacaagtagctgctcttccaagcaaggaagtcgacaggacagctgggaagtggtggaaggactgaggggggagatgaattacacccaggagccaccagttcagaaaggatttttgctgaaaaagaggaagtggcccttaaaaggctggcataagagattcttctatctggacaaaggaatcttgaaatatgccaagagccaaaccgat

SEQ ID NO: 21334 - DNA, 3889 bp, Homo sapiens
  source 1..3889: mol_type = unassigned DNA
tcctccctccgccgcgccctcgctccgcctcgcgcggggggaccatctgctggcatttcctgcagccaggcccgcgccgccagtggagcccccgcgcgcccggccggcccggagcaccgagctcgcggcacggtaggagaagcccccgagcgcccacagcatgaaggaggaggccttcctccggcgccgcttctccctgtgtccaccttcctccacccctcagaaagtcgacccccggaagctcacccggaacttgctcctcagcggagacaatgagctctacccactcagcccagggaaggacatggagcccaacggcccgtcgctgcccagggatgaagggcccccgaccccaagctctgccacgaaggtgccaccggcagagtacaggctgtgcaacgggtcagacaaggaatgtgtgtcccccaccgccagggtcaccaagaaggagactctcaaggcgcagaaggagaactaccggcaggagaagaagcgcgccacacggcagctgctcagcgctctgacagaccccagcgtggtcatcatggctgacagcctgaagatccgcggcaccctgaagagctggaccaagctgtggtgcgtgctgaagccgggggtgctgctcatctacaagacgcccaaggtgggccagtgggtgggcacggtgctgctgcactgctgcgagctcatcgagcggccctccaagaaggacggcttctgcttcaagctcttccacccgctggatcagtccgtctgggccgtgaagggccccaaaggtgagagcgtgggctccatcacacagcccctgcccagcagctacctgatcttcagggccgcctccgagtcagatggtcgctgctggctggacgccctggagctggccctgcgctgctctagcctactgagactgggcacctgcaagccgggccgagacggggagccagggacctcgccagacgcatcaccctcatcgctctgtgggctgccagcctcagccaccgtccacccagaccaagacctgttcccactgaacgggtcttccctggagaacgatgcattctcagacaagtcggagagagagaaccctgaggagtcagataccgagacccaggaccatagccggaagacggagagtggcagcgaccagtcagagacccctggggccccggtgcggagagggaccacctatgtggagcaggtccaggaggagctgggggagctgggcgaggcgtcccaggtggagacagtgtcagaggagaacaagagtctgatgtggaccctgctgaagcagctacggccaggcatggacctgtcccgcgtggtgctacccacgttcgtactggagccgcgctccttcctgaacaagctctccgactactactaccacgcagacctgctctccagggctgcggtggaggaggatgcctacagccgcatgaagctggtgctgcggtggtacctgtctggcttctacaagaagcccaagggaatcaagaagccgtacaaccccatcctgggggagaccttccgctgctgctggttccacccgcagactgacagccgcacattctacatagcagagcaggtgtcccaccacccgcccgtgtctgccttccacgtcagcaaccggaaggacggcttctgcatcagtggcagcatcacagccaagtccaggttttatgggaactcgctgtcggcgctgctggacggcaaagccacgctcaccttcctgaaccgagccgaggattacacccttaccatgccctacgcccactgcaaaggaatcctgtatggcacgatgaccctggagctgggtgggaaggtcaccatcgagtgtgcgaagaacaacttccaggcccagctggaattcaaactcaagcccttcttcgggggtagcaccagcatcaaccagatctcgggaaagatcacgtcgggagaggaagtcctggcgagcctcagtggccactgggacagggacgtgtttatcaaggaggaagggagcggaagcagtgcgcttttctggaccccgagcggggaggtccgcagacagaggctgaggcagcacacggtgccgctggaggagcagacggagctggagtccgagaggctctggcagcacgtcaccagggccatcagcaagggcgaccagcacagggccacacaggagaagtttgcactggaggaggcacagcggcagcgggcccgtgagcggcaggagagcctcatgccctggaagccgcagctgttccacctggaccccatcacccaggagtggcactaccgatacgaggaccacagcccctgggaccccctgaaggacatcgcccagtttgagcaagacgggatcctgcggaccttgcagcaggaggccgtggcccgccagaccaccttcctgggcagcccagggcccaggcacgagaggtctggcccagaccagcggcttcgcaaggccagcgaccagccctccggccacagccaggccacggagagcagcggatccacgcctgagtcctgcccagagctctcagacgaggagcaggatggtgactttgtccctggcggtgagagcccatgccctcggtgcaggaaggaggcgcggcggctgcaggccctgcacgaggccatcctctccatccgagaggcccagcaggagctgcacaggcacctctcggccatgctgagctccacggcacgggcagcacaggcaccgaccccaggcctcctgcagagcccccgatcctggttcctgctctgcgtgttcctggcgtgtcagctgttcattaaccacatcctcaaataggagccctgagggcagagctcctggccggtcctgagccctccctcccaggcacccagcactttaagcctgctccatggaggcagagaggcccggcaagcacagccactgtgacggggagtccaggcgcaggagggacccggggccacaaggcgctgcgggcccaggtgtgctgggcccctctcaggggcactggcctctctgcagggccttccgcccagcgctggccttaatgctaaagccaaatgcagcttctgctgtgcgacgcactcctggccatcttgccgtgtcaccccctgtccggcctccacttgccatgggggatggatggatttagggtgggagggcctgtgggggccctggacagtcacaccccagcagcagtgagtgggcaggtttggaggagccccgagtggcccaggagtccccccacacacagatgcataggcctgccttccggagaccctgtccacattgccgggaccaccctggtggggccactggtgggtgccagggacaggttagggccactctggggaaggcattttggttttttattccacgctgtgctgtttggatgggagccccacagaggcaggtcctggaaccaccccacccccacacctggacgctcgctctggtgggggcacacgcaggtggaggtggttgtgggtgcaggtgtgtgcaggggtgtggggggcgcaggggtgtggcttagctggccccgcacccaggccggggaggctcaagttcgccactttactcagaccgatgcacagtcttcccattttacacttttttaataaacataattgcaatattttaggtgggctgcgagctgcagtcagccttcacgtctggcctcagtccccgtgtcagtgccgctctgcgtgtgcgtgtgcgcgtgtgtgagcctctacacatatatatacgtacagagccttaaaccacatcgtggcggtgccgtctgagctgtagcgggtggctttgtttccagtttttgtacccgtgtccttgtctcccctcctcccccatctggggatgtgtctgtgttccacaccttgaaataaacagacacatacgtgttctctt

SEQ ID NO: 21335 - DNA, 2798 bp, Homo sapiens
  source 1..2798: mol_type = unassigned DNA
ctccctccgccgcgccctcgctccgcctcgcgcggggggaccatctgctggcatttcctgcagccaggcccgcgccgccagtggagcccccgcgcgcccggccggcccggagcaccgagctcgcggcacggtaggagaagcccccgagcgcccacagcatgaaggaggaggccttcctccggcgccgcttctccctgtgtccaccttcctccacccctcagaaagtcgacccccggaagctcacccggaacttgctcctcagcggagacaatgagctctacccactcagcccagggaaggacatggagcccaacggcccgtcgctgcccagggatgaagggcccccgaccccaagctctgccacgaaggtgccaccggcagagtacaggctgtgcaacgggtcagacaaggaatgtgtgtcccccaccgccagggtcaccaagaaggagactctcaaggcgcagaaggagaactaccggcaggagaagaagcgcgccacacggcagctgctcagcgctctgacagaccccagcgtggtcatcatggctgacagcctgaagggccccaaaggtgagagcgtgggctccatcacacagcccctgcccagcagctacctgatcttcagggccgcctccgagtcagatggtcgctgctggctggacgccctggagctggccctgcgctgctctagcctactgagactgggcacctgcaagccgggccgagacggggagccagggacctcgccagacgcatcaccctcatcgctctgtgggctgccagcctcagccaccgtccacccagaccaagacctgttcccactgaacgggtcttccctggagaacgatgcattctcagacaagtcggagagagagaaccctgaggagtcagataccgagacccaggaccatagccggaagacggagagtggcagcgaccagtcagagacccctggggccccggtgcggagagggaccacctatgtggagcaggtccaggaggagctgggggagctgggcgaggcgtcccaggtggagacagtgtcagaggagaacaagagtctgatgtggaccctgctgaagcagctacggccaggcatggacctgtcccgcgtggtgctacccacgttcgtactggagccgcgctccttcctgaacaagctctccgactactactaccacgcagacctgctctccagggctgcggtggaggaggatgcctacagccgcatgaagctggtgctgcggtggtacctgtctggcttctacaagaagcccaagggaatcaagaagccgtacaaccccatcctgggggagaccttccgctgctgctggttccacccgcagactgacagccgcacattctacatagcagagcaggtgtcccaccacccgcccgtgtctgccttccacgtcagcaaccggaaggacggcttctgcatcagtggcagcatcacagccaagtccaggttttatgggaactcgctgtcggcgctgctggacggcaaagccacgctcaccttcctgaaccgagccgaggattacacccttaccatgccctacgcccactgcaaaggaatcctgtatggcacgatgaccctggagctgggtgggaaggtcaccatcgagtgtgcgaagaacaacttccaggcccagctggaattcaaactcaagcccttcttcgggggtagcaccagcatcaaccagatctcgggaaagatcacgtcgggagaggaagtcctggcgagcctcagtggccactgggacagggacgtgtttatcaaggaggaagggagcggaagcagtgcgcttttctggaccccgagcggggaggtccgcagacagaggctgaggcagcacacggtgccgctggaggagcagacggagctggagtccgagaggctctggcagcacgtcaccagggccatcagcaagggcgaccagcacagggccacacaggagaagtttgcactggaggaggcacagcggcagcgggcccgtgagcggcaggagagcctcatgccctggaagccgcagctgttccacctggaccccatcacccaggagtggcactaccgatacgaggaccacagcccctgggaccccctgaaggacatcgcccagtttgagcaagacgggatcctgcggaccttgcagcaggaggccgtggcccgccagaccaccttcctgggcagcccagggcccaggcacgagaggtctggcccagaccagcggcttcgcaaggccagcgaccagccctccggccacagccaggccacggagagcagcggatccacgcctgagtcctgcccagagctctcagacgaggagcaggatggtgactttgtccctggcggtgagagcccatgccctcggtgcaggaaggaggcgcggcggctgcaggccctgcacgaggccatcctctccatccgagaggcccagcaggagctgcacaggcacctctcggccatgctgagctccacggcacgggcagcacaggcaccgaccccaggcctcctgcagagcccccgatcctggttcctgctctgcgtgttcctggcgtgtcagctgttcattaaccacatcctcaaataggagccctgagggcagagctcctggccggtcctgagccctccctcccaggcacccagcactttaagcctgctccatggaggcagagaggcccggcaagcacagccactgtgacggggagtccaggcgcaggagggacccggggccacaaggcgctgcgggcccaggtgtgctgggcccctctcaggggcactggcctctctgcag

SEQ ID NO: 21336 - DNA, 2621 bp, Homo sapiens
  source 1..2621: mol_type = unassigned DNA
ctccctccgccgcgccctcgctccgcctcgcgcggggggaccatctgctggcatttcctgcagccaggcccgcgccgccagtggagcccccgcgcgcccggccggcccggagcaccgagctcgcggcacggtaggagaagcccccgagcgcccacagcatgaaggaggaggccttcctccggcgccgcttctccctgtgtccaccttcctccacccctcagaaagtcgacccccggaagctcacccggaacttgctcctcagcggagacaatgagctctacccactcagcccagggaaggacatggagcccaacggcccgtcgctgcccagggatgaagggcccccgaccccaagctctgccacgaaggtgccaccggcagagtacaggctgtgcaacgggtcagacaaggaatgtgtgtcccccaccgccagggtcaccaagaaggagactctcaaggcgcagaaggagaactaccggcaggagaagaagcgcgccacacggcagctgctcagcgctctgacagaccccagcgtggtcatcatggctgacagcctgaagatccgcggcaccctgaagagctggaccaagctgtggtgcgtgctgaagccgggggtgctgctcatctacaagacgcccaaggtgggccagtgggtgggcacggtgctgctgcactgctgcgagctcatcgagcggccctccaagaaggacggcttctgcttcaagctcttccacccgctggatcagtccgtctgggccgtgaagggccccaaaggtgagagcgtgggctccatcacacagcccctgcccagcagctacctgatcttcagggccgcctccgagtcagatggtcgctgctggctggacgccctggagctggccctgcgctgctctagcctactgagactgggcacctgcaagccgggccgagacggggagccagggacctcgccagacgcatcaccctcatcgctctgtgggctgccagcctcagccaccgtccacccagaccaagacctgttcccactgaacgggtcttccctggagaacgatgcattctcagacaagtcggagagagagaaccctgaggagtcagataccgagacccaggaccatagccggaagacggagagtggcagcgaccagtcagagacccctggggccccggtgcggagagggaccacctatgtggagcaggtccaggaggagctgggggagctgggcgaggcgtcccaggtggagacagtgtcagaggagaacaagagtctgatgtggaccctgctgaagcagctacggccaggcatggacctgtcccgcgtggtgctacccacgttcgtactggagccgcgctccttcctgaacaagctctccgactactactaccacgcagacctgctctccagggctgcggtggaggaggatgcctacagccgcatgaagctggtgctgcggtggtacctgtctggcttctacaagaagcccaagggaatcaagaagccgtacaaccccatcctgggggagaccttccgctgctgctggttccacccgcagactgacagccgcacattctacatagcagagcaggtgtcccaccacccgcccgtgtctgccttccacgtcagcaaccggaaggacggcttctgcatcagtggcagcatcacagccaagtccaggttttatgggaactcgctgtcggcgctgctggacggcaaagccacgctcaccttcctgaaccgagccgaggattacacccttaccatgccctacgcccactgcaaaggaatcctgtatggcacgatgaccctggagctgggtgggaaggtcaccatcgagtgtgcgaagaacaacttccaggcccagctggaattcaaactcaagcccttcttcgggggtagcaccagcatcaaccagatctcgggaaagatcacgtcgggagaggaagtcctggcgagcctcagtggccactgggacagggacgtgtttatcaaggaggaagggagcggaagcagtgcgcttttctggaccccgagcggggaggtccgcagacagaggctgaggcagcacacggtgccgctggaggagcagacggagctggagtccgagaggctctggcagcacgtcaccagggccatcagcaagggcgaccagcacagggccacacaggagaagtttgcactggaggaggcacagcggcagcgggcccgtgagcggcaggagagcctcatgccctggaagccgcagctgttccacctggaccccatcacccaggagtggcactaccgatacgaggaccacagcccctgggaccccctgaaggacatcgcccagtttgagcaagacgggatcctgcggaccttgcagcaggaggccgtggcccgccagaccaccttcctgggcagcccagggcccaggcacgagaggtctggcccagaccagcggcttcgcaaggccagcgaccagccctccggccacagccaggccacggagagcagcggatccacgcctgagtcctgcccagagctccacggcacgggcagcacaggcaccgaccccaggcctcctgcagagcccccgatcctggttcctgctctgcgtgttcctggcgtgtcagctgttcattaa

SEQ ID NO: 21337 - DNA, 3619 bp, Homo sapiens
  source 1..3619: mol_type = unassigned DNA
atttcctgcagccaggcccgcgccgccagtggagcccccgcgcgcccggccggcccggagcaccgagctcgcggcacgaagcccccgagcgcccacagcatgaaggaggaggccttcctccggcgccgcttctccctgtgtccaccttcctccacccctcagaaagtcgacccccggaagctcacccggaacttgctcctcagcggagacaatgagctctacccactcagcccagggaaggacatggagcccaacggcccgtcgctgcccagggatgaagggcccccgaccccaagctctgccacgaaggtgccaccggcagagtacaggctgtgcaacgggtcagacaaggaatgtgtgtcccccaccgccagggtcaccaagaaggagactctcaaggcgcagaaggagaactaccggcaggagaagaagcgcgccacacggcagctgctcagcgctctgacagaccccagcgtggtcatcatggctgacagcctgaagggccccaaaggtgagagcgtgggctccatcacacagcccctgcccagcagctacctgatcttcagggccgcctccgagtcagatggtcgctgctggctggacgccctggagctggccctgcgctgctctagcctactgagactgggcacctgcaagccgggccgagacggggagccagggacctcgccagacgcatcaccctcatcgctctgtgggctgccagcctcagccaccgtccacccagaccaagacctgttcccactgaacgggtcttccctggagaacgatgcattctcagacaagtcggagagagagaaccctgaggagtcagataccgagacccaggaccatagccggaagacggagagtggcagcgaccagtcagagacccctggggccccggtgcggagagggaccacctatgtggagcaggtccaggaggagctgggggagctgggcgaggcgtcccaggtggagacagtgtcagaggagaacaagagtctgatgtggaccctgctgaagcagctacggccaggcatggacctgtcccgcgtggtgctacccacgttcgtactggagccgcgctccttcctgaacaagctctccgactactactaccacgcagacctgctctccagggctgcggtggaggaggatgcctacagccgcatgaagctggtgctgcggtggtacctgtctggcttctacaagaagcccaagggaatcaagaagccgtacaaccccatcctgggggagaccttccgctgctgctggttccacccgcagactgacagccgcacattctacatagcagagcaggtgtcccaccacccgcccgtgtctgccttccacgtcagcaaccggaaggacggcttctgcatcagtggcagcatcacagccaagtccaggttttatgggaactcgctgtcggcgctgctggacggcaaagccacgctcaccttcctgaaccgagccgaggattacacccttaccatgccctacgcccactgcaaaggaatcctgtatggcacgatgaccctggagctgggtgggaaggtcaccatcgagtgtgcgaagaacaacttccaggcccagctggaattcaaactcaagcccttcttcgggggtagcaccagcatcaaccagatctcgggaaagatcacgtcgggagaggaagtcctggcgagcctcagtggccactgggacagggacgtgtttatcaaggaggaagggagcggaagcagtgcgcttttctggaccccgagcggggaggtccgcagacagaggctgaggcagcacacggtgccgctggaggagcagacggagctggagtccgagaggctctggcagcacgtcaccagggccatcagcaagggcgaccagcacagggccacacaggagaagtttgcactggaggaggcacagcggcagcgggcccgtgagcggcaggagagcctcatgccctggaagccgcagctgttccacctggaccccatcacccaggagtggcactaccgatacgaggaccacagcccctgggaccccctgaaggacatcgcccagtttgagcaagacgggatcctgcggaccttgcagcaggaggccgtggcccgccagaccaccttcctgggcagcccagggcccaggcacgagaggtctggcccagaccagcggcttcgcaaggccagcgaccagccctccggccacagccaggccacggagagcagcggatccacgcctgagtcctgcccagagctctcagacgaggagcaggatggtgactttgtccctggcggtgagagcccatgccctcggtgcaggaaggaggcgcggcggctgcaggccctgcacgaggccatcctctccatccgagaggcccagcaggagctgcacaggcacctctcggccatgctgagctccacggcacgggcagcacaggcaccgaccccaggcctcctgcagagcccccgatcctggttcctgctctgcgtgttcctggcgtgtcagctgttcattaaccacatcctcaaataggagccctgagggcagagctcctggccggtcctgagccctccctcccaggcacccagcactttaagcctgctccatggaggcagagaggcccggcaagcacagccactgtgacggggagtccaggcgcaggagggacccggggccacaaggcgctgcgggcccaggtgtgctgggcccctctcaggggcactggcctctctgcagggccttccgcccagcgctggccttaatgctaaagccaaatgcagcttctgctgtgcgacgcactcctggccatcttgccgtgtcaccccctgtccggcctccacttgccatgggggatggatggatttagggtgggagggcctgtgggggccctggacagtcacaccccagcagcagtgagtgggcaggtttggaggagccccgagtggcccaggagtccccccacacacagatgcataggcctgccttccggagaccctgtccacattgccgggaccaccctggtggggccactggtgggtgccagggacaggttagggccactctggggaaggcattttggttttttattccacgctgtgctgtttggatgggagccccacagaggcaggtcctggaaccaccccacccccacacctggacgctcgctctggtgggggcacacgcaggtggaggtggttgtgggtgcaggtgtgtgcaggggtgtggggggcgcaggggtgtggcttagctggccccgcacccaggccggggaggctcaagttcgccactttactcagaccgatgcacagtcttcccattttacacttttttaataaacataattgcaatattttaggtgggctgcgagctgcagtcagccttcacgtctggcctcagtccccgtgtcagtgccgctctgcgtgtgcgtgtgcgcgtgtgtgagcctctacacatatatatacgtacagagccttaaaccacatcgtggcggtgccgtctgagctgtagcgggtggctttgtttccagtttttgtacccgtgtccttgtctcccctcctcccccatctggggatgtgtctgtgttccacaccttgaaataaacagacacatacgtgtt

SEQ ID NO: 21338 - DNA, 554 bp, Homo sapiens
  source 1..554: mol_type = unassigned DNA
tgaccacccaccaccaggctcccagggcccaggccctcctcaccctgcctcagaagtcccctgagagggggacttcttagccaggggcacccccaccatgtggctctgaagccccttccggggcggtgacctcctgctgcccctccttccttccttccagaagcccccgagcgcccacagcatgaaggaggaggccttcctccggcgccgcttctccctgtgtccaccttcctccacccctcagaaagtcgacccccggaagctcacccggaacttgctcctcagcggagacaatgagctctacccactcagcccagggaaggacatggagcccaacggcccgtcgctgcccagggatgaagggcccccgaccccaagctctgccacgaaggtgccaccggcagagtacaggctgtgcaacgggtcagacaaggaatgtgtgtcccccaccgccagggtcaccaagaaggagactctcaaggcgcagaaggagaactaccggcaggagaagaagcgcgccacacggcagctgctcagcgctctgacagacccca

SEQ ID NO: 21339 - DNA, 575 bp, Homo sapiens
  source 1..575: mol_type = unassigned DNA
agcacataaggggcagggacaacgggctcagatgtctggggctcctcttgtgttctgatggctcctgagacggggagaaacggcgacagtttcctgggttcaggaagggagaggaggcgcctcgcaccctggctagggtgggctgggggcctgcacccctaagttggagaaccccacgaagctgaccccactcaccgctgcccaccccgccaagcctcctggccattttcagcggagtgtcccgacctctggccgcccggaagcccccgagcgcccacagcatgaaggaggaggccttcctccggcgccgcttctccctgtgtccaccttcctccacccctcagaaagtcgacccccggaagctcacccggaacttgctcctcagcggagacaatgagctctacccactcagcccagggaaggacatggagcccaacggcccgtcgctgcccagggatgaagggcccccgaccccaagctctgccacgaaggtgccaccggcagagtacaggctgtgcaacgggtcagacaaggaatgtgtgtcccccaccgccagggtcaccaagaaggagact

SEQ ID NO: 21340 - DNA, 554 bp, Homo sapiens
  source 1..554: mol_type = unassigned DNA
ctcgctccgcctcgcgcggggggaccatctgctggcatttcctgcagccaggcccgcgccgccagtggagcccccgcgcgcccggccggcccggagcaccgagctcgcggcacgaagcccccgagcgcccacagcatgaaggaggaggccttcctccggcgccgcttctccctgtgtccaccttcctccacccctcagaaagtcgacccccggaagctcacccggaacttgctcctcagcggagacaatgagctctacccactcagcccagggaaggacatggagcccaacggcccgtcgctgcccagggatgaagggcccccgaccccaagctctgccacgaaggtgccaccggcagagtacaggctgtgcaacgggtcagacaaggaatgtgtgtcccccaccgccagggtcaccaagaaggagactctcaaggcgcagaaggagaactaccggcaggagaagaagcgcgccacacggcagctgctcagcgctctgacagaccccagcgtggtcatcatggctgacagcctgaagatccgcggcaccctgaa

SEQ ID NO: 21341 - DNA, 774 bp, Homo sapiens
  source 1..774: mol_type = unassigned DNA
agaccgctgggctgcctcctgtcagaagccaactggagttagggtttggggtgactcctgggggtatggaggggtcacagggtgggcttacctgcccctccctcgtccctgggctgagcccagcccctccctcatccttgggctgagcgggtctgccccgccgaagcggctgggtggatttcctctcttgccgtttcgcaacttgctcccctctgtgtgtctgccccagtctcttcaaggtgccttttacaggaagacttctgtaagggtcccaccccacctgatacagcctcccaaagcctggagaagtgggccagcctttgggatcctagatagatgctcttgggtctgcctgcaccagggctgatccagatcccagactgaacagaaactctgctccccaaccccaggagtaaggcccctctgcacgtttttatcccacctccttggtacacagggccttgctgttccttgaacctgccagaagcccccgagcgcccacagcatgaaggaggaggccttcctccggcgccgcttctccctgtgtccaccttcctccacccctcagaaagtcgacccccggaagctcacccggaacttgctcctcagcggagacaatgagctctacccactcagcccagggaaggacatggagcccaacggcccgtcgctgcccagggatgaagggcccccgaccccaagctctgccacgaaggtgccaccggcagagtacaggctgtgcaacgggtcagacaaggaatgtgtgtcccccac

SEQ ID NO: 21342 - DNA, 706 bp, Homo sapiens
  source 1..706: mol_type = unassigned DNA
atttcctccatgctctaggatgggaaggacaagagggcgtgactcttcccagagtcccatcatctctgatttaggaatggagcccttagggtgtctcacctcctcgggatgcctaatagtgtgtttggtgaatgcagatggacttaactggtccatagatcccctctcaccctgctgacacgaagacaaggatgaaggggaaagttgaggctcaacaactgaacagtattccttctaaatatgtacattcttagggattttaagtggaaaacagggaggagatttgagggataccccacctcggcaggcagctggtcaggctgcctgttgtgaccagcctggggtcgccttcccttcatccaaggccaggggagatggcaaaccttcagtaagcgctgccgtacctggcagagcagaagcaccaccccagcttggagacagcatgcccctgactgctggtcacggatggccccttgaagcccccgagcgcccacagcatgaaggaggaggccttcctccggcgccgcttctccctgtgtccaccttcctccacccctcagaaagtcgacccccggaagctcacccggaacttgctcctcagcggagacaatgagctctacccactcagcccagggaaggacatggagcccaacggcccgtcgctgcccagggatgaagggcccccgaccccaagctctgccacgaa

SEQ ID NO: 21343 - DNA, 1731 bp, Homo sapiens
  source 1..1731: mol_type = unassigned DNA
tacaaccccatcctgggggagaccttccgctgctgctggttccacccgcagactgacagccgcacattctacatagcagagcaggtgtcccaccacccgcccgtgtctgccttccacgtcagcaaccggaaggacggcttctgcatcagtggcagcatcacagccaagtccaggttttatgggaactcgctgtcggcgctgctggacggcaaagccacgctcaccttcctgaaccgagccgaggattacacccttaccatgccctacgcccactgcaaaggaatcctgtatggcacgatgaccctggagctgggtgggaaggtcaccatcgagtgtgcgaagaacaacttccaggcccagctggaattcaaactcaagcccttcttcgggggtagcaccagcatcaaccagatctcgggaaagatcacgtcgggagaggaagtcctggcgagcctcagtggccactgggacagggacgtgtttatcaaggaggaagggagcggaagcagtgcgcttttctggaccccgagcggggaggtccgcagacagaggctgaggcagcacacggtgccgctggaggagcagacggagctggagtccgagaggctctggcagcacgtcaccagggccatcagcaagggcgaccagcacagggccacacaggagaagtttgcactggaggaggcacagcggcagcgggcccgtgagcggcaggagagcctcatgccctggaagccgcagctgttccacctggaccccatcacccaggagtggcactaccgatacgaggaccacagcccctgggaccccctgaaggacatcgcccagtttgagcaagacgggatcctgcggaccttgcagcaggaggccgtggcccgccagaccaccttcctgggcagcccagggcccaggcacgagaggtctggcccagaccagcggcttcgcaaggccagcgaccagccctccggccacagccaggccacggagagcagcggatccacgcctgagtcctgcccagagctctcagacgaggagcaggatggtgactttgtccctggcggtgagagcccatgccctcggtgcaggaaggaggcgcggcggctgcaggccctgcacgaggccatcctctccatccgagaggcccagcaggagctgcacaggcacctctcggccatgctgagctccacggcacgggcagcacaggcaccgaccccaggcctcctgcagagcccccgatcctggttcctgctctgcgtgttcctggcgtgtcagctgttcattaaccacatcctcaaataggagccctgagggcagagctcctggccgtccccccacacacagatgcataggcctgccttccggagaccctgtccacattgccgggaccaccctggtggggccactggtgggtgccagggacaggttagggccactctggggaaggcattttggttttttattccacgctgtgctgtttggatgggagccccacagaggcaggtcctggaaccaccccacccccacacctggacgctcgctctggtgggggcacacgcaggtggaggtggttgtgggtgcaggtgtgtgcaggggtgtggggggcgcaggggtgtggcttagctggccccgcacccaggccggggaggctcaagttcgccactttactcagaccgatgcacagtcttcccattttacacttttttaataaacataattgcaatattttaggtg

SEQ ID NO: 21344 - DNA, 2182 bp, Homo sapiens
  source 1..2182: mol_type = unassigned DNA
atttcctgcagccaggcccgcgccgccagtggagcccccgcgcgcccggccggcccggagcaccgagctcgcggcacggtaggagaagcccccgagcgcccacagcatgaaggaggaggccttcctccggcgccgcttctccctgtgtccaccttcctccacccctcagaaagtcgacccccggaagctcacccggaacttgctcctcagcggagacaatgagctctacccactcagcccagggaaggacatggagcccaacggcccgtcgctgcccagggatgaagggcccccgaccccaagctctgccacgaaggtgccaccggcagagtacaggctgtgcaacgggtcagacaaggaatgtgtgtcccccaccgccagggtcaccaagaaggagactctcaaggcgcagaaggagaactaccggcaggagaagaaccgcgctccttcctgaacaagctctccgactactactaccacgcagacctgctctccagggctgcggtggaggaggatgcctacagccgcatgaagctggtgctgcggtggtacctgtctggcttctacaagaagcccaagggaatcaagaagccgtacaaccccatcctgggggagaccttccgctgctgctggttccacccgcagactgacagccgcacattctacatagcagagcaggtgtcccaccacccgcccgtgtctgccttccacgtcagcaaccggaaggacggcttctgcatcagtggcagcatcacagccaagtccaggttttatgggaactcgctgtcggcgctgctggacggcaaagccacgctcaccttcctgaaccgagccgaggattacacccttaccatgccctacgcccactgcaaaggaatcctgtatggcacgatgaccctggagctgggtgggaaggtcaccatcgagtgtgcgaagaacaacttccaggcccagctggaattcaaactcaagcccttcttcgggggtagcaccagcatcaaccagatctcgggaaagatcacgtcgggagaggaagtcctggcgagcctcagtggccactgggacagggacgtgtttatcaaggaggaagggagcggaagcagtgcgcttttctggaccccgagcggggaggtccgcagacagaggctgaggcagcacacggtgccgctggaggagcagacggagctggagtccgagaggctctggcagcacgtcaccagggccatcagcaagggcgaccagcacagggccacacaggagaagtttgcactggaggaggcacagcggcagcgggcccgtgagcggcaggagagcctcatgccctggaagccgcagctgttccacctggaccccatcacccaggagtggcactaccgatacgaggaccacagcccctgggaccccctgaaggacatcgcccagtttgagcaagacgggatcctgcggaccttgcagcaggaggccgtggcccgccagaccaccttcctgggcagcccagggcccaggcacgagaggtctggcccagaccagcggcttcgcaaggccagcgaccagccctccggccacagccaggccacggagagcagcggatccacgcctgagtcctgcccagagctctcagacgaggagcaggatggtgactttgtccctggcggtgagagcccatgccctcggtgcaggaaggaggcgcggcggctgcaggccctgcacgaggccatcctctccatccgagaggcccagcaggagctgcacaggcacctctcggccatgctgagctccacggcacgggcagcacaggcaccgaccccaggcctcctgcagagcccccgatcctggttcctgctctgcgtgttcctggcgtgtcagctgttcattaaccacatcctcaaataggagccctgagggcagagctcctggccggtcctgagccctccctcccaggcacccagcactttaagcctgctccatggaggcagagaggcccggcaagcacagccactgtgacggggagtccaggcgcaggagggacccggggccacaaggcgctgcgggcccaggtgtgctgggcccctctcaggggcactggcctctctgcagggccttccgcccagcgctggccttaatgctaaagccaaatgcagcttctgctgtgcgacgcactcctggccatcttgccgtgtca

SEQ ID NO: 21345 - DNA, 7055 bp, Homo sapiens
  source 1..7055: mol_type = unassigned DNA
ccgcggcgccaccgctcgccctccaggttctgccacttgctgggaaaacagcaacagaaggatattaaggagccacccctataatttacccagatagccccagcaaggtcaaagacatatcatgtcccaaggagaaaagctgcaggcatctgaggataaatcactgtgaaacagctttgaccataaagctgacttggaagactttgactccaaggtgcaaggtggtttggacaccctcaatattgcctgctcttttctagtcaaacctgattcatgaaatggaatgaagctgaaaaatcatctacttctttgtttgtggatttgagagaagattgggatggtcttaagtgcataaaacgagactctaactgcagcgatgagttcagatgagaagggcatttcccctgctcataaaacatccactccaacccatagaagtgcctcctcttcaacatcctcccaaagggacagtaggcagagtattcacatactggagaggactgcttcctctagcaccgagccctctgtaagtcggcaattgctagaaccggagccagtccccctctccaaggaagctgacagctgggaaattatagaagggctgaaaataggccaaaccaatgtccagaaaccagacaaacatgagggctttatgctgaagaaaagaaaatggcctttaaaaggctggcacaagcgtttttttgtcctggataatggaatgttaaagtattcaaaggcaccactcgatattcagaaaggaaaggtccatgggagcatagatgtgggactctcagtcatgtcaattaaaaagaaagctcgaagaatagaccttgacaccgaagagcacatctatcatttgaaggtgaaatcccaggactggtttgatgcatgggtctccaaactgcgacatcatcggttgtatcgtcagaatgaaattgtgagatcaccaagagatgctagttttcacatatttccttcaacgtccacagctgaatcctcaccagctgctaatgtttctgtaatggatggaaagatgcaaccaaacagctttccgtggcagtcccctttaccatgcagcaatagcctccctgcaacgtgcacaactggccagagtaaagtggcagcctggttacaggactcggaagagatggacaggtgtgcagaagatcttgcacattgccagtcaaaccttgtggaacttagcaaactcctgcaaaatttggaaatacttcagagaactcagtcggcacctaactttactgacatgcaggctaactgtgtagatatttcaaagaaagacaagcgggtcacaagacgatggagaacaaaaagtgtcagcaaagatacaaaaatacaactgcaggttcctttcagtgctaccatgtcaccagttcgcttgcattcctccaaccccaacctttgtgcagatattgaatttcagactccccctagccacctcactgaccctctggaaagttcaacagattatacaaagctgcaagaagaattttgtctaatcgcacagaaagtgcattctcttttgaagtctgcatttaatagcatagctatagagaaggagaagctgaagcagatggtttccgagcaggatcacagtaaaggccacagcacgcagatggcacggctccgacagtcactgtctcaggcactcaaccagaatgctgaactaaggagtcggttgaacagaatacattcagagtctattatttgtgatcaggttgtcagtgtaaatattattcctagccctgatgaggctggtgagcaaatccatgtcagtctccccttatcacagcaagtagccaatgagagccgcctctccatgtcagagtctgtttctgagttctttgatgcccaagaggtgctcctctctgcaagttcgtcagagaatgaggcttcagatgatgagtcttacatcagtgatgtgagtgataatatatctgaagacaacaccagtgttgcagacaatatttctcggcaaatcctgaatggggagcttacaggaggggccttccgaaatgggcgtcgagcatgcctgccagctccttgtcctgacaccagtaacattaacctgtggaatatcttgaggaacaacattggtaaagacctgtctaaagtctctatgcctgtggagctaaacgagccgctcaacaccctgcagcacctctgtgaggaaatggaatacagcgagctcctggacaaggcttcggaaactgatgatccatatgagcgcatggttctcgttgccgcatttgcagtttcaggatactgctccacctatttcagagcaggaagtaagccattcaacccagtccttggggagacttatgaatgcattagagaagacaagggattccgctttttctcagaacaggttagccatcatccacccatttctgcctgtcactgtgaatcaaagaattttgtgttttggcaagatatcagatggaaaaacaagttctgggggaagtcgatggaaatcctgcctgttggaacactgaatgtcatgcttccaaagtatggagattactatgtgtggaataaagtcaccacttgcatacacaacatcctcagtgggagaagatggatagaacattatggagaagtaaccatcagaaataccaaaagcagtgtttgcatttgcaaactcacatttgtcaaggtgaattattggaattctaacatgaatgaagtccagggggtggtgatagatcaggaggggaaggcggtgtaccggctgtttggaaagtggcatgaaggactctactgtggtgtggccccctctgcaaagtgcatttggagaccaggttccatgccaacaaactatgagctgtactatggcttcacaaggtttgctattgagctcaatgagttagatccagtactaaaagatctccttccaccaacagacgcccggttccggccagatcaaagatttttggaagaaggaaatttagaagctgcagcatcagagaagcaaagagtagaggaactccagagatctcggagacgatatatggaagaaaacaatcttgaacatataccaaaattttttaaaaaagttattgatgccaatcaaagagaagcctgggtttctaacgacacctactgggagcttcgaaaggaccctgggtttagcaaagtagacagccctgttctttggtagactgggaatgtagagctagccaacatatcacattctgaatgaataaataactatgcacaattatgtttcttatagctatgtgtggtttctgggtcaactgaaaacctaccatttgcttttctattcatctttataatggactttcagaagtgcattagacaaggcccctaaccactttgggatcctttctgttttgctgcaaccatattccttaaaaaaaaaaaaaaaaaaaaaaaaaaaatccacaccgtccttggaaagcagaataaaaggagcagaatataaaatccaaagtctgaccagtttgtaaagaaaaacaaatggtaactggtgcttaaagctgatcaagaaagttaacaacaacatagaaaccacacgattgttccactgtctggaagcaccatcccctatcgcaggactcctgggccacaagcagtcggtcagtgcagacttcaagtgtgtctgtttgatgtggtgtgattgtgctggccttgtcgaaaaagatgtgatgcttctcagaacctgttccatctgtatgccattgttcatgccttaagaaatgcaaagatgtacaataaatcatttttaaaatgtgtgctcataggtttatgtgaagaacagattttttgaatcatggcatgattcactttctcaatcaggacaattatgagactaacttaaatgggttttttaaaagtgaacaacacgtgctttactctgataagtcagttaccatatggtatgtctgaagggaaagaaggaaaagacgtgctaagtagatctctgtatttacgtggctcgttaatttcctgtcctgcgtccagataataaaccatccctcttccacctaacctcacagtgtgccctattatttggaaaaatctgtctttgatttggacatttggtcatcagtgttaaaaccttaaaaggaaataacaaaaagcatatggaattcctgtgtgggcttagtagtactataaatgtaattgtttttgagtgaagcaccatgtaatccatgtctcaatcccatgcccgctccactgacactagtcgaattccactgagaacagaagcaagaataatagtagtttatttgcattgtttaaatgaattctatgcaaaatcatatttcaaattttcatcaagtgattccatatggtacatggctacatattaagcatttaccttgctattggcagagatatgaaacttaagctaaggaatgtatccatcccaaagcaggaaagcagaagtgtgttttgcatacttcaggatttgtttttcctccactaatatacagaggcttttgcagaaaacttgcatcagtattcctgtttctgcacgtaggtgactatataaatgcctgtatgttttttttaaaatatctcctcagagattttcctagggaattataaaattacatatattttattgttagttagatgtttattcttggattcttaccattagaatttaagtgttatttaaaactctgatacagttacagacactttacattttattatgaggtgttgattttagtggtatttctcctcagcaaagcattcctaataatggctaatacaccatcaaatgaaaaactgctgatgagagtgtaagagaaagcgctaacgtttccactagatggcgcaatattttatttatccaaaactcctcccttgcatctgagtttttatgttatgtgtacagtctgcattagcttagaatggaatttcattctcaggtaaattttcgaatccatcaccagatctaagcattctgcttcaacaataccctctctattcctctcattcccattttaaatccataggtggcttgccctgcggcagtaaaatcttccccttgatattgattctttttctgctcattcatcttgatgttctttttctgcatcctgagatacatgtcgttaattttaataagaatcctattgacttcctcacgggagtctgttctcctatggttgataaagctttaaatactatttaaagtggttctggtctgtacttactagcacttccctgaacagtctcaaaatagcctaaacataagaaaacaatcctgcaaagtaaaggtttttacaagcagagatgaaggaaagggagcagcagctgaccatcagatgtggtatcaggtagctggaagaggatccaggacccatcagggaagcaacgactgtacttagcaatttgggttataattacaaaaaagaaaaaatagtagaaaggatctttaccagacagtaaggtcatggtacaaatcaggtgagtgaatgttggtcagaggtagcctgacactctgatgaggacttcaagatgagaatgagaaaaatgtctattaaaatcactacatttgataatatctcagatttagaatctcttttgggattcagatagtctgattattccaattcaagtgttcagttaagttttagttactattcctataatacccaattcactaatatcatatctcctgtggaatattcattggtgcgatggcctcatccccttttttactttttattgacatggtggttataaaatgaagagacttactctattggaattttcatctacgtagtatttgggctgtcaagactaaatagcaaaagggtagaatattagatcattctcttaataagacctgatttattccttaggatgttatacaaacctttttatttcaggcctactttcttgttttttcctaaaaggatctaggatagaggagaacataatatgcctgtatacttctcccatggtttattcataagctgcttcatctcattggagatggtcattgaggagagcagtaataagtgacgatgattctgaggacttggctagactgagcggatcaatggcacacaccagcactggtagaggctgaccagaagctcatcgattccatatgctgtcacccagggtgcagatttactctcttttgctgttattttattgtttttcttaaattaagccattgtttttcatggattatttttaaaatacctaccccataattttcaggcaattgtaaaaataaaccttatttaagataacttttaatggtacatatcaactatatgtggggaaaaaatgcaattttctgggcaagagaaaccaaaggattttcaatatatgagatgccaggttgtcaattttctaaaccttttcctctagattattctggccctaggcctttcagcaaccccactaatcaattattagatcctgccccaaggagcagtggcttgggggctggatttagggaggaaaacctgattaaactgttttgcttagtactggttacagctgtagctggagaagagtttataatcataaagtacatttttgttattaccttgtggattttaattatccatcttgtctaatcttgttctctgtcatcctagataatgaggtgtttgtgggagcagagctctgcacacaccaggggatgtaataaatgtttgcacttggcccagtatattatgaatgtggcacagtaaataaagtttgtgtacaaaatactagtttatttctatgggagccattatgttcaggatatataaaatgtatctaattaaacaattttgaatctattttgtgctctagaaatgttcttttggggaaagatggaaagaaatgtataaatggagttaagattaaagtatttggggttttttttccccaaaagcttcccagttgtttagaaataatactatccaaagtaggattcggtcctgtaagtcctaactgaatttcttttgtaaaactgatacgtttaaactgtacattgcataatcattctgttaaactaaacctttgtttaatacataattgtaagagca

SEQ ID NO: 21346 - DNA, 2999 bp, Homo sapiens
  source 1..2999: mol_type = unassigned DNA
tttccacttgctgctcaggaggtattgagatcaatgaacactaacctgaggagcatatttttaccaaattaaagagctacagtgaaatatgtgttccaggttcctggttttaagctaaatatgcatcagttatctctgatcaggggaaacagagggcggagtattcacatactggagaggactgcttcctctagcaccgagccctctgtaagtcggcaattgctagaaccggagccagtccccctctccaaggaagctgacagctgggaaattatagaagggctgaaaataggccaaaccaatgtccagaaaccagacaaacatgagggctttatgctgaagaaaagaaaatggcctttaaaaggctggcacaagcgtttttttgtcctggataatggaatgttaaagtattcaaaggcaccactcgatattcagaaaggaaaggtccatgggagcatagatgtgggactctcagtcatgtcaattaaaaagaaagctcgaagaatagaccttgacaccgaagagcacatctatcatttgaaggtgaaatcccaggactggtttgatgcatgggtctccaaactgcgacatcatcggttgtatcgtcagaatgaaattgtgagatcaccaagagatgctagttttcacatatttccttcaacgtccacagctgaatcctcaccagctgctaatgtttctgtaatggatggaaagatgcaaccaaacagctttccgtggcagtcccctttaccatgcagcaatagcctccctgcaacgtgcacaactggccagagtaaagtggcagcctggttacaggactcggaagagatggacaggtgtgcagaagatcttgcacattgccagtcaaaccttgtggaacttagcaaactcctgcaaaatttggaaatacttcagagaactcagtcggcacctaactttactgacatgcaggctaactgtgtagatatttcaaagaaagacaagcgggtcacaagacgatggagaacaaaaagtgtcagcaaagatacaaaaatacaactgcaggaagggccacccgcgaagggccagttcagcacaactcggcgccggcagaggctagcggcagcagtggctacaacagttcctttcagtgctaccatgtcaccagttcgcttgcattcctccaaccccaacctttgtgcagatattgaatttcagactccccctagccacctcactgaccctctggaaagttcaacagattatacaaagctgcaagaagaattttgtctaatcgcacagaaagtgcattctcttttgaagtctgcatttaatagcatagctatagagaaggagaagctgaagcagatggtttccgagcaggatcacagtaaaggccacagcacgcagatggcacggctccgacagtcactgtctcaggcactcaaccagaatgctgaactaaggagtcggttgaacagaatacattcagagtctattatttgtgatcaggttgtcagtgtaaatattattcctagccctgatgaggctggtgagcaaatccatgtcagtctccccttatcacagcaagtagccaatgagagccgcctctccatgtcagagtctgtttctgagttctttgatgcccaagaggtgctcctctctgcaagttcgtcagagaatgaggcttcagatgatgagtcttacatcagtgatgtgagtgataatatatctgaagacaacaccagtgttgcagacaatatttctcggcaaatcctgaatggggagcttacaggaggggccttccgaaatgggcgtcgagcatgcctgccagctccttgtcctgacaccagtaacattaacctgtggaatatcttgaggaacaacattggtaaagacctgtctaaagtctctatgcctgtggagctaaacgagccgctcaacaccctgcagcacctctgtgaggaaatggaatacagcgagctcctggacaaggcttcggaaactgatgatccatatgagcgcatggttctcgttgccgcatttgcagtttcaggatactgctccacctatttcagagcaggaagtaagccattcaacccagtccttggggagacttatgaatgcattagagaagacaagggattccgctttttctcagaacaggttagccatcatccacccatttctgcctgtcactgtgaatcaaagaattttgtgttttggcaagatatcagatggaaaaacaagttctgggggaagtcgatggaaatcctgcctgttggaacactgaatgtcatgcttccaaagtatggagattactatgtgtggaataaagtcaccacttgcatacacaacatcctcagtgggagaagatggatagaacattatggagaagtaaccatcagaaataccaaaagcagtgtttgcatttgcaaactcacatttgtcaaggtgaattattggaattctaacatgaatgaagtccagggggtggtgatagatcaggaggggaaggcggtgtaccggctgtttggaaagtggcatgaaggactctactgtggtgtggccccctctgcaaagtgcatttggagaccaggttccatgccaacaaactatgagctgtactatggcttcacaaggtttgctattgagctcaatgagttagatccagtactaaaagatctccttccaccaacagacgcccggttccggccagatcaaagatttttggaagaaggaaatttagaagctgcagcatcagagaagcaaagagtagaggaactccagagatctcggagacgatatatggaagaaaacaatcttgaacatataccaaaattttttaaaaaagttattgatgccaatcaaagagaagcctgggtttctaacgacacctactgggagcttcgaaaggaccctgggtttagcaaagtagacagccctgttctttggtagactgggaatgtagagctagccaacatatcacattctgaatgaataaataactatgcacaatt

SEQ ID NO: 21347 - DNA, 3454 bp, Homo sapiens
  source 1..3454: mol_type = unassigned DNA
ctggaggcgcagcacggtcgccgccgccgctgtcggtgctggagatcgcggctcggtgcaggcggcgcccatgcctcctctcctccactagcccgcgcgccagtccgcctgccggggccggctctccgcctcctgcctcccgtcgcagccgcgcagccgccgcagagtccgcggcgccaccgctcgccctccaggttctgccacttgctgggaaaacagcaacagaaggatattaaggagccacccctataatttacccagatagccccagcaaggtcaaagacatatcatgtcccaaggagaaaagctgcaggcatctgaggataaatcactgtgaaacagctttgaccataaagctgacttggaagactttgactccaaggtgcaaggtggtttggacaccctcaatattgcctgctcttttctagtcaaacctgattcatgaaatggaatgaagctgaaaaatcatctacttctttgtttgtggatttgagagaagattgggatggtcttaagtgcataaaacgagactctaactgcagcgatgagttcagatgagaagggcatttcccctgctcataaaacatccactccaacccatagaagtgcctcctcttcaacatcctcccaaagggacagtaggcagagtattcacatactggagaggactgcttcctctagcaccgagccctctgtaagtcggcaattgctagaaccggagccagtccccctctccaaggaagctgacagctgggaaattatagaagggctgaaaataggccaaaccaatgtccagaaaccagacaaacatgagggctttatgctgaagaaaagaaaatggcctttaaaaggctggcacaagcgtttttttgtcctggataatggaatgttaaagtattcaaaggcaccactcgatattcagaaaggaaaggtccatgggagcatagatgtgggactctcagtcatgtcaattaaaaagaaagctcgaagaatagaccttgacaccgaagagcacatctatcatttgaaggtgaaatcccaggactggtttgatgcatgggtctccaaactgcgacatcatcggttgtatcgtcagaatgaaattgtgagatcaccaagagatgctagttttcacatatttccttcaacgtccacagctgaatcctcaccagctgctaatgtttctgtaatggatggaaagatgcaaccaaacagctttccgtggcagtcccctttaccatgcagcaatagcctccctgcaacgtgcacaactggccagagtaaagtggcagcctggttacaggactcggaagagatggacaggtgtgcagaagatcttgcacattgccagtcaaaccttgtggaacttagcaaactcctgcaaaatttggaaatacttcagagaactcagtcggcacctaactttactgacatgcaggctaactgtgtagatatttcaaagaaagacaagcgggtcacaagacgatggagaacaaaaagtgtcagcaaagatacaaaaatacaactgcaggttcctttcagtgctaccatgtcaccagttcgcttgcattcctccaaccccaacctttgtgcagatattgaatttcagactccccctagccacctcactgaccctctggaaagttcaacagattatacaaagctgcaagaagaattttgtctaatcgcacagaaagtgcattctcttttgaagtctgcatttaatagcatagctatagagaaggagaagctgaagcagatggtttccgagcaggatcacagtaaaggccacagcacgcagatggcacggctccgacagtcactgtctcaggctggtgagcaaatccatgtcagtctccccttatcacagcaagtagccaatgagagccgcctctccatgtcagagtctgtttctgagttctttgatgcccaagaggtgctcctctctgcaagttcgtcagagaatgaggcttcagatgatgagtcttacatcagtgatgtgagtgataatatatctgaagacaacaccagtgttgcagacaatatttctcggcaaatcctgaatggggagcttacaggaggggccttccgaaatgggcgtcgagcatgcctgccagctccttgtcctgacaccagtaacattaacctgtggaatatcttgaggaacaacattggtaaagacctgtctaaagtctctatgcctgtggagctaaacgagccgctcaacaccctgcagcacctctgtgaggaaatggaatacagcgagctcctggacaaggcttcggaaactgatgatccatatgagcgcatggttctcgttgccgcatttgcagtttcaggatactgctccacctatttcagagcaggaagtaagccattcaacccagtccttggggagacttatgaatgcattagagaagacaagggattccgctttttctcagaacaggttagccatcatccacccatttctgcctgtcactgtgaatcaaagaattttgtgttttggcaagatatcagatggaaaaacaagttctgggggaagtcgatggaaatcctgcctgttggaacactgaatgtcatgcttccaaagtatggagattactatgtgtggaataaagtcaccacttgcatacacaacatcctcagtgggagaagatggatagaacattatggagaagtaaccatcagaaataccaaaagcagtgtttgcatttgcaaactcacatttgtcaaggtgaattattggaattctaacatgaatgaagtccagggggtggtgatagatcaggaggggaaggcggtgtaccggctgtttggaaagtggcatgaaggactctactgtggtgtggccccctctgcaaagtgcatttggagaccaggttccatgccaacaaactatgagctgtactatggcttcacaaggtttgctattgagctcaatgagttagatccagtactaaaagatctccttccaccaacagacgcccggttccggccagatcaaagatttttggaagaaggaaatttagaagctgcagcatcagagaagcaaagagtagaggaactccagagatctcggagacgatatatggaagaaaacaatcttgaacatataccaaaattttttaaaaaagttattgatgccaatcaaagagaagcctgggtttctaacgacacctactgggagcttcgaaaggaccctgggtttagcaaagtagacagccctgttctttggtagactgggaatgtagagctagccaacatatcacattctgaatgaataaataactatgcacaattatgtttcttatagctatgtgtggtttctgggtcaactgaaaacctaccatttgcttttctattcatctttataatggactttcagaagtgcattagacaaggcccctaaccactttgggatcctttctgttttgctgcaaccatattcctt

SEQ ID NO: 21348 - DNA, 1762 bp, Homo sapiens
  source 1..1762: mol_type = unassigned DNA
ctggaggcgcagcacggtcgccgccgccgctgtcggtgctggagatcgcggctcggtgcaggcggcgcccatgcctcctctcctccactagcccgcgcgccagtccgcctgccggggccggctctccgcctcctgcctcccgtcgcagccgcgcagccgccgcagagtccgcggcgccaccgctcgccctccaggttctgccacttgctgggaaaacagcaacagaaggatattaaggagccacccctataatttacccagatagccccagcaaggtcaaagacatatcatgtcccaaggagaaaagctgcaggcatctgaggataaatcactgtgaaacagctttgaccataaagctgacttggaagactttgactccaaggtgcaaggtggtttggacaccctcaatattgcctgctcttttctagtcaaacctgattcatgaaatggaatgaagctgaaaaatcatctacttctttgtttgtggatttgagagaagattgggatggtcttaagtgcataaaacgagactctaactgcagcgatgagttcagatgagaagggcatttcccctgctcataaaacatccactccaacccatagaagtgcctcctcttcaacatcctcccaaagggacagtaggcagagtattcacatactggagaggactgcttcctctagcaccgagccctctgtaagtcggcaattgctagaaccggagccagtccccctctccaaggaagctgacagctgggaaattatagaagggctgaaaataggccaaaccaatgtccagaaaccagacaaacatgagggctttatgctgaagaaaagaaaatggcctttaaaaggctggcacaagcgtttttttgtcctggataatggaatgttaaagtattcaaaggcaccactcgatattcagaaaggaaaggtccatgggagcatagatgtgggactctcagtcatgtcaattaaaaagaaagctcgaagaatagaccttgacaccgaagagcacatctatcatttgaaggtgaaatcccaggactggtttgatgcatgggtctccaaactgcgacatcatcggttgtatcgtcagaatgaaattgtgagatcaccaagagatgctagttttcacatatttccttcaacgtccacagctgaatcctcaccagctgctaatgtttctgtaatggatggaaagatgcaaccaaacagctttccgtggcagtcccctttaccatgcagcaatagcctccctgcaacgtgcacaactggccagagtaaagtggcagcctggttacaggactcggaagagatggacaggtgtgcagaagatcttgcacattgccagtcaaaccttgtggaacttagcaaactcctgcaaaatttggaaatacttcagagaactcagtcggcacctaactttactgacatgcaggctaactgtgtagatatttcaaagaaagacaagcgggtcacaagacgatggagaacaaaaagtgtcagcaaagatacaaaaatacaactgcaggttcctttcagtgctaccatgtcaccagttcgcttgcattcctccaaccccaacctttgtgcagatattgaatttcagactccccctcctaaccactttgggatcctttctgttttgctgcaaccatattccttaaaaaaaaaaaaaaaaaaaaaaaaaaaatccacaccgtccttggaaagcagaataaaaggagcagaatataaaatccaaagtctgaccagtttgtaa

SEQ ID NO: 21349 - DNA, 3637 bp, Homo sapiens
  source 1..3637: mol_type = unassigned DNA
ctggaggcgcagcacggtcgccgccgccgctgtcggtgctggagatcgcggctcggtgcaggcggcgcccatgcctcctctcctccactagcccgcgcgccagtccgcctgccggggccggctctccgcctcctgcctcccgtcgcagccgcgcagccgccgcagagtccgcggcgccaccgctcgccctccaggttctgccacttgctgggaaaacagcaacagaaggatattaaggagccacccctataatttacccagatagccccagcaaggtcaaagacatatcatgtcccaaggagaaaagctgcaggcatctgaggataaatcactgtgaaacagctttgaccataaagctgacttggaagactttgactccaaggtgcaaggtggtttggacaccctcaatattgcctgctcttttctagtcaaacctgattcatgaaatggaatgaagctgaaaaatcatctacttctttgtttgtggatttgagagaagattgggatggtcttaagtgcataaaacgagactctaactgcagcgatgagttcagatgagaagggcatttcccctgctcataaaacatccactccaacccatagaagtgcctcctcttcaacatcctcccaaagggacagtaggcagagtattcacatactggagaggactgcttcctctagcaccgagccctctgtaagtcggcaattgctagaaccggagccagtccccctctccaaggaagctgacagctgggaaattatagaagggctgaaaataggccaaaccaatgtccagaaaccagacaaacatgagggctttatgctgaagaaaagaaaatggcctttaaaaggctggcacaagcgtttttttgtcctggataatggaatgttaaagtattcaaaggcaccactcgatattcagaaaggaaaggtccatgggagcatagatgtgggactctcagtcatgtcaattaaaaagaaagctcgaagaatagaccttgacaccgaagagcacatctatcatttgaaggtgaaatcccaggactggtttgatgcatgggtctccaaactgcgacatcatcggttgtatcgtcagaatgaaattgtgagatcaccaagagatgctagttttcacatatttccttcaacgtccacagctgaatcctcaccagctgctaatgtttctgtaatggatggaaagatgcaaccaaacagctttccgtggcagtcccctttaccatgcagcaatagcctccctgcaacgtgcacaactggccagagtaaagtggcagcctggttacaggactcggaagagatggacaggtgtgcagaagatcttgcacattgccagtcaaaccttgtggaacttagcaaactcctgcaaaatttggaaatacttcagagaactcagtcggcacctaactttactgacatgcaggctaactgtgtagatatttcaaagaaagacaagcgggtcacaagacgatggagaacaaaaagtgtcagcaaagatacaaaaatacaactgcaggaagggccacccgcgaagggccagttcagcacaactcggcgccggcagaggctagcggcagcagtggctacaacagttcctttcagtgctaccatgtcaccagttcgcttgcattcctccaaccccaacctttgtgcagatattgaatttcagactccccctagccacctcactgaccctctggaaagttcaacagattatacaaagctgcaagaagaattttgtctaatcgcacagaaagtgcattctcttttgaagtctgcatttaatagcatagctatagagaaggagaagctgaagcagatggtttccgagcaggatcacagtaaaggccacagcacgcagatggcacggctccgacagtcactgtctcaggcactcaaccagaatgctgaactaaggagtcggttgaacagaatacattcagagtctattatttgtgatcaggttgtcagtgtaaatattattcctagccctgatgaggctggtgagcaaatccatgtcagtctccccttatcacagcaagtagccaatgagagccgcctctccatgtcagagtctgtttctgagttctttgatgcccaagaggtgctcctctctgcaagttcgtcagagaatgaggcttcagatgatgagtcttacatcagtgatgtgagtgataatatatctgaagacaacaccagtgttgcagacaatatttctcggcaaatcctgaatggggagcttacaggaggggccttccgaaatgggcgtcgagcatgcctgccagctccttgtcctgacaccagtaacattaacctgtggaatatcttgaggaacaacattggtaaagacctgtctaaagtctctatgcctgtggagctaaacgagccgctcaacaccctgcagcacctctgtgaggaaatggaatacagcgagctcctggacaaggcttcggaaactgatgatccatatgagcgcatggttctcgttgccgcatttgcagtttcaggatactgctccacctatttcagagcaggaagtaagccattcaacccagtccttggggagacttatgaatgcattagagaagacaagggattccgctttttctcagaacaggttagccatcatccacccatttctgcctgtcactgtgaatcaaagaattttgtgttttggcaagatatcagatggaaaaacaagttctgggggaagtcgatggaaatcctgcctgttggaacactgaatgtcatgcttccaaagtatggagattactatgtgtggaataaagtcaccacttgcatacacaacatcctcagtgggagaagatggatagaacattatggagaagtaaccatcagaaataccaaaagcagtgtttgcatttgcaaactcacatttgtcaaggtgaattattggaattctaacatgaatgaagtccagggggtggtgatagatcaggaggggaaggcggtgtaccggctgtttggaaagtggcatgaaggactctactgtggtgtggccccctctgcaaagtgcatttggagaccaggttccatgccaacaaactatgagctgtactatggcttcacaaggtttgctattgagctcaatgagttagatccagtactaaaagatctccttccaccaacagacgcccggttccggccagatcaaagatttttggaagaaggaaatttagaagctgcagcatcagagaagcaaagagtagaggaactccagagatctcggagacgatatatggaagaaaacaatcttgaacatataccaaaattttttaaaaaagttattgatgccaatcaaagagaagcctgggtttctaacgacacctactgggagcttcgaaaggaccctgggtttagcaaagtagacagccctgttctttggtagactgggaatgtagagctagccaacatatcacattctgaatgaataaataactatgcacaattatgtttcttatagctatgtgtggtttctgggtcaactgaaaacctaccatttgcttttctattcatctttataatggactttcagaagtgcattagacaaggcccctaaccactttgggatcctttctgttttgctgcaaccatattcctt

SEQ ID NO: 21350 - DNA, 3427 bp, Homo sapiens
  source 1..3427: mol_type = unassigned DNA
agatcgcggctcggtgcaggcggcgcccatgcctcctctcctccactagcccgcgcgccagtccgcctgccggggccggctctccgcctcctgcctcccgtcgcagccgcgcagccgccgcagagtccgcggcgccaccgctcgccctccaggttctgccacttgctgggaaaacagcaacagaaggatattaaggagccacccctataatttacccagatagccccagcaaggtcaaagacatatcatgtcccaaggagaaaagctgcaggcatctgaggataaatcactgtgaaacagctttgaccataaagctgacttggaagactttgactccaaggtgcaaggtggtttggacaccctcaatattgcctgctcttttctagtcaaacctgattcatgaaatggaatgaagctgaaaaatcatctacttctttgtttgtggatttgagagaagattgggatggtcttaagtgcataaaacgagactctaactgcagcgatgagttcagatgagaagggcatttcccctgctcataaaacatccactccaacccatagaagtgcctcctcttcaacatcctcccaaagggacagtaggcagagtattcacatactggagaggactgcttcctctagcaccgagccctctgtaagtcggcaattgctagaaccggagccagtccccctctccaaggaagctgacagctgggaaattatagaagggctgaaaataggccaaaccaatgtccagaaaccagacaaacatgagggctttatgctgaagaaaagaaaatggcctttaaaaggctggcacaagcgtttttttgtcctggataatggaatgttaaagtattcaaaggcaccactcgatattcagaaaggaaaggtccatgggagcatagatgtgggactctcagtcatgtcaattaaaaagaaagctcgaagaatagaccttgacaccgaagagcacatctatcatttgaaggtgaaatcccaggactggtttgatgcatgggtctccaaactgcgacatcatcggttgtatcgtcagaatgaaattgtgagatcaccaagagatgctagttttcacatatttccttcaacgtccacagctgaatcctcaccagctgctaatgtttctgtaatggatggaaagatgcaaccaaacagctttccgtggcagtcccctttaccatgcagcaatagcctccctgcaacgtgcacaactggccagagtaaagtggcagcctggttacaggactcggaagagatggacaggtgtgcagaagatcttgcacattgccagtcaaaccttgtggaacttagcaaactcctgcaaaatttggaaatacttcagagaactcagtcggcacctaactttactgacatgcaggttcctttcagtgctaccatgtcaccagttcgcttgcattcctccaaccccaacctttgtgcagatattgaatttcagactccccctagccacctcactgaccctctggaaagttcaacagattatacaaagctgcaagaagaattttgtctaatcgcacagaaagtgcattctcttttgaagtctgcatttaatagcatagctatagagaaggagaagctgaagcagatggtttccgagcaggatcacagtaaaggccacagcacgcagatggcacggctccgacagtcactgtctcaggcactcaaccagaatgctgaactaaggagtcggttgaacagaatacattcagagtctattatttgtgatcaggttgtcagtgtaaatattattcctagccctgatgaggctggtgagcaaatccatgtcagtctccccttatcacagcaagtagccaatgagagccgcctctccatgtcagagtctgtttctgagttctttgatgcccaagaggtgctcctctctgcaagttcgtcagagaatgaggcttcagatgatgagtcttacatcagtgatgtgagtgataatatatctgaagacaacaccagtgttgcagacaatatttctcggcaaatcctgaatggggagcttacaggaggggccttccgaaatgggcgtcgagcatgcctgccagctccttgtcctgacaccagtaacattaacctgtggaatatcttgaggaacaacattggtaaagacctgtctaaagtctctatgcctgtggagctaaacgagccgctcaacaccctgcagcacctctgtgaggaaatggaatacagcgagctcctggacaaggcttcggaaactgatgatccatatgagcgcatggttctcgttgccgcatttgcagtttcaggatactgctccacctatttcagagcaggaagtaagccattcaacccagtccttggggagacttatgaatgcattagagaagacaagggattccgctttttctcagaacaggttagccatcatccacccatttctgcctgtcactgtgaatcaaagaattttgtgttttggcaagatatcagatggaaaaacaagttctgggggaagtcgatggaaatcctgcctgttggaacactgaatgtcatgcttccaaagtatggagattactatgtgtggaataaagtcaccacttgcatacacaacatcctcagtgggagaagatggatagaacattatggagaagtaaccatcagaaataccaaaagcagtgtttgcatttgcaaactcacatttgtcaaggtgaattattggaattctaacatgaatgaagtccagggggtggtgatagatcaggaggggaaggcggtgtaccggctgtttggaaagtggcatgaaggactctactgtggtgtggccccctctgcaaagtgcatttggagaccaggttccatgccaacaaactatgagctgtactatggcttcacaaggtttgctattgagctcaatgagttagatccagtactaaaagatctccttccaccaacagacgcccggttccggccagatcaaagatttttggaagaaggaaatttagaagctgcagcatcagagaagcaaagagtagaggaactccagagatctcggagacgatatatggaagaaaacaatcttgaacatataccaaaattttttaaaaaagttattgatgccaatcaaagagaagcctgggtttctaacgacacctactgggagcttcgaaaggaccctgggtttagcaaagtagacagccctgttctttggtagactgggaatgtagagctagccaacatatcacattctgaatgaataaataactatgcacaattatgtttcttatagctatgtgtggtttctgggtcaactgaaaacctaccatttgcttttctattcatctttataatggactttcagaagtgcattagacaaggcccctaaccactttgggatcctttctgttttgctgcaaccatattcctt

SEQ ID NO: 21351 - DNA, 3656 bp, Homo sapiens
  source 1..3656: mol_type = unassigned DNA
gcagcagctgctgccactgctcagcgcggtgaggagggagccggtgactcggagacggtgactcagaggcagagcggcgcaagggccaaggagtactggcgtccatggaccctggggaccccgtcaggagcaggtgacatccttccccttccaccctgctccctgctctacatccccagcagggagtggcctctcccttctccatggacttccaagagagggacccgcccttcctgcctgagagcgctcagtcctcaaagcccagcagtgctcagcaggcctctgagctgtgggaggtggtggaggagcctcgggtcaggctggggacagagggtgtcatgcctgagaggcaggaaggtcacctgctcaagaagaggaagtggcctctgaagggctggcacaagagatactttgtgctcgaggacgggatccttcattatgcaacaacccggcaagacatcaccaaggggaagctccatggctccatcgatgtccggctgtcggtcatgtccatcaacaaaaaggcccagcgcattgaccttgacactgaagacaacatctaccacctcaagatcaaatcccaggacctattccagagctgggtggcgcagctgcgtgcccaccgcctagcccaccgcctggacatgccccgtggctcactgcccagtactgctcaccggaaggttcctggtgcccagcttccaacagcagctactgcctcagccctacctgggcttggaccgcgggagaaagtgtcttcctggctgagggacagtgatgggctggaccgctgctctcatgagctctctgagtgtcaggggaagctccaggaactacacaggctcctccagagcctggagtccctgcaccgaatcccctcagcccctgttatccccacacaccaggcctcagtgacaaccgaaagacccaagaaggggaaacggacaagccgcatgtggtgcacccagagctttgccaaggatgacaccattggacgggttggtcgtctccatggctctgttcccaacctgtctcgctacctggagtctcgggactcctcgggcacccgtgggctgccacccacagactatgcccacctgcagcgcagcttctgggccctggcccagaaggtgcacagctccctcagcagcgtcctggccgccctcaccatggaacgggaccaactgagggacatgcaccagggctcagagttgtcaagaatgggggtctctgaggcctccactggccagaggcgcctccactcactgtccacctcctccgacaccacggcggactctttcagctccctcaaccctgaggagcaagaagctctgtacatgaaggggcgcgagctcaccccccagctatcgcagaccagcatcctgtcccttgctgattcccacacggagttcttcgatgcctgcgaggttctcctctccgccagctcttctgagaatgagggctcagaggaggaggagtcctgtaccagtgaaatcaccaccagcctgtctgaggagatgctggacctcaggggagctgagcgctgtcagaaaggggggtgtgttccagggagacccatggggccaccccgccgtcgctgcctgccggcggccagcgggcctggggctgacgtgagcctgtggaacattctgcgcaacaacatcggcaaagacctgtccaaggtgtcaatgcctgtgcagctcaacgagccgctcaacactctgcagcggctctgcgaggagctggagtacagcagcctcctggaccaggccagccgcatcgccgacccctgcgagcgcatggtgtacatcgcagcctttgctgtctcggcctactcctccacataccaccgagccggctgcaagcccttcaaccctgtcctgggggagacctacgagtgtgagcggcctgaccgaggcttccgcttcatcagtgagcaggtctcccaccacccccctatctcggcctgccatgcagagtctgagaacttcgccttctggcaagatatgaagtggaagaacaagttctggggcaaatccctggagattgtgcctgtgggaacagtcaacgtcagcctgcccaggtttggggaccactttgagtggaacaaggtgacatcctgcattcacaatgtcctgagtggtcagcgctggatcgagcactatggggaggtgctcatccgaaacacacaggacagctcctgccactgcaagatcaccttctgcaaggccaagtactggagttccaatgtccacgaggtgcagggcgctgtgctcagtcggagtggccgtgtcctccaccgactctttgggaagtggcacgaggggctgtaccggggacccacgccaggtggccagtgcatctggaaacccaactcaatgccccccgaccatgagcgaaacttcggcttcacccagtttgccttggagctgaatgagctgacagcagagctgaaacggtcgctgccttccaccgacacgagactccggccagaccagaggtacctggaggaggggaacatacaggccgctgaggcccagaagagaaggatcgagcagctgcagcgagacaggcgcaaagtcatggaggaaaacaacatcgtacaccaggctcgcttcttcaggcggcagacggatagcagcgggaaagagtggtgggtgaccaacaatacctactggaggctgcgggccgagccaggctatgggaacatggatggggccgtgctctggtagccctggccccgggggcaggaggctctggttcctcactcctcctgcctccaccccctaccatggacacatgggtgaggccgggctccccgcctcactgcccttgagaccaaaggggcagccctggccctccctcccctctgctggccagagggtctgcatctcagcccacccccaaccccaccgtttggggtgagaagcagaatctgtgcttccccagtctccttgccccagacaaccagcatgtaagacccttcccgcttcaccattccgattcctgtcccctttggggtacttgggggagactctggctcccaggatctgttccctatttcagtgccttcctaggacacaggggactccttgacgctccccaggctttctgtgcccaggcctctgtccccagcggtgaggttgcagtgagtgaaggagaggaggtgatctgttctccctccccttctgcccatctccagcatcttcttccccttccctggccctgcagggccttctccagctccctttggttagtccctggccatccctcctgtcctggatcccttctccctaactgcaaaatgcctgcagcttccagctccttcgtccctgatcctcaagcggttccctcccgtctcagctcagcggatcccccagagtggaggaggcctctccatgaggaggggagcagcccaaggcacctgtcctctgacccaccggcagcgagtgcgcaggtgtgagtgtaagttcatgtaggagagtgtatgcgtgtgcgcctgtgccctgcttgcaggcaagcagggctccctcatgtagccccgccttccccctgctgggggtccaccacatcgctgctctttctcacagtctgcctctgatgagggcgaattgctatgacattccaagctccaataaagactgtcccagactttg

SEQ ID NO: 21352 - DNA, 3349 bp, Homo sapiens
  source 1..3349: mol_type = unassigned DNA
ggggagatccggctagaggggaggctctgacatctccttccttcctggttcctgcagcagctgctgccactgctcagcgcggtgaggagggagccggtgactcggagacggtgactcagaggcagagcggcgcaagggccaaggagtactggcgtccatggaccctggggaccccgtcaggagcaggtgacatccttccccttccaccctgctccctgctctacatccccagcagggagtggcctctcccttctccatggacttccaagagagggacccgcccttcctgcctgagagcgctcagtcctcaaagcccagcagtgctcagcaggcctctgagctgtgggaggtggtggaggagcctcgggtcaggctggggacagagggtgtcatgcctgagaggcaggaaggtcacctgctcaagaagaggaagtggcctctgaagggctggcacaagagatactttgtgctcgaggacgggatccttcattatgcaacaacccggcaagacatcaccaaggggaagctccatggctccatcgatgtccggctgtcggtcatgtccatcaacaaaaaggcccagcgcattgaccttgacactgaagacaacatctaccacctcaagatcaaatcccaggacctattccagagctgggtggcgcagctgcgtgcccaccgcctagcccaccgcctggacatgccccgtggctcactgcccagtactgctcaccggaaggttcctggtgcccagcttccaacagcagctactgcctcagccctacctgggcttggaccgcgggagaaagtgtcttcctggctgagggacagtgatgggctggaccgctgctctcatgagctctctgagtgtcaggggaagctccaggaactacacaggctcctccagagcctggagtccctgcaccgaatcccctcagcccctgttatccccacacaccaggcctcagtgacaaccgaaagacccaagaaggggaaacggacaagccgcatgtggtgcacccagagctttgccaaggatgacaccattggacgggttggtcgtctccatggctctgttcccaacctgtctcgctacctggagtctcgggactcctcgggcacccgtgggctgccacccacagactatgcccacctgcagcgcagcttctgggccctggcccagaaggtgcacagctccctcagcagcgtcctggccgccctcaccatggaacgggaccaactgagggacatgcaccagggctcagagttgtcaagaatgggggtctctgaggcctccactggccagaggcgcctccactcactgtccacctcctccgacaccacggcggactctttcagctccctcaaccctgaggagcaagaagctctgtacatgaaggggcgcgagctcaccccccagctatcgcagaccagcatcctgtcccttgctgattcccacacggagttcttcgatgcctgcgaggttctcctctccgccagctcttctgagaatgagggctcagaggaggaggagtcctgtaccagtgaaatcaccaccagcctgtctgaggagatgctggacctcaggggagctgagcgctgtcagaaaggggggtgtgttccagggagacccatggggccaccccgccgtcgctgcctgccggcggccagcgggcctggggctgacgtgagcctgtggaacattctgcgcaacaacatcggcaaagacctgtccaaggtgtcaatgcctgtgcagctcaacgagccgctcaacactctgcagcggctctgcgaggagctggagtacagcagcctcctggaccaggccagccgcatcgccgacccctgcgagcgcatggtgtacatcgcagcctttgctgtctcggcctactcctccacataccaccgagccggctgcaagcccttcaaccctgtcctgggggagacctacgagtgtgagcggcctgaccgaggcttccgcttcatcagtgagcaggtctcccaccacccccctatctcggcctgccatgcagagtctgagaacttcgccttctggcaagatatgaagtggaagaacaagttctggggcaaatccctggagattgtgcctgtgggaacagtcaacgtcagcctgcccaggtttggggaccactttgagtggaacaaggtgacatcctgcattcacaatgtcctgagtggtcagcgctggatcgagcactatggggaggtgctcatccgaaacacacaggacagctcctgccactgcaagatcaccttctgcaaggccaagtactggagttccaatgtccacgaggtgcagggcgctgtgctcagtcggagtggccgtgtcctccaccgactctttgggaagtggcacgaggggctgtaccggggacccacgccaggtggccagtgcatctggaaacccaactcaatgccccccgaccatgagcgaaacttcggcttcacccagtttgccttggagctgaatgagctgacagcagagctgaaacggtcgctgccttccaccgacacgagactccggccagaccagaggtacctggaggaggggaacatacaggccgctgaggcccagaagagaaggatcgagcagctgcagcgagacaggcgcaaagtcatggaggaaaacaacatcgtacaccaggctcgcttcttcaggcggcagacggatagcagcgggaaagagtggtgggtgaccaacaatacctactggaggctgcgggccgagccaggctatgggaacatggatggggccgtgctctggtagccctggccccgggggcaggaggctctggttcctcactcctcctgcctccaccccctaccatggacacatgggtgaggccgggctccccgcctcactgcccttctgcccatctccagcatcttcttccccttccctggccctgcagggccttctccagctccctttggttagtccctggccatccctcctgtcctggatcccttctccctaactgcaaaatgcctgcagcttccagctccttcgtccctgatcctcaagcggttccctcccgtctcagctcagcggatcccccagagtggaggaggcctctccatgaggaggggagcagcccaaggcacctgtcctctgacccaccggcagcgagtgcgcaggtgtgagtgtaagttcatgtaggagagtgtatgcgtgtgcgcctgtgccctgcttgcaggcaagcagggctccctcatgtagccccgccttccccctgctgggggtccaccacatcgctgctctttctcacagtctgcctctgatgagggcgaattgctatgacattccaagctccaataaagactgtcccag

SEQ ID NO: 21353 - DNA, 7239 bp, Homo sapiens
  source 1..7239: mol_type = unassigned DNA
cactagaatgtgaaggatcttcgcggttctgggtgcccagaaaggcggcgacgcggcggatgacaacattaggccgcgacgcgctcctggccaggcggcggctgtagtgttagctttggacgccgcagtagccgctgccggtagcaagccgactgagggaaggtgggggtccgcccgggctggtggacctcggggccgaaagttcccgccccgctcgggggctgagccggcagtgcctccgcggccgctgggcagcgcccttcgtccaggctcgcgccccagctgccgccgacgacagcggccgagagaagttggggtctgactagacgcttacggggcctcggaccccggcgccgcggcgacctcggaggaaccggctccttgcgtcccgcctccctgggagctccgcacgggatttgcagatttacagaatggctgcacattaatggaaagagaagcataaacctatcttctttcattatggagggaggtttggcagatggagaacctgatcgaacttcgcttcttggtgatagcaaagatgtccttgggccatcaactgttgtagcaaacagtgacgaatctcagcttctgacaccaggaaagatgagtcagcgccaaggaaaagaagcttatccaacgccaaccaaagatttgcatcagccatctcttagtccagcaagtcctcatagccagggttttgaaagagggaaggaagatatttctcaaaataaagatgaatcttcactttctatgtcaaagagcaagtctgaatctaaactttataatggctcagagaaggacagttcaacttcaagcaaactcacaaaaaaagaatctcttaaggtacaaaagaaaaattaccgagaagaaaagaaaagagccacaaaggagctgctcagtacaatcacagatccttctgttattgttatggctgattggttaaagattcgtggtactctaaagagctggaccaagttatggtgtgtgttgaaacctggggtgctactgatctataaaacccaaaaaaatggtcagtgggtaggaacagttcttctgaatgcctgtgaaatcattgaacgtccatcaaaaaaggatggcttttgtttcaaacttttccatcctttggagcaatctatttgggcagtgaagggtccaaaaggtgaagcggttggatccattactcaacccttacctagcagttatttgatcatccgagctacttcagagtcagatggaaggtgctggatggatgctttggagttggctttgaaatgttctagtcttcttaaacgtacaatgatcagagaaggaaaggaacatgacctgagcgtttcatcagatagcacacatgtgactttctatggcttactacgtgctaacaatctccacagtggtgataacttccagttaaatgatagtgaaattgaacgacaacattttaaggaccaagatatgtattctgataaatctgataaagaaaatgatcaagaacatgatgagtctgataatgaggtgatggggaaaagtgaagaaagtgacacagatacatcagaaagacaagatgactcatatatcgaacctgagcctgttgagcctttaaaggagactacctacactgaacagagccatgaagaacttggagaggcaggtgaggcttctcaaacagaaactgtatctgaagaaaacaaaagccttatctggacactattgaaacaagtccgtcctggcatggacctatccaaggtggttctgcctacatttattttggaaccccgttctttcctggataaactttcagattactactatcatgcagatttcctatctgaggcagctcttgaagaaaatccttatttccgtttgaagaaagtagtgaaatggtatttgtcaggattctataaaaagccaaagggactgaagaaaccttataatcctatacttggcgagactttccgttgtttatggattcatcccagaacaaacagcaaaactttttatattgctgaacaggtgtcccatcatccaccaatatctgccttttatgttagtaatcgaaaagatggattttgccttagcggtagtatcctggctaagtctaagttttatggaaactcattatctgcaatattagagggagaagcacggttaactttcttgaatagaggtgaagattatgtaatgacaatgccatacgctcattgtaaaggaattctttatggtacaatgacactggagcttggtggaacagtcaatattacatgtcaaaaaactggatacagtgcaatacttgaatttaaactaaagccattcctagggagtagtgactgtgttaatcaaatatcagggaaacttaaactgggaaaagaagtcctagctactttggaaggtcattgggatagtgaagtttttattactgataaaaagactgataattcagaggttttctggaatccaacacctgacattaagcaatggagattaataaggcacactgtaaaatttgaagaacagggagattttgaatcagagaaactctggcaacgggtaactcgagccataaatgccaaagaccaaactgaagctacccaagagaagtatgttttggaagaagctcaaagacaagctgccagggatcggaaaacaaaaaatgaagagtggtcttgcaaattatttgaacttgatccactcacaggagaatggcattacaagtttgcagatacccgaccatgggacccacttaatgatatgatacagtttgaaaaagatggtgttattcagaccaaagtgaaacatcgtactccaatggttagcgtccccaaaatgaaacataagccaaccaggcaacagaagaaagtagcaaaaggctattcctccccagaacctgacattcaagactcctctggaagtgaagctcaatcagtaaaaccaagtacaagaagaaagaaaggaatagaactgggagacattcagagttccatcgaatctataaaacaaacacaggaagaaattaaaagaaatattatggctcttcgaaatcatttagtttcaagcacaccggccacggattattttctgcaacaaaaagactacttcatcattttcctcctgattttgcttcaagtcataataaacttcatgttcaagtagaagttctctaccattgaatcagtgaactagaaagatctgatttggcctgggaccagtgttcaagttggtttggtctttattaaaaatcacaatattccgaaaacaaaaaaacctaggagataaatgtagaggtattgacttttcgtatcttttatcttcacactgaaacaagagctatcctatttgattattaaagtgagctatgtgttaagtgccaggacatttctagcttttgtgagaatgtgtctacatatgagtataataaacccacatgtatacacaattgtctcttatgtactcctacctgacagtagtctttgtattctatagtatgttctgagatataatgttaacattgttcataacaaaaaatgctatcaatcttataaatatatgtaatctattttcttcataaaacaggcacaaaagttttatcagtaaggaattacagattgagaaatgatggaataatagacataattaattcaatacactactgttaaaatcatttgcaaagcactcagctcaattatcttcttagaaagaaagaaaaagtatgaatggtcaaaatgaatacatcgagagagataaatggcaaattgcttttttaaaagtttacataagttttttttaacccctagaatttaatatttgtagatgcaggtaaatatatatacttacgtgtatatcagtataaaaacactggtgtgcaattaattggattgattataataccaccttaagcacttgctgaaaaaagtgtggtcaaaattgattgctgtccttttgtcttatttttgtttttcttaagtcagctggttcataacataggccaaattctagagatgtttatagagcatttgaagtgctgataatttatgttttttcattatgaaaacttattttagctttagactccagtgtgttcagtgaataagtagaatataaaaaaatataaccagtattttacttcaaaagccaaaaagaggcaataagaaaagacactttgtggtggcctttatgtgtgcattaaaattggtttctgtaaaacgtgtaataagttgagtatctacgaagagtatcaagttctgaagtttaatttttttattatcctcctctcttcttagtaacttctttctgtggcaaaaccacaattctttaagattcctattgttcaggctaaggcaaatttttttgtttgtttcttcagtttaatattttgattttgtgtttttacgtaaatatttatattccttgaaagcaatttttgccaaggtagttcagtttaggaatatgttgttctaaaatatgtcttagaatcctgaaagcatagattttgaaatgtttttttaatgaaaatgaaggtcagagagaataattgccctgaccacatttgcctttcagtaggaggaggctgtgaaatagtaaaattataatcgtttatgccatgataaatacaagattggtaaataaatacattgattggtaaattatgagaatcaaaatgataaaaagagcctgcttttttccctaaccaatatagctatcttaagtatccttaggtttctgtgaagaaccatttcccatgttttcttggcaaaataatgctgtattccatatgtacatgtgaaatgatgttttaaattgataaaagcttaaataagatctacctatacccagtattttcatgatattagaacaaatgggtttttggttatattttatatttgtcaatataatttttgtattcacattctgttacactctgcctattcattgatatatgatattctgtaaatattgtacaatttgatcttttttatggtttaaattagttaattacatacaaattgattggcttatcacaaaaatcatttcatcagtaaaccttgttaacattttgtactggtgacccacctcttaggactttggtcttatccacgtgtatgttgttttcatttggtccaaataatattttatttgtatgggtatcttctaagactaaataggtagttgtgttctttatttttaaaatttctttttagagcaaatgttatgggttcttacccaaagagtcaaaaactatttcttaagaaagagcagagttattcatgactgttctttatacactaaaagcatgcatctaatctaatagtcctcttattatgcttttagttgtatgagtctctttctatgaactgaacacaaaactcaggaattggtggcttaattttagatcagtgcttgtactaggcttagttatatgaatctttataacacataattactaactttgtagccatatatgtaattgactttgaatgttatttacctgaaattaatcttccttcacacatggaccgtaaacggttcccagttgtctgagagcctcatgagggtttctaggatttatgaccttatgaccagtttttttcatttaccaagattttattttcctacatgaaaatttaattgagtaataattattcacatgtgcattttctttttagctgttaaatgtactatgccatcatccaccatttagtaaaatgtagctggcccaggacatgtaaaaaaaaaaaaaaaacaacaacaataaatagggcatgtgaaatgttaagttacagcaatagatattttatttgtatttcatgttagtacttttttgttttatatcacttataaaggtacagtgtactctttgtcacagctcagttggtaaccgcattccattgaaaagttggccttgtaaaatacaactctcatttaatattcatgcttttgtgcctttaagaaaatattttttgtcattttttgtgttacagaactataatgtgattcaaggtgtttataggcttgtcataaaagggtcatttctgtgtgttactttctttttatatagctatagtatatttaaacaataatactatcttttataggggtttgtctatttacctattctttactcagacattgatgtagacttgtcagattattctgagtattgttaacagtgccttttcgatggaatcacactttttggctgtcaccttgtgccatatacacacaaaattttgtggaaggcagttttaactttctgaagaatatctgtcaaaatttaagaaaacaaatgtataaaattccattttttccagtgtttagcatttctagtaagcagtgaggttgtttgacatacagtgatgatggcattattgataagccatacatgagactgcagattatattgaatcatattaaatgtacagaaataaaatattagatttatatcaaattttccaatttgaaccagtggggaaaatcccacagaaatcagtaagtttacatttcaatttctatcttatttgactaagtggaaagagattctttaaaatgtataacctgccattatgtaatttggtttcattttattctacctgttgtgtgagtttagtatatttaatttactttttgttactctttacatactgtttatttttgttagtttttaattgaagatggactgttgaaattgtataggaccagtgtcttattaatatgattaatatatttagaagagccacgtgaaacccatgacaaaatgaatgtgaatattctttctaaaaatttagaaaatgttatctttttgcatttattatgtaaaactgttttacagtatcaaaatttttcacttaaagaaaaaaaatgccatgaaacatttgaactgatgagccacagaacttcagttgaaatttttttcactttttagcatgctaaatatacatctgagtttaaatgttctgtttaatggccattcataaattcaagcactaccactggtcagttttgtgtgatagaataaaaatatgttacctgcagtgtaagtacagcacactgtcaaattcttttccttaaggtgcacagtaaatgtacagatagttataggccactgttttgtaatgtagtacatttctaatctattattcctaacctattataactgtttgcagaaagaaaagaatttttctaataatctgtaaaattatgctaacttctacaagtaggcttctaaataaaatttttaaaaagagc

SEQ ID NO: 21354 - DNA, 7047 bp, Homo sapiens
  source 1..7047: mol_type = unassigned DNA
cgccccagctgccgccgacgacagcggccgagagaagttggggtctgactagacgcttacggggcctcggaccccggcgccgcggcgacctcggaggaaccggctccttgcgtcccgcctccctgggagctccgcacggcaatctccattggtgctactgcgtttaaagaactgtggctaacctccaagagactgaagctggtaattaaacattcctatccttgcctgaagcagtcttttgcaggaacatttgaggatttgcagatttacagaatggctgcacattaatggaaagagaagcataaacctatcttctttcattatggagggaggtttggcagatggagaacctgatcgaacttcgctgttgtagcaaacagtgacgaatctcagcttctgacaccaggaaagatgagtcagcgccaaggaaaagaagcttatccaacgccaaccaaagatttgcatcagccatctcttagtccagcaagtcctcatagccagggttttgaaagagggaaggaagatatttctcaaaataaagatgaatcttcactttctatgtcaaagagcaagtctgaatctaaactttataatggctcagagaaggacagttcaacttcaagcaaactcacaaaaaaagaatctcttaaggtacaaaagaaaaattaccgagaagaaaagaaaagagccacaaaggagctgctcagtacaatcacagatccttctgttattgttatggctgattggttaaagattcgtggtactctaaagagctggaccaagttatggtgtgtgttgaaacctggggtgctactgatctataaaacccaaaaaaatggtcagtgggtaggaacagttcttctgaatgcctgtgaaatcattgaacgtccatcaaaaaaggatggcttttgtttcaaacttttccatcctttggagcaatctatttgggcagtgaagggtccaaaaggtgaagcggttggatccattactcaacccttacctagcagttatttgatcatccgagctacttcagagtcagatggaaggtgctggatggatgctttggagttggctttgaaatgttctagtcttcttaaacgtacaatgatcagagaaggaaaggaacatgacctgagcgtttcatcagatagcacacatgtgactttctatggcttactacgtgctaacaatctccacagtggtgataacttccagttaaatgatagtgaaattgaacgacaacattttaaggaccaagatatgtattctgataaatctgataaagaaaatgatcaagaacatgatgagtctgataatgaggtgatggggaaaagtgaagaaagtgacacagatacatcagaaagacaagatgactcatatatcgaacctgagcctgttgagcctttaaaggagactacctacactgaacagagccatgaagaacttggagaggcaggtgaggcttctcaaacagaaactgtatctgaagaaaacaaaagccttatctggacactattgaaacaagtccgtcctggcatggacctatccaaggtggttctgcctacatttattttggaaccccgttctttcctggataaactttcagattactactatcatgcagatttcctatctgaggcagctcttgaagaaaatccttatttccgtttgaagaaagtagtgaaatggtatttgtcaggattctataaaaagccaaagggactgaagaaaccttataatcctatacttggcgagactttccgttgtttatggattcatcccagaacaaacagcaaaactttttatattgctgaacaggtgtcccatcatccaccaatatctgccttttatgttagtaatcgaaaagatggattttgccttagcggtagtatcctggctaagtctaagttttatggaaactcattatctgcaatattagagggagaagcacggttaactttcttgaatagaggtgaagattatgtaatgacaatgccatacgctcattgtaaaggaattctttatggtacaatgacactggagcttggtggaacagtcaatattacatgtcaaaaaactggatacagtgcaatacttgaatttaaactaaagccattcctagggagtagtgactgtgttaatcaaatatcagggaaacttaaactgggaaaagaagtcctagctactttggaaggtcattgggatagtgaagtttttattactgataaaaagactgataattcagaggttttctggaatccaacacctgacattaagcaatggagattaataaggcacactgtaaaatttgaagaacagggagattttgaatcagagaaactctggcaacgggtaactcgagccataaatgccaaagaccaaactgaagctacccaagagaagtatgttttggaagaagctcaaagacaagctgccagggatcggaaaacaaaaaatgaagagtggtcttgcaaattatttgaacttgatccactcacaggagaatggcattacaagtttgcagatacccgaccatgggacccacttaatgatatgatacagtttgaaaaagatggtgttattcagaccaaagtgaaacatcgtactccaatggttagcgtccccaaaatgaaacataagccaaccaggcaacagaagaaagtagcaaaaggctattcctccccagaacctgacattcaagactcctctggaagtgaagctcaatcagtaaaaccaagtacaagaagaaagaaaggaatagaactgggagacattcagagttccatcgaatctataaaacaaacacaggaagaaattaaaagaaatattatggctcttcgaaatcatttagtttcaagcacaccggccacggattattttctgcaacaaaaagactacttcatcattttcctcctgattttgcttcaagtcataataaacttcatgttcaagtagaagttctctaccattgaatcagtgaactagaaagatctgatttggcctgggaccagtgttcaagttggtttggtctttattaaaaatcacaatattccgaaaacaaaaaaacctaggagataaatgtagaggtattgacttttcgtatcttttatcttcacactgaaacaagagctatcctatttgattattaaagtgagctatgtgttaagtgccaggacatttctagcttttgtgagaatgtgtctacatatgagtataataaacccacatgtatacacaattgtctcttatgtactcctacctgacagtagtctttgtattctatagtatgttctgagatataatgttaacattgttcataacaaaaaatgctatcaatcttataaatatatgtaatctattttcttcataaaacaggcacaaaagttttatcagtaaggaattacagattgagaaatgatggaataatagacataattaattcaatacactactgttaaaatcatttgcaaagcactcagctcaattatcttcttagaaagaaagaaaaagtatgaatggtcaaaatgaatacatcgagagagataaatggcaaattgcttttttaaaagtttacataagttttttttaacccctagaatttaatatttgtagatgcaggtaaatatatatacttacgtgtatatcagtataaaaacactggtgtgcaattaattggattgattataataccaccttaagcacttgctgaaaaaagtgtggtcaaaattgattgctgtccttttgtcttatttttgtttttcttaagtcagctggttcataacataggccaaattctagagatgtttatagagcatttgaagtgctgataatttatgttttttcattatgaaaacttattttagctttagactccagtgtgttcagtgaataagtagaatataaaaaaatataaccagtattttacttcaaaagccaaaaagaggcaataagaaaagacactttgtggtggcctttatgtgtgcattaaaattggtttctgtaaaacgtgtaataagttgagtatctacgaagagtatcaagttctgaagtttaatttttttattatcctcctctcttcttagtaacttctttctgtggcaaaaccacaattctttaagattcctattgttcaggctaaggcaaatttttttgtttgtttcttcagtttaatattttgattttgtgtttttacgtaaatatttatattccttgaaagcaatttttgccaaggtagttcagtttaggaatatgttgttctaaaatatgtcttagaatcctgaaagcatagattttgaaatgtttttttaatgaaaatgaaggtcagagagaataattgccctgaccacatttgcctttcagtaggaggaggctgtgaaatagtaaaattataatcgtttatgccatgataaatacaagattggtaaataaatacattgattggtaaattatgagaatcaaaatgataaaaagagcctgcttttttccctaaccaatatagctatcttaagtatccttaggtttctgtgaagaaccatttcccatgttttcttggcaaaataatgctgtattccatatgtacatgtgaaatgatgttttaaattgataaaagcttaaataagatctacctatacccagtattttcatgatattagaacaaatgggtttttggttatattttatatttgtcaatataatttttgtattcacattctgttacactctgcctattcattgatatatgatattctgtaaatattgtacaatttgatcttttttatggtttaaattagttaattacatacaaattgattggcttatcacaaaaatcatttcatcagtaaaccttgttaacattttgtactggtgacccacctcttaggactttggtcttatccacgtgtatgttgttttcatttggtccaaataatattttatttgtatgggtatcttctaagactaaataggtagttgtgttctttatttttaaaatttctttttagagcaaatgttatgggttcttacccaaagagtcaaaaactatttcttaagaaagagcagagttattcatgactgttctttatacactaaaagcatgcatctaatctaatagtcctcttattatgcttttagttgtatgagtctctttctatgaactgaacacaaaactcaggaattggtggcttaattttagatcagtgcttgtactaggcttagttatatgaatctttataacacataattactaactttgtagccatatatgtaattgactttgaatgttatttacctgaaattaatcttccttcacacatggaccgtaaacggttcccagttgtctgagagcctcatgagggtttctaggatttatgaccttatgaccagtttttttcatttaccaagattttattttcctacatgaaaatttaattgagtaataattattcacatgtgcattttctttttagctgttaaatgtactatgccatcatccaccatttagtaaaatgtagctggcccaggacatgtaaaaaaaaaaaaaaaacaacaacaataaatagggcatgtgaaatgttaagttacagcaatagatattttatttgtatttcatgttagtacttttttgttttatatcacttataaaggtacagtgtactctttgtcacagctcagttggtaaccgcattccattgaaaagttggccttgtaaaatacaactctcatttaatattcatgcttttgtgcctttaagaaaatattttttgtcattttttgtgttacagaactataatgtgattcaaggtgtttataggcttgtcataaaagggtcatttctgtgtgttactttctttttatatagctatagtatatttaaacaataatactatcttttataggggtttgtctatttacctattctttactcagacattgatgtagacttgtcagattattctgagtattgttaacagtgccttttcgatggaatcacactttttggctgtcaccttgtgccatatacacacaaaattttgtggaaggcagttttaactttctgaagaatatctgtcaaaatttaagaaaacaaatgtataaaattccattttttccagtgtttagcatttctagtaagcagtgaggttgtttgacatacagtgatgatggcattattgataagccatacatgagactgcagattatattgaatcatattaaatgtacagaaataaaatattagatttatatcaaattttccaatttgaaccagtggggaaaatcccacagaaatcagtaagtttacatttcaatttctatcttatttgactaagtggaaagagattctttaaaatgtataacctgccattatgtaatttggtttcattttattctacctgttgtgtgagtttagtatatttaatttactttttgttactctttacatactgtttatttttgttagtttttaattgaagatggactgttgaaattgtataggaccagtgtcttattaatatgattaatatatttagaagagccacgtgaaacccatgacaaaatgaatgtgaatattctttctaaaaatttagaaaatgttatctttttgcatttattatgtaaaactgttttacagtatcaaaatttttcacttaaagaaaaaaaatgccatgaaacatttgaactgatgagccacagaacttcagttgaaatttttttcactttttagcatgctaaatatacatctgagtttaaatgttctgtttaatggccattcataaattcaagcactaccactggtcagttttgtgtgatagaataaaaatatgttacctgcagtgtaagtacagcacactgtcaaattcttttccttaaggtgcacagtaaatgtacagatagttataggccactgttttgtaatgtagtacatttctaatctattattcctaacctattataactgtttgcagaaagaaaagaatttttctaataatctgtaaaattatgctaacttctacaagtaggcttctaaataaaatttttaaaaagagcaaa

SEQ ID NO: 21355 - DNA, 3157 bp, Homo sapiens
  source 1..3157: mol_type = unassigned DNA
cactagaatgtgaaggatcttcgcggttctgggtgcccagaaaggcggcgacgcggcggatgacaacattaggccgcgacgcgctcctggccaggcggcggctgtagtgttagctttggacgccgcagtagccgctgccggtagcaagccgactgagggaaggtgggggtccgcccgggctggtggacctcggggccgaaagttcccgccccgctcgggggctgagccggcagtgcctccgcggccgctgggcagcgcccttcgtccaggctcgcgccccagctgccgccgacgacagcggccgagagaagttggggtctgactagacgcttacggggcctcggaccccggcgccgcggcgacctcggaggaaccggctccttgcgtcccgcctccctgggagctccgcacgggatttgcagatttacagaatggctgcacattaatggaaagagaagcataaacctatcttctttcattatggagggaggtttggcagatggagaacctgatcgaacttcgcaaacagtgacgaatctcagcttctgacaccaggaaagatgagtcagcgccaaggaaaagaagcttatccaacgccaaccaaagatttgcatcagccatctcttagtccagcaagtcctcatagccagggttttgaaagagggaaggaagatatttctcaaaataaagatgaatcttcactttctatgtcaaagagcaagtctgaatctaaactttataatggctcagagaaggacagttcaacttcaagcaaactcacaaaaaaagaatctcttaaggtacaaaagaaaaattaccgagaagaaaagaaaagagccacaaaggagctgctcagtacaatcacagatccttctgttattgttatggctgattggttaaagattcgtggtactctaaagagctggaccaagttatggtgtgtgttgaaacctggggtgctactgatctataaaacccaaaaaaatggtcagtgggtaggaacagttcttctgaatgcctgtgaaatcattgaacgtccatcaaaaaaggatggcttttgtttcaaacttttccatcctttggagcaatctatttgggcagtgaagggtccaaaaggtgaagcggttggatccattactcaacccttacctagcagttatttgatcatccgagctacttcagagtcagatggaaggtgctggatggatgctttggagttggctttgaaatgttctagtcttcttaaacgtacaatgatcagagaaggaaaggaacatgacctgagcgtttcatcagatagcacacatgtgactttctatggcttactacgtgctaacaatctccacagtggtgataacttccagttaaatgatagtgaaattgaacgacaacattttaaggaccaagatatgtattctgataaatctgataaagaaaatgatcaagaacatgatgagtctgataatgaggtgatggggaaaagtgaagaaagtgacacagatacatcagaaagacaagatgactcatatatcgaacctgagcctgttgagcctttaaaggagactacctacactgaacagagccatgaagaacttggagaggcaggtgaggcttctcaaacagaaactgtatctgaagaaaacaaaagccttatctggacactattgaaacaagtccgtcctggcatggacctatccaaggtggttctgcctacatttattttggaaccccgttctttcctggataaactttcagattactactatcatgcagatttcctatctgaggcagctcttgaagaaaatccttatttccgtttgaagaaagtagtgaaatggtatttgtcaggattctataaaaagccaaagggactgaagaaaccttataatcctatacttggcgagactttccgttgtttatggattcatcccagaacaaacagcaaaactttttatattgctgaacaggtgtcccatcatccaccaatatctgccttttatgttagtaatcgaaaagatggattttgccttagcggtagtatcctggctaagtctaagttttatggaaactcattatctgcaatattagagggagaagcacggttaactttcttgaatagaggtgaagattatgtaatgacaatgccatacgctcattgtaaaggaattctttatggtacaatgacactggagcttggtggaacagtcaatattacatgtcaaaaaactggatacagtgcaatacttgaatttaaactaaagccattcctagggagtagtgactgtgttaatcaaatatcagggaaacttaaactgggaaaagaagtcctagctactttggaaggtcattgggatagtgaagtttttattactgataaaaagactgataattcagaggttttctggaatccaacacctgacattaagcaatggagattaataaggcacactgtaaaatttgaagaacagggagattttgaatcagagaaactctggcaacgggtaactcgagccataaatgccaaagaccaaactgaagctacccaagagaagtatgttttggaagaagctcaaagacaagctgccagggatcggaaaacaaaaaatgaagagtggtcttgcaaattatttgaacttgatccactcacaggagaatggcattacaagtttgcagatacccgaccatgggacccacttaatgatatgatacagtttgaaaaagatggtgttattcagaccaaagtgaaacatcgtactccaatggttagcgtccccaaaatgaaacataagccaaccaggcaacagaagaaagtagcaaaaggctattcctccccagaacctgacattcaagactcctctggaagtgaagctcaatcagtaaaaccaagtacaagaagaaagaaaggaatagaactgggagacattcagagttccatcgaatctataaaacaaacacaggaagaaattaaaagaaatattatggctcttcgaaatcatttagtttcaagcacaccggccacggattattttctgcaacaaaaagactacttcatcattttcctcctgattttgcttcaagtcataataaacttcatgttcaagtagaagttctctaccattgaatcagtgaactagaaagatctgatttggcctgggac

SEQ ID NO: 21356 - DNA, 2664 bp, Homo sapiens
  source 1..2664: mol_type = unassigned DNA
cactagaatgtgaaggatcttcgcggttctgggtgcccagaaaggcggcgacgcggcggatgacaacattaggccgcgacgcgctcctggccaggcggcggctgtagtgttagctttggacgccgcagtagccgctgccggtagcaagccgactgagggaaggtgggggtccgcccgggctggtggacctcggggccgaaagttcccgccccgctcgggggctgagccggcagtgcctccgcggccgctgggcagcgcccttcgtccaggctcgcgccccagctgccgccgacgacagcggccgagagaagttggggtctgactagacgcttacggggcctcggaccccggcgccgcggcgacctcggaggaaccggctccttgcgtcccgcctccctgggagctccgcacgggatttgcagatttacagaatggctgcacattaatggaaagagaagcataaacctatcttctttcattatggagggaggtttggcagatggagaacctgatcgaacttcgcttcttggtgatagcaaagatgtccttgggccatcaactgttgtagcaaacagtgacgaatctcagcttctgacaccaggaaagatgagtcagcgccaaggaaaagaagcttatccaacgccaaccaaagatttgcatcagccatctcttagtccagcaagtcctcatagccagggttttgaaagagggaaggaagatatttctcaaaataaagatgaatcttcactttctatgtcaaagagcaagtctgaatctaaactttataatggctcagagaaggacagttcaacttcaagcaaactcacaaaaaaagaatctcttaaggtacaaaagaaaaattaccgagaagaaaagaaaagagccacaaaggagctgctcagtacaatcacagatccttctgttattgttatggctgattggttaaagattcgtggtactctaaagagctggaccaagttatggtgtgtgttgaaacctggggtgctactgatctataaaacccaaaaaaatggtcagtgggtaggaacagttcttctgaatgcctgtgaaatcattgaacgtccatcaaaaaaggatggcttttgtttcaaacttttccatcctttggagcaatctatttgggcagtgaagggtccaaaaggtgaagcggttggatccattactcaacccttacctagcagttatttgatcatccgagctacttcagagtcagatggaaggtgctggatggatgctttggagttggctttgaaatgttctagtcttcttaaacgtacaatgatcagagaaggaaaggaacatgacctgagcgtttcatcagatagcacacatgtgactttctatggcttactacgtgctaacaatctccacagtggtgataacttccagttaaatgatagtgaaattgaacgacaacattttaaggaccaagatatgtattctgataaatctgataaagaaaatgatcaagaacatgatgagtctgataatgaggtgatggggaaaagtgaagaaagtgacacagatacatcagaaagacaagatgactcatatatcgaacctgagcctgttgagcctttaaaggagactacctacactgaacagagccatgaagaacttggagaggcaggtgaggcttctcaaacagaaactgtatctgaagaaaacaaaagccttatctggacactattgaaacaagtccgtcctggcatggacctatccaaggtggttctgcctacatttattttggaaccccgttctttcctggataaactttcagattactactatcatgcagatttcctatctgaggcagctcttgaagaaaatccttatttccgtttgaagaaagtagtgaaatggtatttgtcaggattctataaaaagccaaagggactgaagaaaccttataatcctatacttggcgagactttccgttgtttatggattcatcccagaacaaacagcaaaactttttatattgctgaacaggtgtcccatcatccaccaatatctgccttttatgttagtaatcgaaaagatggattttgccttagcggtagtatcctggctaagtctaagttttatggaaactcattatctgcaatattagagggagaagcacggttaactttcttgaatagaggtgaagattatgtaatgacaatgccatacgctcattgtaaaggaattctttatggtacaatgacactggagcttggtggaacagtcaatattacatgtcaaaaaactggatacagtgcaatacttgaatttaaactaaagccattcctagggagtagtgactgtgttaatcaaatatcagggaaacttaaactgggaaaagaagtcctagctactttggaaggtcattgggatagtgaagtttttattactgataaaaagactgataattcagaggttttctggaatccaacacctgacattaagcaatggagattaataaggcacactgtaaaatttgaagaacagggagattttgaatcagagaaactctggcaacgggtaactcgagccataaatgccaaagaccaaactgaagctacccaagagaagtatgttttggaagaagctcaaagacaagctgccagggatcggaaaacaaaaaatgaaaagaagaaa

SEQ ID NO: 21357 - DNA, 7185 bp, Homo sapiens
  source 1..7185: mol_type = unassigned DNA
cactagaatgtgaaggatcttcgcggttctgggtgcccagaaaggcggcgacgcggcggatgacaacattaggccgcgacgcgctcctggccaggcggcggctgtagtgttagctttggacgccgcagtagccgctgccggtagcaagccgactgagggaaggtgggggtccgcccgggctggtggacctcggggccgaaagttcccgccccgctcgggggctgagccggcagtgcctccgcggccgctgggcagcgcccttcgtccaggctcgcgccccagctgccgccgacgacagcggccgagagaagttggggtctgactagacgcttacggggcctcggaccccggcgccgcggcgacctcggaggaaccggctccttgcgtcccgcctccctgggagctccgcacgggatttgcagatttacagaatggctgcacattaatggaaagagaagcataaacctatcttctttcattatggagggaggtttggcagatggagaacctgatcgaacttcggcaaacagtgacgaatctcagcttctgacaccaggaaagatgagtcagcgccaaggaaaagaagcttatccaacgccaaccaaagatttgcatcagccatctcttagtccagcaagtcctcatagccagggttttgaaagagggaaggaagatatttctcaaaataaagatgaatcttcactttctatgtcaaagagcaagtctgaatctaaactttataatggctcagagaaggacagttcaacttcaagcaaactcacaaaaaaagaatctcttaaggtacaaaagaaaaattaccgagaagaaaagaaaagagccacaaaggagctgctcagtacaatcacagatccttctgttattgttatggctgattggttaaagattcgtggtactctaaagagctggaccaagttatggtgtgtgttgaaacctggggtgctactgatctataaaacccaaaaaaatggtcagtgggtaggaacagttcttctgaatgcctgtgaaatcattgaacgtccatcaaaaaaggatggcttttgtttcaaacttttccatcctttggagcaatctatttgggcagtgaagggtccaaaaggtgaagcggttggatccattactcaacccttacctagcagttatttgatcatccgagctacttcagagtcagatggaaggtgctggatggatgctttggagttggctttgaaatgttctagtcttcttaaacgtacaatgatcagagaaggaaaggaacatgacctgagcgtttcatcagatagcacacatgtgactttctatggcttactacgtgctaacaatctccacagtggtgataacttccagttaaatgatagtgaaattgaacgacaacattttaaggaccaagatatgtattctgataaatctgataaagaaaatgatcaagaacatgatgagtctgataatgaggtgatggggaaaagtgaagaaagtgacacagatacatcagaaagacaagatgactcatatatcgaacctgagcctgttgagcctttaaaggagactacctacactgaacagagccatgaagaacttggagaggcaggtgaggcttctcaaacagaaactgtatctgaagaaaacaaaagccttatctggacactattgaaacaagtccgtcctggcatggacctatccaaggtggttctgcctacatttattttggaaccccgttctttcctggataaactttcagattactactatcatgcagatttcctatctgaggcagctcttgaagaaaatccttatttccgtttgaagaaagtagtgaaatggtatttgtcaggattctataaaaagccaaagggactgaagaaaccttataatcctatacttggcgagactttccgttgtttatggattcatcccagaacaaacagcaaaactttttatattgctgaacaggtgtcccatcatccaccaatatctgccttttatgttagtaatcgaaaagatggattttgccttagcggtagtatcctggctaagtctaagttttatggaaactcattatctgcaatattagagggagaagcacggttaactttcttgaatagaggtgaagattatgtaatgacaatgccatacgctcattgtaaaggaattctttatggtacaatgacactggagcttggtggaacagtcaatattacatgtcaaaaaactggatacagtgcaatacttgaatttaaactaaagccattcctagggagtagtgactgtgttaatcaaatatcagggaaacttaaactgggaaaagaagtcctagctactttggaaggtcattgggatagtgaagtttttattactgataaaaagactgataattcagaggttttctggaatccaacacctgacattaagcaatggagattaataaggcacactgtaaaatttgaagaacagggagattttgaatcagagaaactctggcaacgggtaactcgagccataaatgccaaagaccaaactgaagctacccaagagaagtatgttttggaagaagctcaaagacaagctgccagggatcggaaaacaaaaaatgaagagtggtcttgcaaattatttgaacttgatccactcacaggagaatggcattacaagtttgcagatacccgaccatgggacccacttaatgatatgatacagtttgaaaaagatggtgttattcagaccaaagtgaaacatcgtactccaatggttagcgtccccaaaatgaaacataagccaaccaggcaacagaagaaagtagcaaaaggctattcctccccagaacctgacattcaagactcctctggaagtgaagctcaatcagtaaaaccaagtacaagaagaaagaaaggaatagaactgggagacattcagagttccatcgaatctataaaacaaacacaggaagaaattaaaagaaatattatggctcttcgaaatcatttagtttcaagcacaccggccacggattattttctgcaacaaaaagactacttcatcattttcctcctgattttgcttcaagtcataataaacttcatgttcaagtagaagttctctaccattgaatcagtgaactagaaagatctgatttggcctgggaccagtgttcaagttggtttggtctttattaaaaatcacaatattccgaaaacaaaaaaacctaggagataaatgtagaggtattgacttttcgtatcttttatcttcacactgaaacaagagctatcctatttgattattaaagtgagctatgtgttaagtgccaggacatttctagcttttgtgagaatgtgtctacatatgagtataataaacccacatgtatacacaattgtctcttatgtactcctacctgacagtagtctttgtattctatagtatgttctgagatataatgttaacattgttcataacaaaaaatgctatcaatcttataaatatatgtaatctattttcttcataaaacaggcacaaaagttttatcagtaaggaattacagattgagaaatgatggaataatagacataattaattcaatacactactgttaaaatcatttgcaaagcactcagctcaattatcttcttagaaagaaagaaaaagtatgaatggtcaaaatgaatacatcgagagagataaatggcaaattgcttttttaaaagtttacataagttttttttaacccctagaatttaatatttgtagatgcaggtaaatatatatacttacgtgtatatcagtataaaaacactggtgtgcaattaattggattgattataataccaccttaagcacttgctgaaaaaagtgtggtcaaaattgattgctgtccttttgtcttatttttgtttttcttaagtcagctggttcataacataggccaaattctagagatgtttatagagcatttgaagtgctgataatttatgttttttcattatgaaaacttattttagctttagactccagtgtgttcagtgaataagtagaatataaaaaaatataaccagtattttacttcaaaagccaaaaagaggcaataagaaaagacactttgtggtggcctttatgtgtgcattaaaattggtttctgtaaaacgtgtaataagttgagtatctacgaagagtatcaagttctgaagtttaatttttttattatcctcctctcttcttagtaacttctttctgtggcaaaaccacaattctttaagattcctattgttcaggctaaggcaaatttttttgtttgtttcttcagtttaatattttgattttgtgtttttacgtaaatatttatattccttgaaagcaatttttgccaaggtagttcagtttaggaatatgttgttctaaaatatgtcttagaatcctgaaagcatagattttgaaatgtttttttaatgaaaatgaaggtcagagagaataattgccctgaccacatttgcctttcagtaggaggaggctgtgaaatagtaaaattataatcgtttatgccatgataaatacaagattggtaaataaatacattgattggtaaattatgagaatcaaaatgataaaaagagcctgcttttttccctaaccaatatagctatcttaagtatccttaggtttctgtgaagaaccatttcccatgttttcttggcaaaataatgctgtattccatatgtacatgtgaaatgatgttttaaattgataaaagcttaaataagatctacctatacccagtattttcatgatattagaacaaatgggtttttggttatattttatatttgtcaatataatttttgtattcacattctgttacactctgcctattcattgatatatgatattctgtaaatattgtacaatttgatcttttttatggtttaaattagttaattacatacaaattgattggcttatcacaaaaatcatttcatcagtaaaccttgttaacattttgtactggtgacccacctcttaggactttggtcttatccacgtgtatgttgttttcatttggtccaaataatattttatttgtatgggtatcttctaagactaaataggtagttgtgttctttatttttaaaatttctttttagagcaaatgttatgggttcttacccaaagagtcaaaaactatttcttaagaaagagcagagttattcatgactgttctttatacactaaaagcatgcatctaatctaatagtcctcttattatgcttttagttgtatgagtctctttctatgaactgaacacaaaactcaggaattggtggcttaattttagatcagtgcttgtactaggcttagttatatgaatctttataacacataattactaactttgtagccatatatgtaattgactttgaatgttatttacctgaaattaatcttccttcacacatggaccgtaaacggttcccagttgtctgagagcctcatgagggtttctaggatttatgaccttatgaccagtttttttcatttaccaagattttattttcctacatgaaaatttaattgagtaataattattcacatgtgcattttctttttagctgttaaatgtactatgccatcatccaccatttagtaaaatgtagctggcccaggacatgtaaaaaaaaaaaaaaaacaacaacaataaatagggcatgtgaaatgttaagttacagcaatagatattttatttgtatttcatgttagtacttttttgttttatatcacttataaaggtacagtgtactctttgtcacagctcagttggtaaccgcattccattgaaaagttggccttgtaaaatacaactctcatttaatattcatgcttttgtgcctttaagaaaatattttttgtcattttttgtgttacagaactataatgtgattcaaggtgtttataggcttgtcataaaagggtcatttctgtgtgttactttctttttatatagctatagtatatttaaacaataatactatcttttataggggtttgtctatttacctattctttactcagacattgatgtagacttgtcagattattctgagtattgttaacagtgccttttcgatggaatcacactttttggctgtcaccttgtgccatatacacacaaaattttgtggaaggcagttttaactttctgaagaatatctgtcaaaatttaagaaaacaaatgtataaaattccattttttccagtgtttagcatttctagtaagcagtgaggttgtttgacatacagtgatgatggcattattgataagccatacatgagactgcagattatattgaatcatattaaatgtacagaaataaaatattagatttatatcaaattttccaatttgaaccagtggggaaaatcccacagaaatcagtaagtttacatttcaatttctatcttatttgactaagtggaaagagattctttaaaatgtataacctgccattatgtaatttggtttcattttattctacctgttgtgtgagtttagtatatttaatttactttttgttactctttacatactgtttatttttgttagtttttaattgaagatggactgttgaaattgtataggaccagtgtcttattaatatgattaatatatttagaagagccacgtgaaacccatgacaaaatgaatgtgaatattctttctaaaaatttagaaaatgttatctttttgcatttattatgtaaaactgttttacagtatcaaaatttttcacttaaagaaaaaaaatgccatgaaacatttgaactgatgagccacagaacttcagttgaaatttttttcactttttagcatgctaaatatacatctgagtttaaatgttctgtttaatggccattcataaattcaagcactaccactggtcagttttgtgtgatagaataaaaatatgttacctgcagtgtaagtacagcacactgtcaaattcttttccttaaggtgcacagtaaatgtacagatagttataggccactgttttgtaatgtagtacatttctaatctattattcctaacctattataactgtttgcagaaagaaaagaatttttctaataatctgtaaaattatgctaacttctacaagtaggcttctaaataaaattttt

SEQ ID NO: 21358 - DNA, 363 bp, Homo sapiens
  source 1..363: mol_type = unassigned DNA
gagaagttggggtctgactagacgcttacggggcctcggaccccggcgccgcggcgacctcggaggaaccggctccttgcgtcccgcctccctgggagctccgcacggcaatctccattggtgctactgcgtttaaaggatttgcagatttacagaatggctgcacattaatggaaagagaagcataaacctatcttctttcattatggagggaggtttggcagatggagaacctgatcgaacttcgcttcttggtgatagcaaagatgtccttgggccatcaacaaacagtgacgaatctcagcttctgacaccaggaaagatgagtcagcgccaaggaaaagaagcttatccaacgccaac

SEQ ID NO: 21359 - DNA, 732 bp, Homo sapiens
  source 1..732: mol_type = unassigned DNA
gcggctgtagtgttagctttggacgccgcagtagccgctgccggtagcaagccgactgagggaaggtgggggtccgcccgggctggtggacctcggggccgaaagttcccgccccgctcgggggctgagccggcagtgcctccgcggccgctgggcagcgcccttcgtccaggctcgcgccccagctgccgccgacgacagcggccgagagaagttggggtctgactagacgcttacggggcctcggaccccggcgccgcggcgacctcggaggaaccggctccttgcgtcccgcctccctgggagctccgcacggcaatctccattggtgctactgcgtttaaaggatttgcagatttacagaatggctgcacattaatggaaagagaagcataaacctatcttctttcattatggagggaggtttggcagatggagaacctgatcgaacttcgctgttgtagcaaacagtgacgaatctcagcttctgacaccaggaaagatgagtcagcgccaaggaaaagaagcttatccaacgccaaccaaagatttgcatcagccatctcttagtccagcaagtcctcatagccagggttttgaaagagggaaggaagatatttctcaaaataaagatgaatcttcactttctatgtcaaagagcaagtctgaatctaaactttataatggctcagagaaggacagttcaacttcaagcaaactcacaaaaaaaga

SEQ ID NO: 21360 - DNA, 531 bp, Homo sapiens
  source 1..531: mol_type = unassigned DNA
gcggccgctgggcagcgcccttcgtccaggctcgcgccccagctgccgccgacgacagcggccgagagaagttggggtctgactagacgcttacggggcctcggaccccggcgccgcggcgacctcggaggaaccggctccttgcgtcccgcctccctgggagctccgcacggcaatctccattggtgctactgcgtttaaagaactgtggctaacctccaagagactgaagctggtaattaaacattcctatccttgcctgaagcagtcttttgcaggaacatttgaggatttgcagatttacagaatggctgcacattaatggaaagagaagcataaacctatcttctttcattatggagggaggtttggcagatggagaacctgatcgaacttcgcttcttggtgatagcaaagatgtccttgggccatcaactgttgtagcaaacagtgacgaatctcagcttctgacaccaggaaagatgagtcagcgccaaggaaaagaagcttatccaacgccaaccaaagatt

SEQ ID NO: 21361 - DNA, 902 bp, Homo sapiens
  source 1..902: mol_type = unassigned DNA
actagaatgtgaaggatcttcgcggttctgggtgcccagaaaggcggcgacgcggcggatgacaacattaggccgcgacgcgctcctggccaggcggcggctgtagtgttagctttggacgccgcagtagccgctgccggtagcaagccgactgagggaaggtgggggtccgcccgggctggtggacctcggggccgaaagttcccgccccgctcgggggctgagccggcagtgcctccgcggccgctgggcagcgcccttcgtccaggctcgcgccccagctgccgccgacgacagcggccgagagaagttggggtctgactagacgcttacggggcctcggaccccggcgccgcggcgacctcggaggaaccggctccttgcgtcccgcctccctgggagctccgcacgggatttgcagatttacagaatggctgcacattaatggaaagagaagcataaacctatcttctttcattatggagggaggtttggcagatggagaacctgatcgaacttcgctgttgtagcaaacagtgacgaatctcagcttctgacaccaggaaagatgagtcagcgccaaggaaaagaagcttatccaacgccaaccaaagatttgcatcagccatctcttagtccagcaagtcctcatagccagggttttgaaagagggaaggaagatatttctcaaaataaagatgaatcttcactttctatgtcaaagagcaagtctgaatctaaactttataatggctcagagaaggacagttcaacttcaagcaaactcacaaaaaaagaatctcttaaggtacaaaagaaaaattaccgagaagaaaagaaaagagccacaaaggagctgctcagtacaatcacagatccttctgttattgttatggctgatt

SEQ ID NO: 21362 - DNA, 3836 bp, Homo sapiens
  source 1..3836: mol_type = unassigned DNA
ttataaataatcttaatagcagtattcacgtttgcattctcgcatccgtggcatggagtcctacacacaataggcgccctaagaaagcgtgtttgacttgatcgctggagcatctgccggcaccgcccaggacccgcccaggacccgccccgccccctgcggccccgccccccgcatgctgaatgccatataggcgagtgacgtcaggccgtttgttgtcattggcggctcccaagatggcgtccatcatggaagggccgctgagcaaatggactaacgtgatgaagggctggcagtaccgttggttcgtgctggactacaatgcaggactgctctcctactacacgtccaaggacaaaatgatgagaggctctcgcagaggatgtgttagactcagaggagctgtgattggtatagacgatgaggacgacagcaccttcacaataactgttgatcagaaaaccttccatttccaggcccgtgatgctgatgagcgagagaagtggatccatgccttagaagaaacaattcttcgacatactctccagcttcaaggtttggattcaggatttgttcctagtgtccaagattttgataagaaacttacagaagctgatgcttacctacaaatcttgattgaacaattaaagctttttgatgacaagcttcaaaactgcaaagaagatgaacagagaaagaaaattgaaactctcaaagagacaacaaatagcatggtagaatcaattaaacactgcattgtgttgctgcagattgccaaaagtactattaatcccgtagatgcaatatatcaacctagtcctttggaacctgtgatcagcacaatgccttcccagactgtgttacctccagaacctgttcagttgtgtaagtcagagcagcgtccatcttccctaccagttggacctgtgttggctaccttgggacatcatcagactcctacaccaaatagtacaggcagtggccattcaccaccgagtagcagtctcacttctccaagccacgtgaacttgtctccaaatacagtcccagagttctcttactccagcagtgaagatgaattttatgatgctgatgaattccatcaaagtggctcatccccaaagcgcttaatagattcttctggatctgcctcagtcctgacacacagcagctcgggaaatagtctaaaacgcccagataccacagaatcacttaattcttccttgtccaatggaacaagtgatgctgacctgtttgattcacatgatgacagagatgatgatgcggaggcagggtctgtggaggagcacaagagcgttatcatgcatctcttgtcgcaggttagacttggaatggatcttactaaggtagttcttccaacgtttattcttgaaagaagatctcttttagaaatgtatgcagacttttttgcacatccggacctgtttgtgagcattagtgaccagaaggatcccaaggatcgaatggttcaggttgtgaaatggtacctctcagcctttcatgcgggaaggaaaggatcagttgccaaaaagccatacaatcccattttgggcgagatttttcagtgtcattggacattaccaaatgatactgaagagaacacagaactagtttcagaaggaccagttccctgggtttccaaaaacagtgtaacatttgtggctgagcaggtttcccatcatccacccatttcagccttttatgctgagtgttttaacaagaagatacaattcaatgctcatatctggaccaaatcaaaattccttgggatgtcaattggggtgcacaacatagggcagggctgtgtctcatgtctagactatgatgaacattacattctcacattccccaatggctatggaaggtctatcctcacagtgccctgggtggaattaggaggagaatgcaatattaattgttccaaaacaggctatagtgcaaatatcatcttccacactaaacccttctatgggggcaagaagcacagaattactgccgagattttttctccaaatgacaagaagtctttttgctcaattgaaggggaatggaatggtgtgatgtatgcaaaatatgcaacaggggaaaatacagtctttgtagataccaagaagttgcctataatcaagaagaaagtgaggaagttggaagatcagaacgagtatgaatcccgcagcctttggaaggatgtcactttcaacttaaaaatcagagacattgatgcagcaactgaagcaaagcacaggcttgaagaaagacaaagagcagaagcccgagaaaggaaggagaaggaaattcagtgggagacaaggttatttcatgaagatggagaatgctgggtttatgatgaaccattactgaaacgtcttggtgctgccaagcattaggttggaagatgcaaagtttatacctgatgatcagggcagtaggcataattcagcaacaaacaatcttcctttgggagaaacctgttcattccaatcttctaattacagtggttcctatctcagggatactggactttctgacgcagatgaacaattaaggggaaaagcttcccttttccctctgtggcagttacgattttgacttcagtcctgagaaaaacttcaggttttgaaaatcagatgatgtcttctccttttccaaacaccacacgttgaaagcatttataaatccaagtctgaaactctgcgctctagtactgctgttaagatacacaacttgtttcttagttcatataatctcgggatacacacacacacacacatatatatacacacacatacgtatacacacacatacatatatataaatatacctgatgccagatttttttcataaatattctgcctactgtaaatatgggttcctctgagttgttttagaaaattagcgcaatgtattaaaatcaagtgttaggaaatttcatggtcttacctacaataacttttattttggaattgaactattattaaattgtatctaatcctggattacagtttaattaattattcttagtgcttaaggcttcataaagtaatttttccaaccttttttttaaaaatgtgcatcttttattatcttttatggttaaacttggaagccaattatttggcaaccttgaatacaagagctagcttttcaaagaaagacacttgaaataatggaggatccattcttttcctctgtcagattgtatgttctgtctttagcccctgccaggcaattccccagaatcttcacttaactcatattgcacatgtagggctgcctaccaacattttatccaaaaatgttttattgccttagagggtttgggaagagtgtgtatttatagatccccaccccacagtgaacaaaaatagatagatagatagaataaaatgaatgccacagcagcagatggctcattctgaagggaaatacagaactatatctatctatctatctatcatcttttttatttaaaaatacattaaaaaaacaggtattagtacctagcatttagttagttattcaatatactggttacgtaaggcctttcaagaagtagattctcagtctgagaggacacaggccagggcttctcaaagtgctgctgcaggctttctggtctcgcttggcccattctgctaattttcctttgccagctcctacagtaaccctgggtttattagtctcaacaaaggataaaaagtaaatcaaatgctatgatgccagtgcaaaacttcaatggaagccctaaggcagtagtataactaactccataaaatacaaacaaacacattttaaaatacacattgcttcaggcc

SEQ ID NO: 21363 - DNA, 2721 bp, Homo sapiens
  source 1..2721: mol_type = unassigned DNA
gaagggggtgaagggggtgtcccgggggacgggctgaacctcagtcaggaccgcctgcaccgcagtccggggatcgggtcgaggggagaagaaaaaggggtgctcgggagcagcccccggctacctcccctggaggcacagagggcgggggccttggcgaatggctttcttgctggccacttgcggaggtttggattcaggatttgttcctagtgtccaagattttgataagaaacttacagaagctgatgcttacctacaaatcttgattgaacaattaaagctttttgatgacaagcttcaaaactgcaaagaagatgaacagagaaagaaaattgaaactctcaaagagacaacaaatagcatggtagaatcaattaaacactgcattgtgttgctgcagattgccaaaagtactattaatcccgtagatgcaatatatcaacctagtcctttggaacctgtgatcagcacaatgccttcccagactgtgttacctccagaacctgttcagttgtgtaagtcagagcagcgtccatcttccctaccagttggacctgtgttggctaccttgggacatcatcagactcctacaccaaatagtacaggcagtggccattcaccaccgagtagcagtctcacttctccaagccacgtgaacttgtctccaaatacagtcccagagttctcttactccagcagtgaagatgaattttatgatgctgatgaattccatcaaagtggctcatccccaaagcgcttaatagattcttctggatctgcctcagtcctgacacacagcagctcgggaaatagtctaaaacgcccagataccacagaatcacttaattcttccttgtccaatggaacaagtgatgctgacctgtttgattcacatgatgacagagatgatgatgcggaggcagggtctgtggaggagcacaagagcgttatcatgcatctcttgtcgcaggttagacttggaatggatcttactaaggtagttcttccaacgtttattcttgaaagaagatctcttttagaaatgtatgcagacttttttgcacatccggacctgtttgtgagcattagtgaccagaaggatcccaaggatcgaatggttcaggttgtgaaatggtacctctcagcctttcatgcgggaaggaaaggatcagttgccaaaaagccatacaatcccattttgggcgagatttttcagtgtcattggacattaccaaatgatactgaagagaacacagaactagtttcagaaggaccagttccctgggtttccaaaaacagtgtaacatttgtggctgagcaggtttcccatcatccacccatttcagccttttatgctgagtgttttaacaagaagatacaattcaatgctcatatctggaccaaatcaaaattccttgggatgtcaattggggtgcacaacatagggcagggctgtgtctcatgtctagactatgatgaacattacattctcacattccccaatggctatggaaggtctatcctcacagtgccctgggtggaattaggaggagaatgcaatattaattgttccaaaacaggctatagtgcaaatatcatcttccacactaaacccttctatgggggcaagaagcacagaattactgccgagattttttctccaaatgacaagaagtctttttgctcaattgaaggggaatggaatggtgtgatgtatgcaaaatatgcaacaggggaaaatacagtctttgtagataccaagaagttgcctataatcaagaagaaagtgaggaagttggaagatcagaacgagtatgaatcccgcagcctttggaaggatgtcactttcaacttaaaaatcagagacattgatgcagcaactgaagcaaagcacaggcttgaagaaagacaaagagcagaagcccgagaaaggaaggagaaggaaattcagtgggagacaaggttatttcatgaagatggagaatgctgggtttatgatgaaccattactgaaacgtcttggtgctgccaagcattaggttggaagatgcaaagtttatacctgatgatcagggcagtaggcataattcagcaacaaacaatcttcctttgggagaaacctgttcattccaatcttctaattacagtggttcctatctcagggatactggactttctgacgcagatgaacaattaaggggaaaagcttcccttttccctctgtggcagttacgattttgacttcagtcctgagaaaaacttcaggttttgaaaatcagatgatgtcttctccttttccaaacaccacacgttgaaagcatttataaatccaagtctgaaactctgcgctctagtactgctgttaagatacacaacttgtttcttagttcatataatctcgggatacacacacacacacacatatatatacacacacatacgtatacacacacatacatatatataaatatacctgatgccagatttttttcataaatattctgcctactgtaaatatgggttcctctgagttgttttagaaaattagcgcaatgtattaaaatcaagtgttaggaaatttcatggtcttacctacaataacttttattttggaattgaactattattaaattgtatctaatcctggattacagtttaattaattattcttagtgcttaaggcttcataaagtaatttttccaaccttttttttaaaaa

SEQ ID NO: 21364 - DNA, 3875 bp, Homo sapiens
  source 1..3875: mol_type = unassigned DNA
ttataaataatcttaatagcagtattcacgtttgcattctcgcatccgtggcatggagtcctacacacaataggcgccctaagaaagcgtgtttgacttgatcgctggagcatctgccggcaccgcccaggacccgcccaggacccgccccgccccctgcggccccgccccccgcatgctgaatgccatataggcgagtgacgtcaggccgtttgttgtcattggcggctcccaagatggcgtccatcatggaagggccgctgagcaaatggactaacgtgatgaagggctggcagtaccgttggttcgtgctggactacaatgcaggactgctctcctactacacgtccaaggacaaaatgatgagaggctctcgcagaggatgtgttagactcagaggagctgtgattggtatagacgatgaggacgacagcaccttcacaataactgttgatcagaaaaccttccatttccaggcccgtgatgctgatgagcgagagaagtggatccatgccttagaagaaacaattcttcgacatactctccagcttcaaggtttggattcaggatttgttcctagtgtccaagattttgataagaaacttacagaagctgatgcttacctacaaatcttgattgaacaattaaagctttttgatgacaagcttcaaaactgcaaagaagatgaacagagaaagaaaattgaaactctcaaagagacaacaaatagcatggtagaatcaattaaacactgcattgtgttgctgcagattgccaaagaccagagtaatgcggagaagcacgcagatggaatgataagtactattaatcccgtagatgcaatatatcaacctagtcctttggaacctgtgatcagcacaatgccttcccagactgtgttacctccagaacctgttcagttgtgtaagtcagagcagcgtccatcttccctaccagttggacctgtgttggctaccttgggacatcatcagactcctacaccaaatagtacaggcagtggccattcaccaccgagtagcagtctcacttctccaagccacgtgaacttgtctccaaatacagtcccagagttctcttactccagcagtgaagatgaattttatgatgctgatgaattccatcaaagtggctcatccccaaagcgcttaatagattcttctggatctgcctcagtcctgacacacagcagctcgggaaatagtctaaaacgcccagataccacagaatcacttaattcttccttgtccaatggaacaagtgatgctgacctgtttgattcacatgatgacagagatgatgatgcggaggcagggtctgtggaggagcacaagagcgttatcatgcatctcttgtcgcaggttagacttggaatggatcttactaaggtagttcttccaacgtttattcttgaaagaagatctcttttagaaatgtatgcagacttttttgcacatccggacctgtttgtgagcattagtgaccagaaggatcccaaggatcgaatggttcaggttgtgaaatggtacctctcagcctttcatgcgggaaggaaaggatcagttgccaaaaagccatacaatcccattttgggcgagatttttcagtgtcattggacattaccaaatgatactgaagagaacacagaactagtttcagaaggaccagttccctgggtttccaaaaacagtgtaacatttgtggctgagcaggtttcccatcatccacccatttcagccttttatgctgagtgttttaacaagaagatacaattcaatgctcatatctggaccaaatcaaaattccttgggatgtcaattggggtgcacaacatagggcagggctgtgtctcatgtctagactatgatgaacattacattctcacattccccaatggctatggaaggtctatcctcacagtgccctgggtggaattaggaggagaatgcaatattaattgttccaaaacaggctatagtgcaaatatcatcttccacactaaacccttctatgggggcaagaagcacagaattactgccgagattttttctccaaatgacaagaagtctttttgctcaattgaaggggaatggaatggtgtgatgtatgcaaaatatgcaacaggggaaaatacagtctttgtagataccaagaagttgcctataatcaagaagaaagtgaggaagttggaagatcagaacgagtatgaatcccgcagcctttggaaggatgtcactttcaacttaaaaatcagagacattgatgcagcaactgaagcaaagcacaggcttgaagaaagacaaagagcagaagcccgagaaaggaaggagaaggaaattcagtgggagacaaggttatttcatgaagatggagaatgctgggtttatgatgaaccattactgaaacgtcttggtgctgccaagcattaggttggaagatgcaaagtttatacctgatgatcagggcagtaggcataattcagcaacaaacaatcttcctttgggagaaacctgttcattccaatcttctaattacagtggttcctatctcagggatactggactttctgacgcagatgaacaattaaggggaaaagcttcccttttccctctgtggcagttacgattttgacttcagtcctgagaaaaacttcaggttttgaaaatcagatgatgtcttctccttttccaaacaccacacgttgaaagcatttataaatccaagtctgaaactctgcgctctagtactgctgttaagatacacaacttgtttcttagttcatataatctcgggatacacacacacacacacatatatatacacacacatacgtatacacacacatacatatatataaatatacctgatgccagatttttttcataaatattctgcctactgtaaatatgggttcctctgagttgttttagaaaattagcgcaatgtattaaaatcaagtgttaggaaatttcatggtcttacctacaataacttttattttggaattgaactattattaaattgtatctaatcctggattacagtttaattaattattcttagtgcttaaggcttcataaagtaatttttccaaccttttttttaaaaatgtgcatcttttattatcttttatggttaaacttggaagccaattatttggcaaccttgaatacaagagctagcttttcaaagaaagacacttgaaataatggaggatccattcttttcctctgtcagattgtatgttctgtctttagcccctgccaggcaattccccagaatcttcacttaactcatattgcacatgtagggctgcctaccaacattttatccaaaaatgttttattgccttagagggtttgggaagagtgtgtatttatagatccccaccccacagtgaacaaaaatagatagatagatagaataaaatgaatgccacagcagcagatggctcattctgaagggaaatacagaactatatctatctatctatctatcatcttttttatttaaaaatacattaaaaaaacaggtattagtacctagcatttagttagttattcaatatactggttacgtaaggcctttcaagaagtagattctcagtctgagaggacacaggccagggcttctcaaagtgctgctgcaggctttctggtctcgcttggcccattctgctaattttcctttgccagctcctacagtaaccctgggtttattagtctcaacaaaggataaaaagtaaatcaaatgctatgatgccagtgcaaaacttcaatggaagccctaaggcagtagtataactaactccataaaatacaaacaaacacattttaaaatacacattgcttcaggcc

SEQ ID NO: 21365 - DNA, 3352 bp, Homo sapiens
  source 1..3352: mol_type = unassigned DNA
atgattataagcttcctgaggcctccctagaagctgagcagatggcagaaccatgcttcctgtaaatcctgcagaatcaagaaggaactgagtctctaagatggaggatatacaactgacaagtagtaaagtcaagatacacagccagacagtgtctcagtctggcatccaactcaggctggagtgcagtgacatgatcttggctcactgcagtcttgacctcctgggctcaagcaatcctcctgcctcagcttcctgagtagattataaataatcttaatagcagtattcacgtttgcattctcgcatccgtggcatggagtcctacacacaataggcgccctaagaaagcgtgtttgacttgatcgctggagcatctgccggcaccgcccaggacccgcccaggacccgccccgccccctgcggccccgccccccgcatgctgaatgccatataggcgagtgacgtcaggccgtttgttgtcattggcggctcccaagatggcgtccatcatggaagggccgctgagcaaatggactaacgtgatgaagggctggcagtaccgttggttcgtgctggactacaatgcaggactgctctcctactacacgtccaaggacaaaatgatgagaggctctcgcagaggatgtgttagactcagaggagctgtgattggtatagacgatgaggacgacagcaccttcacaataactgttgatcagaaaaccttccatttccaggcccgtgatgctgatgagcgagagaagtggatccatgccttagaagaaacaattcttcgacatactctccagcttcaaggtttggattcaggatttgttcctagtgtccaagattttgataagaaacttacagaagctgatgcttacctacaaatcttgattgaacaattaaagctttttgatgacaagcttcaaaactgcaaagaagatgaacagagaaagaaaattgaaactctcaaagagacaacaaatagcatggtagaatcaattaaacactgcattgtgttgctgcagattgccaaaagtactattaatcccgtagatgcaatatatcaacctagtcctttggaacctgtgatcagcacaatgccttcccagactgtgttacctccagaacctgttcagttgtgtaagtcagagcagcgtccatcttccctaccagttggacctgtgttggctaccttgggacatcatcagactcctacaccaaatagtacaggcagtggccattcaccaccgagtagcagtctcacttctccaagccacgtgaacttgtctccaaatacagtcccagagttctcttactccagcagtgaagatgaattttatgatgctgatgaattccatcaaagtggctcatccccaaagcgcttaatagattcttctggatctgcctcagtcctgacacacagcagctcgggaaatagtctaaaacgcccagataccacagaatcacttaattcttccttgtccaatggaacaagtgatgctgacctgtttgattcacatgatgacagagatgatgatgcggaggcagggtctgtggaggagcacaagagcgttatcatgcatctcttgtcgcaggttagacttggaatggatcttactaaggtagttcttccaacgtttattcttgaaagaagatctcttttagaaatgtatgcagacttttttgcacatccggacctgtttgtgagcattagtgaccagaaggatcccaaggatcgaatggttcaggttgtgaaatggtacctctcagcctttcatgcgggaaggaaaggatcagttgccaaaaagccatacaatcccattttgggcgagatttttcagtgtcattggacattaccaaatgatactgaagagaacacagaactagtttcagaaggaccagttccctgggtttccaaaaacagtgtaacatttgtggctgagcaggtttcccatcatccacccatttcagccttttatgctgagtgttttaacaagaagatacaattcaatgctcatatctggaccaaatcaaaattccttgggatgtcaattggggtgcacaacatagggcagggctgtgtctcatgtctagactatgatgaacattacattctcacattccccaatggctatggaaggtctatcctcacagtgccctgggtggaattaggaggagaatgcaatattaattgttccaaaacaggctatagtgcaaatatcatcttccacactaaacccttctatgggggcaagaagcacagaattactgccgagattttttctccaaatgacaagaagtctttttgctcaattgaaggggaatggaatggtgtgatgtatgcaaaatatgcaacaggggaaaatacagtctttgtagataccaagaagttgcctataatcaagaagaaagtgaggaagttggaagatcagaacgagtatgaatcccgcagcctttggaaggatgtcactttcaacttaaaaatcagagacattgatgcagcaactgaagcaaagcacaggcttgaagaaagacaaagagcagaagcccgagaaaggaaggagaaggaaattcagtgggagacaaggttatttcatgaagatggagaatgctgggtttatgatgaaccattactgaaacgtcttggtgctgccaagcattaggttggaagatgcaaagtttatacctgatgatcagggcagtaggcataattcagcaacaaacaatcttcctttgggagaaacctgttcattccaatcttctaattacagtggttcctatctcagggatactggactttctgacgcagatgaacaattaaggggaaaagcttcccttttccctctgtggcagttacgattttgacttcagtcctgagaaaaacttcaggttttgaaaatcagatgatgtcttctccttttccaaacaccacacgttgaaagcatttataaatccaagtctgaaactctgcgctctagtactgctgttaagatacacaacttgtttcttagttcatataatctcgggatacacacacacacacacatatatatacacacacatacgtatacacacacatacatatatataaatatacctgatgccagatttttttcataaatattctgcctactgtaaatatgggttcctctgagttgttttagaaaattagcgcaatgtattaaaatcaagtgttaggaaatttcatggtcttacctacaataacttttattttggaattgaactattattaaattgtatctaatcctggattacagtttaattaattattcttagtgcttaaggcttcataaagtaatttttccaaccttttttttaaaaa

SEQ ID NO: 21366 - DNA, 2893 bp, Homo sapiens
  source 1..2893: mol_type = unassigned DNA
agatggcgtccatcatggaagggccgctgagcaaatggactaacgtgatgaagggctggcagtaccgttggttcgtgctggactacaatgcaggactgctctcctactacacgtccaaggacaaaatgatgagaggctctcgcagaggatgtgttagactcagaggagctgtgattggtatagacgatgaggacgacagcaccttcacaataactgttgatcagaaaaccttccatttccaggcccgtgatgctgatgagcgagagaagtggatccatgccttagaagaaacaattcttcgacatactctccagcttcaaggtttggattcaggatttgttcctagtgtccaagattttgataagaaacttacagaagctgatgcttacctacaaatcttgattgaacaattaaagctttttgatgacaagcttcaaaactgcaaagaagatgaacagagaaagaaaattgaaactctcaaagagacaacaaatagcatggtagaatcaattaaacactgcattgtgttgctgcagattgccaaagaccagagtaatgcggagaagcacgcagatggaatgataagtactattaatcccgtagatgcaatatatcaacctagtcctttggaacctgtgatcagcacaatgccttcccagactgtgttacctccagaacctgttcagttgtgtaagtcagagcagcgtccatcttccctaccagttggacctgtgttggctaccttgggacatcatcagactcctacaccaaatagtacaggcagtggccattcaccaccgagtagcagtctcacttctccaagccacgtgaacttgtctccaaatacagtcccagagttctcttactccagcagtgaagatgaattttatgatgctgatgaattccatcaaagtggctcatccccaaagcgcttaatagattcttctggatctgcctcagtcctgacacacagcagctcgggaaatagtctaaaacgcccagataccacagaatcacttaattcttccttgtccaatggaacaagtgatgctgacctgtttgattcacatgatgacagagatgatgatgcggaggcagggtctgtggaggagcacaagagcgttatcatgcatctcttgtcgcaggttagacttggaatggatcttactaaggtagttcttccaacgtttattcttgaaagaagatctcttttagaaatgtatgcagacttttttgcacatccggacctgtttgtgagcattagtgaccagaaggatcccaaggatcgaatggttcaggttgtgaaatggtacctctcagcctttcatgcgggaaggaaaggatcagttgccaaaaagccatacaatcccattttgggcgagatttttcagtgtcattggacattaccaaatgatactgaagagaacacagaactagtttcagaaggaccagttccctgggtttccaaaaacagtgtaacatttgtggctgagcaggtttcccatcatccacccatttcagccttttatgctgagtgttttaacaagaagatacaattcaatgctcatatctggaccaaatcaaaattccttgggatgtcaattggggtgcacaacatagggcagggctgtgtctcatgtctagactatgatgaacattacattctcacattccccaatggctatggaaggtctatcctcacagtgccctgggtggaattaggaggagaatgcaatattaattgttccaaaacaggctatagtgcaaatatcatcttccacactaaacccttctatgggggcaagaagcacagaattactgccgagattttttctccaaatgacaagaagtctttttgctcaattgaaggggaatggaatggtgtgatgtatgcaaaatatgcaacaggggaaaatacagtctttgtagataccaagaagttgcctataatcaagaagaaagtgaggaagttggaagatcagaacgagtatgaatcccgcagcctttggaaggatgtcactttcaacttaaaaatcagagacattgatgcagcaactgaagcaaagcacaggcttgaagaaagacaaagagcagaagcccgagaaaggaaggagaaggaaattcagtgggagacaaggttatttcatgaagatggagaatgctgggtttatgatgaaccattactgaaacgtcttggtgctgccaagcattaggttggaagatgcaaagtttatacctgatgatcagggcagtaggcataattcagcaacaaacaatcttcctttgggagaaacctgttcattccaatcttctaattacagtggttcctatctcagggatactggactttctgacgcagatgaacaattaaggggaaaagcttcccttttccctctgtggcagttacgattttgacttcagtcctgagaaaaacttcaggttttgaaaatcagatgatgtcttctccttttccaaacaccacacgttgaaagcatttataaatccaagtctgaaactctgcgctctagtactgctgttaagatacacaacttgtttcttagttcatataatctcgggatacacacacacacacacatatatatacacacacatacgtatacacacacatacatatatataaatatacctgatgccagatttttttcataaatattctgcctactgtaaatatgggttcctctgagttgttttagaaaattagcgcaatgtattaaaatcaagtgttaggaaatttcatggtcttacctacaataacttttattttggaattgaactattattaaattgtatctaatcctggattacagtttaattaattattcttagtgcttaaggcttcataaagtaatttttccaaccttttttttaaaaa

SEQ ID NO: 21367 - DNA, 2826 bp, Homo sapiens
  source 1..2826: mol_type = unassigned DNA
gtcattggcggctcccaagatggcgtccatcatggaagggccgctgagcaaatggactaacgtgatgaagggctggcagtaccgttggttcgtgctggactacaatgcaggactgctctcctactacacgtccaaggacaaaatgatgagaggctctcgcagaggatgtgttagactcagacccgtgatgctgatgagcgagagaagtggatccatgccttagaagaaacaattcttcgacatactctccagcttcaaggtttggattcaggatttgttcctagtgtccaagattttgataagaaacttacagaagctgatgcttacctacaaatcttgattgaacaattaaagctttttgatgacaagcttcaaaactgcaaagaagatgaacagagaaagaaaattgaaactctcaaagagacaacaaatagcatggtagaatcaattaaacactgcattgtgttgctgcagattgccaaagaccagagtaatgcggagaagcacgcagatggaatgataagtactattaatcccgtagatgcaatatatcaacctagtcctttggaacctgtgatcagcacaatgccttcccagactgtgttacctccagaacctgttcagttgtgtaagtcagagcagcgtccatcttccctaccagttggacctgtgttggctaccttgggacatcatcagactcctacaccaaatagtacaggcagtggccattcaccaccgagtagcagtctcacttctccaagccacgtgaacttgtctccaaatacagtcccagagttctcttactccagcagtgaagatgaattttatgatgctgatgaattccatcaaagtggctcatccccaaagcgcttaatagattcttctggatctgcctcagtcctgacacacagcagctcgggaaatagtctaaaacgcccagataccacagaatcacttaattcttccttgtccaatggaacaagtgatgctgacctgtttgattcacatgatgacagagatgatgatgcggaggcagggtctgtggaggagcacaagagcgttatcatgcatctcttgtcgcaggttagacttggaatggatcttactaaggtagttcttccaacgtttattcttgaaagaagatctcttttagaaatgtatgcagacttttttgcacatccggacctgtttgtgagcattagtgaccagaaggatcccaaggatcgaatggttcaggttgtgaaatggtacctctcagcctttcatgcgggaaggaaaggatcagttgccaaaaagccatacaatcccattttgggcgagatttttcagtgtcattggacattaccaaatgatactgaagagaacacagaactagtttcagaaggaccagttccctgggtttccaaaaacagtgtaacatttgtggctgagcaggtttcccatcatccacccatttcagccttttatgctgagtgttttaacaagaagatacaattcaatgctcatatctggaccaaatcaaaattccttgggatgtcaattggggtgcacaacatagggcagggctgtgtctcatgtctagactatgatgaacattacattctcacattccccaatggctatggaaggtctatcctcacagtgccctgggtggaattaggaggagaatgcaatattaattgttccaaaacaggctatagtgcaaatatcatcttccacactaaacccttctatgggggcaagaagcacagaattactgccgagattttttctccaaatgacaagaagtctttttgctcaattgaaggggaatggaatggtgtgatgtatgcaaaatatgcaacaggggaaaatacagtctttgtagataccaagaagttgcctataatcaagaagaaagtgaggaagttggaagatcagaacgagtatgaatcccgcagcctttggaaggatgtcactttcaacttaaaaatcagagacattgatgcagcaactgaagcaaagcacaggcttgaagaaagacaaagagcagaagcccgagaaaggaaggagaaggaaattcagtgggagacaaggttatttcatgaagatggagaatgctgggtttatgatgaaccattactgaaacgtcttggtgctgccaagcattaggttggaagatgcaaagtttatacctgatgatcagggcagtaggcataattcagcaacaaacaatcttcctttgggagaaacctgttcattccaatcttctaattacagtggttcctatctcagggatactggactttctgacgcagatgaacaattaaggggaaaagcttcccttttccctctgtggcagttacgattttgacttcagtcctgagaaaaacttcaggttttgaaaatcagatgatgtcttctccttttccaaacaccacacgttgaaagcatttataaatccaagtctgaaactctgcgctctagtactgctgttaagatacacaacttgtttcttagttcatataatctcgggatacacacacacacacacatatatatacacacacatacgtatacacacacatacatatatataaatatacctgatgccagatttttttcataaatattctgcctactgtaaatatgggttcctctgagttgttttagaaaattagcgcaatgtattaaaatcaagtgttaggaaatttcatggtcttacctacaataacttttattttggaattgaactattattaaattgtatctaatcctggattacagtttaattaattattcttagtgcttaaggcttcataaagtaatttttccaacctttttttt

SEQ ID NO: 21368 - DNA, 2940 bp, Homo sapiens
  source 1..2940: mol_type = unassigned DNA
gtcattggcggctcccaagatggcgtccatcatggaagggccgctgagcaaatggactaacgtgatgaagggctggcagtaccgttggttcgtgctggactacaatgcaggactgctctcctactacacgtccaaggacaaaatgatgagaggctctcgcagaggatgtgttagactcagaggagctgtgattggtatagacgatgaggacgacagcaccttcacaataactgttgatcagaaaaccttccatttccaggcccgtgatgctgatgagcgagagaagtggatccatgccttagaagaaacaattcttcgacatactctccagcttcaaatcagtaccacacttgcttttttccagtcttctggtatctctccagttcttgaattttcaaaaataattggtttggattcaggatttgttcctagtgtccaagattttgataagaaacttacagaagctgatgcttacctacaaatcttgattgaacaattaaagctttttgatgacaagcttcaaaactgcaaagaagatgaacagagaaagaaaattgaaactctcaaagagacaacaaatagcatggtagaatcaattaaacactgcattgtgttgctgcagattgccaaaagtactattaatcccgtagatgcaatatatcaacctagtcctttggaacctgtgatcagcacaatgccttcccagactgtgttacctccagaacctgttcagttgtgtaagtcagagcagcgtccatcttccctaccagttggacctgtgttggctaccttgggacatcatcagactcctacaccaaatagtacaggcagtggccattcaccaccgagtagcagtctcacttctccaagccacgtgaacttgtctccaaatacagtcccagagttctcttactccagcagtgaagatgaattttatgatgctgatgaattccatcaaagtggctcatccccaaagcgcttaatagattcttctggatctgcctcagtcctgacacacagcagctcgggaaatagtctaaaacgcccagataccacagaatcacttaattcttccttgtccaatggaacaagtgatgctgacctgtttgattcacatgatgacagagatgatgatgcggaggcagggtctgtggaggagcacaagagcgttatcatgcatctcttgtcgcaggttagacttggaatggatcttactaaggtagttcttccaacgtttattcttgaaagaagatctcttttagaaatgtatgcagacttttttgcacatccggacctgtttgtgagcattagtgaccagaaggatcccaaggatcgaatggttcaggttgtgaaatggtacctctcagcctttcatgcgggaaggaaaggatcagttgccaaaaagccatacaatcccattttgggcgagatttttcagtgtcattggacattaccaaatgatactgaagagaacacagaactagtttcagaaggaccagttccctgggtttccaaaaacagtgtaacatttgtggctgagcaggtttcccatcatccacccatttcagccttttatgctgagtgttttaacaagaagatacaattcaatgctcatatctggaccaaatcaaaattccttgggatgtcaattggggtgcacaacatagggcagggctgtgtctcatgtctagactatgatgaacattacattctcacattccccaatggctatggaaggtctatcctcacagtgccctgggtggaattaggaggagaatgcaatattaattgttccaaaacaggctatagtgcaaatatcatcttccacactaaacccttctatgggggcaagaagcacagaattactgccgagattttttctccaaatgacaagaagtctttttgctcaattgaaggggaatggaatggtgtgatgtatgcaaaatatgcaacaggggaaaatacagtctttgtagataccaagaagttgcctataatcaagaagaaagtgaggaagttggaagatcagaacgagtatgaatcccgcagcctttggaaggatgtcactttcaacttaaaaatcagagacattgatgcagcaactgaagcaaagcacaggcttgaagaaagacaaagagcagaagcccgagaaaggaaggagaaggaaattcagtgggagacaaggttatttcatgaagatggagaatgctgggtttatgatgaaccattactgaaacgtcttggtgctgccaagcattaggttggaagatgcaaagtttatacctgatgatcagggcagtaggcataattcagcaacaaacaatcttcctttgggagaaacctgttcattccaatcttctaattacagtggttcctatctcagggatactggactttctgacgcagatgaacaattaaggggaaaagcttcccttttccctctgtggcagttacgattttgacttcagtcctgagaaaaacttcaggttttgaaaatcagatgatgtcttctccttttccaaacaccacacgttgaaagcatttataaatccaagtctgaaactctgcgctctagtactgctgttaagatacacaacttgtttcttagttcatataatctcgggatacacacacacacacacatatatatacacacacatacgtatacacacacatacatatatataaatatacctgatgccagatttttttcataaatattctgcctactgtaaatatgggttcctctgagttgttttagaaaattagcgcaatgtattaaaatcaagtgttaggaaatttcatggtcttacctacaataacttttattttggaattgaactattattaaattgtatctaatcctggattacagtttaattaattattcttagtgcttaaggcttcataaagtaatttttccaaccttttttttaaaaa

SEQ ID NO: 21369 - DNA, 2842 bp, Homo sapiens
  source 1..2842: mol_type = unassigned DNA
agatggcgtccatcatggaagggccgctgagcaaatggactaacgtgatgaagggctggcagtaccgttggttcgtgctggactacaatgcaggactgctctcctactacacgggagctgtgattggtatagacgatgaggacgacagcaccttcacaataactgttgatcagaaaaccttccatttccaggcccgtgatgctgatgagcgagagaagtggatccatgccttagaagaaacaattcttcgacatactctccagcttcaaggtttggattcaggatttgttcctagtgtccaagattttgataagaaacttacagaagctgatgcttacctacaaatcttgattgaacaattaaagctttttgatgacaagcttcaaaactgcaaagaagatgaacagagaaagaaaattgaaactctcaaagagacaacaaatagcatggtagaatcaattaaacactgcattgtgttgctgcagattgccaaagaccagagtaatgcggagaagcacgcagatggaatgataagtactattaatcccgtagatgcaatatatcaacctagtcctttggaacctgtgatcagcacaatgccttcccagactgtgttacctccagaacctgttcagttgtgtaagtcagagcagcgtccatcttccctaccagttggacctgtgttggctaccttgggacatcatcagactcctacaccaaatagtacaggcagtggccattcaccaccgagtagcagtctcacttctccaagccacgtgaacttgtctccaaatacagtcccagagttctcttactccagcagtgaagatgaattttatgatgctgatgaattccatcaaagtggctcatccccaaagcgcttaatagattcttctggatctgcctcagtcctgacacacagcagctcgggaaatagtctaaaacgcccagataccacagaatcacttaattcttccttgtccaatggaacaagtgatgctgacctgtttgattcacatgatgacagagatgatgatgcggaggcagggtctgtggaggagcacaagagcgttatcatgcatctcttgtcgcaggttagacttggaatggatcttactaaggtagttcttccaacgtttattcttgaaagaagatctcttttagaaatgtatgcagacttttttgcacatccggacctgtttgtgagcattagtgaccagaaggatcccaaggatcgaatggttcaggttgtgaaatggtacctctcagcctttcatgcgggaaggaaaggatcagttgccaaaaagccatacaatcccattttgggcgagatttttcagtgtcattggacattaccaaatgatactgaagagaacacagaactagtttcagaaggaccagttccctgggtttccaaaaacagtgtaacatttgtggctgagcaggtttcccatcatccacccatttcagccttttatgctgagtgttttaacaagaagatacaattcaatgctcatatctggaccaaatcaaaattccttgggatgtcaattggggtgcacaacatagggcagggctgtgtctcatgtctagactatgatgaacattacattctcacattccccaatggctatggaaggtctatcctcacagtgccctgggtggaattaggaggagaatgcaatattaattgttccaaaacaggctatagtgcaaatatcatcttccacactaaacccttctatgggggcaagaagcacagaattactgccgagattttttctccaaatgacaagaagtctttttgctcaattgaaggggaatggaatggtgtgatgtatgcaaaatatgcaacaggggaaaatacagtctttgtagataccaagaagttgcctataatcaagaagaaagtgaggaagttggaagatcagaacgagtatgaatcccgcagcctttggaaggatgtcactttcaacttaaaaatcagagacattgatgcagcaactgaagcaaagcacaggcttgaagaaagacaaagagcagaagcccgagaaaggaaggagaaggaaattcagtgggagacaaggttatttcatgaagatggagaatgctgggtttatgatgaaccattactgaaacgtcttggtgctgccaagcattaggttggaagatgcaaagtttatacctgatgatcagggcagtaggcataattcagcaacaaacaatcttcctttgggagaaacctgttcattccaatcttctaattacagtggttcctatctcagggatactggactttctgacgcagatgaacaattaaggggaaaagcttcccttttccctctgtggcagttacgattttgacttcagtcctgagaaaaacttcaggttttgaaaatcagatgatgtcttctccttttccaaacaccacacgttgaaagcatttataaatccaagtctgaaactctgcgctctagtactgctgttaagatacacaacttgtttcttagttcatataatctcgggatacacacacacacacacatatatatacacacacatacgtatacacacacatacatatatataaatatacctgatgccagatttttttcataaatattctgcctactgtaaatatgggttcctctgagttgttttagaaaattagcgcaatgtattaaaatcaagtgttaggaaatttcatggtcttacctacaataacttttattttggaattgaactattattaaattgtatctaatcctggattacagtttaattaattattcttagtgcttaaggcttcataaagtaatttttccaaccttttttttaaaaa

SEQ ID NO: 21370 - DNA, 2755 bp, Homo sapiens
  source 1..2755: mol_type = unassigned DNA
agaaaaaggggtgctcgggagcagcccccggctacctcccctggaggcacagagggcgggggccttggcgaatggctttcttgctggccacttgcggagtgagtagaccccgagggtctgggagaggggccggcccctacccctgagtccccggggtcccggccgccaggccggagcgcgaatgtcgtgctcaccctgcctccttcccgccgccccctgggggtttggattcaggatttgttcctagtgtccaagattttgataagaaacttacagaagctgatgcttacctacaaatcttgattgaacaattaaagctttttgatgacaagcttcaaaactgcaaagaagatgaacagagaaagaaaattgaaactctcaaagagacaacaaatagcatggtagaatcaattaaacactgcattgtgttgctgcagattgccaaaagtactattaatcccgtagatgcaatatatcaacctagtcctttggaacctgtgatcagcacaatgccttcccagactgtgttacctccagaacctgttcagttgtgtaagtcagagcagcgtccatcttccctaccagttggacctgtgttggctaccttgggacatcatcagactcctacaccaaatagtacaggcagtggccattcaccaccgagtagcagtctcacttctccaagccacgtgaacttgtctccaaatacagtcccagagttctcttactccagcagtgaagatgaattttatgatgctgatgaattccatcaaagtggctcatccccaaagcgcttaatagattcttctggatctgcctcagtcctgacacacagcagctcgggaaatagtctaaaacgcccagataccacagaatcacttaattcttccttgtccaatggaacaagtgatgctgacctgtttgattcacatgatgacagagatgatgatgcggaggcagggtctgtggaggagcacaagagcgttatcatgcatctcttgtcgcaggttagacttggaatggatcttactaaggtagttcttccaacgtttattcttgaaagaagatctcttttagaaatgtatgcagacttttttgcacatccggacctgtttgtgagcattagtgaccagaaggatcccaaggatcgaatggttcaggttgtgaaatggtacctctcagcctttcatgcgggaaggaaaggatcagttgccaaaaagccatacaatcccattttgggcgagatttttcagtgtcattggacattaccaaatgatactgaagagaacacagaactagtttcagaaggaccagttccctgggtttccaaaaacagtgtaacatttgtggctgagcaggtttcccatcatccacccatttcagccttttatgctgagtgttttaacaagaagatacaattcaatgctcatatctggaccaaatcaaaattccttgggatgtcaattggggtgcacaacatagggcagggctgtgtctcatgtctagactatgatgaacattacattctcacattccccaatggctatggaaggtctatcctcacagtgccctgggtggaattaggaggagaatgcaatattaattgttccaaaacaggctatagtgcaaatatcatcttccacactaaacccttctatgggggcaagaagcacagaattactgccgagattttttctccaaatgacaagaagtctttttgctcaattgaaggggaatggaatggtgtgatgtatgcaaaatatgcaacaggggaaaatacagtctttgtagataccaagaagttgcctataatcaagaagaaagtgaggaagttggaagatcagaacgagtatgaatcccgcagcctttggaaggatgtcactttcaacttaaaaatcagagacattgatgcagcaactgaagcaaagcacaggcttgaagaaagacaaagagcagaagcccgagaaaggaaggagaaggaaattcagtgggagacaaggttatttcatgaagatggagaatgctgggtttatgatgaaccattactgaaacgtcttggtgctgccaagcattaggttggaagatgcaaagtttatacctgatgatcagggcagtaggcataattcagcaacaaacaatcttcctttgggagaaacctgttcattccaatcttctaattacagtggttcctatctcagggatactggactttctgacgcagatgaacaattaaggggaaaagcttcccttttccctctgtggcagttacgattttgacttcagtcctgagaaaaacttcaggttttgaaaatcagatgatgtcttctccttttccaaacaccacacgttgaaagcatttataaatccaagtctgaaactctgcgctctagtactgctgttaagatacacaacttgtttcttagttcatataatctcgggatacacacacacacacacatatatatacacacacatacgtatacacacacatacatatatataaatatacctgatgccagatttttttcataaatattctgcctactgtaaatatgggttcctctgagttgttttagaaaattagcgcaatgtattaaaatcaagtgttaggaaatttcatggtcttacctacaataacttttattttggaattgaactattattaaattgtatctaatcctggattacagtttaattaattattcttagtgcttaaggcttcataaagtaatttttccaaccttttttttaaaaa

SEQ ID NO: 21371 - DNA, 630 bp, Homo sapiens
  source 1..630: mol_type = unassigned DNA
agtcaggaccgcctgcaccgcagtccggggatcgggtcgaggggagaagaaaaaggggtgctcgggagcagcccccggctacctcccctggaggcacagagggcgggggccttggcgaatggctttcttgctggccacttgcggagtgagtagaccccgagggtctgggagaggggccggcccctacccctgagtccccggggtcccggccgccaggccggagcgcgaatgtcgtgctcaccctgcctccttcccgccgccccctgggggtttggattcaggatttgttcctagtgtccaagattttgataagaaacttacagaagctgatgcttacctacaaatcttgattgaacaattaaagctttttgatgacaagcttcaaaactgcaaagaagatgaacagagaaagaaaattgaaactctcaaagagacaacaaatagatgggattctgctatgttgcctaggctggtctcctagcctcaagcgatcctccttccttggcctaccaaagcagtgggattacagagcatggtagaatcaattaaacactgcattgtgttgctgcagattgccaaagaccagagtaatgcggagaagcacgcagatggaatgatagtaagtttaat

SEQ ID NO: 21372 - DNA, 2529 bp, Homo sapiens
  source 1..2529: mol_type = unassigned DNA
cggcccctacccctgagtccccggggtcccggccgccaggccggagcgcgaatgtcgtgctcaccctgcctccttcccgccgccccctgggctttttgatgacaagcttcaaaactgcaaagaagatgaacagagaaagaaaattgaaactctcaaagagacaacaaatagcatggtagaatcaattaaacactgcattgtgttgctgcagattgccaaaagtactattaatcccgtagatgcaatatatcaacctagtcctttggaacctgtgatcagcacaatgccttcccagactgtgttacctccagaacctgttcagttgtgtaagtcagagcagcgtccatcttccctaccagttggacctgtgttggctaccttgggacatcatcagactcctacaccaaatagtacaggcagtggccattcaccaccgagtagcagtctcacttctccaagccacgtgaacttgtctccaaatacagtcccagagttctcttactccagcagtgaagatgaattttatgatgctgatgaattccatcaaagtggctcatccccaaagcgcttaatagattcttctggatctgcctcagtcctgacacacagcagctcgggaaatagtctaaaacgcccagataccacagaatcacttaattcttccttgtccaatggaacaagtgatgctgacctgtttgattcacatgatgacagagatgatgatgcggaggcagggtctgtggaggagcacaagagcgttatcatgcatctcttgtcgcaggttagacttggaatggatcttactaaggtagttcttccaacgtttattcttgaaagaagatctcttttagaaatgtatgcagacttttttgcacatccggacctgtttgtgagcattagtgaccagaaggatcccaaggatcgaatggttcaggttgtgaaatggtacctctcagcctttcatgcgggaaggaaaggatcagttgccaaaaagccatacaatcccattttgggcgagatttttcagtgtcattggacattaccaaatgatactgaagagaacacagaactagtttcagaaggaccagttccctgggtttccaaaaacagtgtaacatttgtggctgagcaggtttcccatcatccacccatttcagccttttatgctgagtgttttaacaagaagatacaattcaatgctcatatctggaccaaatcaaaattccttgggatgtcaattggggtgcacaacatagggcagggctgtgtctcatgtctagactatgatgaacattacattctcacattccccaatggctatggaaggtctatcctcacagtgccctgggtggaattaggaggagaatgcaatattaattgttccaaaacaggctatagtgcaaatatcatcttccacactaaacccttctatgggggcaagaagcacagaattactgccgagattttttctccaaatgacaagaagtctttttgctcaattgaaggggaatggaatggtgtgatgtatgcaaaatatgcaacaggggaaaatacagtctttgtagataccaagaagttgcctataatcaagaagaaagtgaggaagttggaagatcagaacgagtatgaatcccgcagcctttggaaggatgtcactttcaacttaaaaatcagagacattgatgcagcaactgaagcaaagcacaggcttgaagaaagacaaagagcagaagcccgagaaaggaaggagaaggaaattcagtgggagacaaggttatttcatgaagatggagaatgctgggtttatgatgaaccattactgaaacgtcttggtgctgccaagcattaggttggaagatgcaaagtttatacctgatgatcagggcagtaggcataattcagcaacaaacaatcttcctttgggagaaacctgttcattccaatcttctaattacagtggttcctatctcagggatactggactttctgacgcagatgaacaattaaggggaaaagcttcccttttccctctgtggcagttacgattttgacttcagtcctgagaaaaacttcaggttttgaaaatcagatgatgtcttctccttttccaaacaccacacgttgaaagcatttataaatccaagtctgaaactctgcgctctagtactgctgttaagatacacaacttgtttcttagttcatataatctcgggatacacacacacacacacatatatatacacacacatacgtatacacacacatacatatatataaatatacctgatgccagatttttttcataaatattctgcctactgtaaatatgggttcctctgagttgttttagaaaattagcgcaatgtattaaaatcaagtgttaggaaatttcatggtcttacctacaataacttttattttggaattgaactattattaaattgtatctaatcctggattacagtttaattaattattcttagtgcttaaggcttcataaagtaatttttccaaccttttttttaaaaa

SEQ ID NO: 21373 - DNA, 2372 bp, Homo sapiens
  source 1..2372: mol_type = unassigned DNA
atctgcttcttttcttctcttttgggttgtttgctggatgacttgaatggttttgcaactgatcctgcatgaacgagtgcataggaacattctggatgaagtggtactgcaggttaggcagggatttgtatctgcaatggatgtagatcgatttgaaacgactgtggatctggctgcagttggagatgaaaattttaaaggataaaaatcagtgaagggagagagtaatgggctgctgctgctgctggcttgtgtttacagaagcccgtgatgctgatgagcgagagaagtggatccatgccttagaagaaacaattcttcgacatactctccagcttcaaggtttggattcaggatttgttcctagtgtccaagattttgataagaaacttacagaagctgatgcttacctacaaatcttgattgaacaattaaagctttttgatgacaagcttcaaaactgcaaagaagatgaacagagaaagaaaattgaaactctcaaagagacaacaaatagcatggtagaatcaattaaacactgcattgtgttgctgcagattgccaaaagtactattaatcccgtagatgcaatatatcaacctagtcctttggaacctgtgatcagcacaatgccttcccagactgtgttacctccagaacctgttcagttgtgtaagtcagagcagcgtccatcttccctaccagttggacctgtgttggctaccttgggacatcatcagactcctacaccaaatagtacaggcagtggccattcaccaccgagtagcagtctcacttctccaagccacgtgaacttgtctccaaatacagtcccagagttctcttactccagcagtgaagatgaattttatgatgctgatgaattccatcaaagtggctcatccccaaagcgcttaatagattcttctggatctgcctcagtcctgacacacagcagctcgggaaatagtctaaaacgcccagataccacagaatcacttaattcttccttgtccaatggaacaagtgatgctgacctgtttgattcacatgatgacagagatgatgatgcggaggcagggtctgtggaggagcacaagagcgttatcatgcatctcttgtcgcaggttagacttggaatggatcttactaaggtagttcttccaacgtttattcttgaaagaagatctcttttagaaatgtatgcagacttttttgcacatccggacctgtttgtgagcattagtgaccagaaggatcccaaggatcgaatggttcaggttgtgaaatggtacctctcagcctttcatgcgggaaggaaaggatcagttgccaaaaagccatacaatcccattttgggcgagatttttcagtgtcattggacattaccaaatgatactgaagagaacacagaactagtttcagaaggaccagttccctgggtttccaaaaacagtgtaacatttgtggctgagcaggtttcccatcatccacccatttcagccttttatgctgagtgttttaacaagaagatacaattcaatgctcatatctggaccaaatcaaaattccttgggatgtcaattggggtgcacaacatagggcagggctgtgtctcatgtctagactatgatgaacattacattctcacattccccaatggctatggaaggtctatcctcacagtgccctgggtggaattaggaggagaatgcaatattaattgttccaaaacaggctatagtgcaaatatcatcttccacactaaacccttctatgggggcaagaagcacagaattactgccgagattttttctccaaatgacaagaagtctttttgctcaattgaaggggaatggaatggtgtgatgtatgcaaaatatgcaacaggggaaaatacagtctttgtagataccaagaagttgcctataatcaagaagaaagtgaggaagttggaagatcagaacgagtatgaatcccgcagcctttggaaggatgtcactttcaacttaaaaatcagagacattgatgcagcaactgaagcaaagcacaggcttgaagaaagacaaagagcagaagcccgagaaaggaaggagaaggaaattcagtgggagacaaggttatttcatgaagatggagaatgctgggtttatgatgaaccattactgaaacgtcttggtgctgccaagcattaggttggaagatgcaaagtttatacctgatgatcagggcagtaggcataattcagcaacaaacaatcttcctttgggagaaacctgttcattccaatcttctaattacagtggttcctatctcagggatactggactttctgacgcagatgaacaattaaggggaaaagcttccctttt

SEQ ID NO: 21374 - DNA, 581 bp, Homo sapiens
  source 1..581: mol_type = unassigned DNA
atcaaggtgaaactccggggaccaggctccacagctgccataaactggatggcacgttagaagccggtgggtgtagggtttggattcaggatttgttcctagtgtccaagattttgataagaaacttacagaagctgatgcttacctacaaatcttgattgaacaattaaagctttttgatgacaagcttcaaaactgcaaagaagatgaacagagaaagaaaattgaaactctcaaagagacaacaaatagcatggtagaatcaattaaacactgcattgtgttgctgcagattgccaaaagtactattaatcccgtagatgcaatatatcaacctagtcctttggaacctgtgatcagcacaatgccttcccagactgtgttacctccagaacctgttcagttgtgtaagtcagagcagcgtccatcttccctaccagttggacctgtgttggctaccttgggacatcatcagactcctacaccaaatagtacaggcagtggccattcaccaccgagtagcagtctcacttctccaagccacgtgaacttgtctccaaatacagtcccagagttctctt

SEQ ID NO: 21375 - DNA, 4364 bp, Homo sapiens
  source 1..4364: mol_type = unassigned DNA
atttgttaaggctctgggaccaacgctgggcgaaccagctccgctccggaggggtctgcgcggctggcctcgcccgccccctagcggacccgtgcgatagtgcagcctcagccccagcgcacagcgccgcatccagacgctgtccgcgcgcgcagcctgggaggcgctcctcgctcgcctcctgtacccatccagcgaccagccaggctgcggcgaggggattccaaccgaggctccagtgagagacctcagcttagcatcacattaggtgcagccggcaggccatcccaactcgggccgggagcgcacgcgtcactggggccgtcagtcgccgtgcaacttccccggggggagtcaactttaggttcgcctgcggactcggtgcagtggaagccgctgaacatcccgaggaactggcacgctgggggctctgggcttgtggccggtagaggattcccgctcatttgcagtggctcagaggagggtggacccagcagatccgtccgtggagtctccaggagtggagccccgggcgcccctacaccctccgacacgccggatccggcccagccgcgccaagccgtaaagggctcgaaggccggggcgcaccgctgccgccagggtcatggagggcgcgctcgcagccaactggagcgccgaggcagccaacgccagcgccgcgccgccgggggccgagggcaaccgcaccgccggacccccgcggcgcaacgaggccctggcgcgcgtggaggtggcggtgctgtgtctcatcctgctcctggcgctgagcgggaacgcgtgtgtgctgctggcgctgcgcaccacacgccagaagcactcgcgcctcttcttcttcatgaagcacctaagcatcgccgacctggtggtggcagtgtttcaggtgctgccgcagttgctgtgggacatcaccttccgcttctacgggcccgacctgctgtgccgcctggtcaagtacttgcaggtggtgggcatgttcgcctccacctacctgctgctgctcatgtccctggaccgctgcctggccatctgccagccgctgcgctcgctgcgccgccgcaccgaccgcctggcagtgctcgccacgtggctcggctgcctggtggccagcgcgccgcaggtgcacatcttctctctgcgcgaggtggctgacggcgtcttcgactgctgggccgtcttcatccagccctggggacccaaggcctacatcacatggatcacgctagctgtctacatcgtgccggtcatcgtgctcgctgcctgctacggccttatcagcttcaagatctggcagaacttgcggctcaagaccgctgcagcggcggcggccgaggcgccagagggcgcggcggctggcgatggggggcgcgtggccctggcgcgtgtcagcagcgtcaagctcatctccaaggccaagatccgcacggtcaagatgactttcatcatcgtgctggccttcatcgtgtgctggacgcctttcttcttcgtgcagatgtggagcgtctgggatgccaacgcgcccaaggaagcctcggccttcatcatcgtcatgctcctggccagcctcaacagctgctgcaacccctggatctacatgctgttcacgggccacctcttccacgaactcgtgcagcgcttcctgtgctgctccgccagctacctgaagggcagacgcctgggagagacgagtgccagcaaaaagagcaactcgtcctcctttgtcctgagccatcgcagctccagccagaggagctgctcccagccatccacggcgtgacccaccagccagggccagggctgcagcctgaggctcaggctgtgctggcataagtgctctgctcctaggtgatggcgtatgtttgtgtataaggtacctatcagtttgtatccctcccctccttggggtggcttcagtggggtggagagtggcctccatgatggaagatgataggggactcagccatcagacaacaccctggcctcctacacgtacttctaccaccctgaacccactgctgccctgggcagtgagtggcttgttttttctcctggacttgtaatttcactccagtatatttttacttcttcattctgggatattgtgaaaagcggtaaatataggattggtgaccaattgggtcaggaagtccagtgttctggacttggggtaagcagtggggttgggacctcagatgggaagggtggtgctaagatcctcctgacctcaaagtgtatttgcctttaagcgaacaaatgctggggtccttggggaccagcttgtcagagggtagccctaagagaaggggattaccttgtaagaccatctggcgcagtggacctattagaacttgggttaaaaatgtttaagaagctaatgtttaagaagcatttgggaaagaaaaagaaataaatgtatccagataggaaaagaagaagtaaaactatttgcagatgacacagttttgtatatagaaaatcctaaggaactcacacacacacacacacacacacacgcacacagctattagaactaataagcaagttccgcaaggtttcaagatacaagatcaatatacaaaaatgaattgtatttctttatactagcaacaaacaatatgaaaacgaagttaaataattccatttataataccatcagaaagaataaaataggaatcaacttaacaaaacaagtgcaagactgaaaactacaaaattggaaagaaattaaagaaggcttaaataaatggaaagacatcctgtgttcatggatcagacttagtattgttaagatggcaatactatcctaactgacatgcagattcagtgcaatccttatgaaaatcatagctggcttctttacagaaattgataagctagtcccaaaattcataaagaaatgcaagggacccagaatatccaaataagccttgaaaaagaacaaagttggtggattcacacttcctgatttcataatttacgataaaggtaatcagctcagtgtgttactggtttaaggatagacatacggagcagaataaagagtacagatatgaacacttatacttacggtcaattgatttttgacaaggttcccaagacaattcaatagagaaaggagagtcttttcaacaaatggcaccgagacaatgatatgcaagtgcaaaagaatgaggttggacctttactcacactatgtgcaaaaatcaactcaaaacgcatccaagatctaaatataagagctgaaactataaaatcttagaaagaaacataggcatagatctttgtaaccttgaattaggcagtggtttcttagatatgataccaaagacacaagcaaccaatggaaaaataggtaaattggacttaatcaagatttgaagcttttgtgattgaaaagaccctatcaagaaggtgaaaagataacctgcagaatgggagaaaatatttgcgagtcatatatatgataaggggcttgtatctggaatatataaataactcttataacacaacaataaggagaaaaataaatcaatttaaaaaatgggctaacggtttgaatagacatttctccaaagaagatatgcaaatggctactaagcacatgaaaaaatactcaacattattattcattagggaaatgcaagtcaaaatcacaatgagattccagtttacaatcactaggatggctacaataaaaagatggacaagaacgagtgtcggtgaggatgtagagaaactggtagaaatttaaattgttggtgggaatgtaaatggtgcacctgctttgaaaaacagtttggcagtacctcaaaaagttaaacgtagagtgaccatatgacccaggaatgccactcctaggtatttacccaagagaaatgaaaacgtacatacacacaaaaacttgtacaccaatgttcatagcaacattatttgtaatagccaaaaagtggaaacaacccaaatgtctaccaactgatgaatgggaaataaaatgtggtctgtccacgcaatggaacattattagactctaaaaagaaatgaagtactcacacatgccacaacatggatgagccttgaaaacttgctaagtgaaagaagccaggtgcaaaagcccacatattgtctgactgcattgaaatgcaatgtctaaaatggacgaatctatatagagtgaatatagattagcgtttgccagggcctggaggctgtgagagatgaggcatgactactaagggtttggggtttctttttcgggtgatgaaaatgttctgaaattagtggtgattgtgcacgattttgagaatgtactaaaaaccaatgaactttaaaaaataaaaataaacaaa

SEQ ID NO: 21376 - DNA, 743 bp, Homo sapiens
  source 1..743: mol_type = unassigned DNA
aaaataaacccatttgttaaggctctgggaccaacgctgggcgaaccagctccgctccggaggggtctgcgcggctggcctcgcccgccccctagcggacccgtgcgatagtgcagcctcagccccagcgcacagcgccgcatccagacgctgtccgcgcgcgcagcctgggaggcgctcctcgctcgcctcctgtacccatccagcgaccagccaggctgcggcgaggggattccaaccgaggctccagtgagagacctcagcttagcatcacattaggtgcagccggcaggccatcccaactcgggccgggagcgcacgcgtcactggggccgtcagtcgccgtgcaacttccccggggggagtcaactttagtggaagccgctgaacatcccgaggaactggcacgctgggggctctgggcttgtggccggtagaggattcccgctcatttgcagtggctcagaggagggtggacccagcagatccgtccgtggagtctccaggagtggagccccgggcgcccctacaccctccgacacgccggatccggcccagccgcgccaagccgtaaagggctcgaaggccggggcgcaccgctgccgccagggtcatggagggcgcgctcgcagccaactggagcgccgaggcagccaacgccagcgccgcgccgccgggggccgagggcaaccgcaccgccggacccccgcggcgcaacgaggccctggcgcgcgtggaggtgg

SEQ ID NO: 21377 - DNA, 600 bp, Homo sapiens
  source 1..600: mol_type = unassigned DNA
tggagattccctcggggaggtgatttggttttagattcccactcccggaggaacgttgctgattttgaccctcccttctcccccagtggaagccgctgaacatcccgaggaactggcacgctgggggctctgggcttgtggccggtagaggattcccgctcatttgcagtggctcagaggagggtggacccagcagatccgtccgtggagtctccaggagtggagccccgggcgcccctacaccctccgacacgccggatccggcccagccgcgccaagccgtaaagggctcgaaggccggggcgcaccgctgccgccagggtcatggagggcgcgctcgcagccaactggagcgccgaggcagccaacgccagcgccgcgccgccgggggccgagggcaaccgcaccgccggacccccgcggcgcaacgaggccctggcgcgcgtggaggtggcggtgctgtgtctcatcctgctcctggcgctgagcgggaacgcgtgtgtgctgctggcgctgcgcaccacacgccagaagcactcgcgcctcttcttcttcatgaagcacctaagcatcgccgacctggtggtggcagtgtttcag

SEQ ID NO: 21378 - DNA, 513 bp, Homo sapiens
  source 1..513: mol_type = unassigned DNA
accagtcacggaccctggacccagcgcacccgcaccatggccggccccagcctcgcttgctgtctgctcggcctcctggcgctgacctccgcctgctacatccagaactgccccctgggaggcaagagggccgcgccggacctcgacgtgcgcaagtgcctcccctgcggccccgggggcaaaggccgctgcttcgggcccaatatctgctgcgcggaagagctgggctgcttcgtgggcaccgccgaagcgctgcgctgccaggaggagaactacctgccgtcgccctgccagtccggccagaaggcgtgcgggagcgggggccgctgcgcggtcttgggcctctgctgcagcccggacggctgccacgccgaccctgcctgcgacgcggaagccaccttctcccagcgctgaaacttgatggctccgaacaccctcgaagcgcgccactcgcttcccccatagccaccccagaaatggtgaaaataaaataaagcaggtttttctcctcta

SEQ ID NO: 21379 - DNA, 665 bp, Homo sapiens
  source 1..665: mol_type = unassigned DNA
gcccacgtggagaacgccagggagctgtgagagtgtgcagtcgcgttcctgctgtccggacacttttttcctctactgagactcatctggtagatccgcaggccagtcctcccaggggctgaagttgtgaaatatgggttttctaagaagattaatctatcggcgtagaccaatgatctatgtagaatcttctgaggagtccagtgatgagcaacctgacgaagtggaatcaccaactcaaagtcaggattctacacctgctgaagagagagaggatgagggagcatctgcagctcaagggcaggagcctgaagctgatagccaggaactggttcagccaaagactgggtgtgagcttggagatggtcctgataccaagagggtgtgcctgcgaaatgaagagcagatgaaactgcccgcagaagggccagagcctgaagcggatagccaggaacaggttcacccgaagactgggtgtgagcgcggagatggtcctgatgtccaggagttgggcctgccaaatccagaggaggtgaaaacacctgaggaagatgaagggcaatcacagccttaaaagaagacacgctgaaatggttcaggctgctcctgtgttggaaatttgaccattaaaattctcccaataaagctttacagccttctgcaaa

SEQ ID NO: 21380 - DNA, 551 bp, Homo sapiens
  source 1..551: mol_type = unassigned DNA
tgcccgtcttgtgtccgcacagaggtctgcaaggagagagagtgtcttcattctttccgccatcttgattctttctcactgaccaagactcagccgtgggaaatatgagtgagcttctaagagcaagatcccaatcctcagaaagaggaaatgaccaagagtcttcccagccggttggatctgtgattgtccaggagcccactgaggaaaaacgtcaagaagaggaaccaccaactgataatcagggtattgcacctagtggggagattgaaaatcaagcagtgcctgcttttcaagggcctgacatggaagcttttcaacaggaactggctctgcttaagatagaggatgagcctggagatggtcctgatgtcagggagggtattatgcccacttttgatctcactaaagtgctggaagcaggtgatgcgcaaccataggtttcaagcaagacaaatgaagactgaaaccaagaacgttattcttaatctggaaatttgactgataatattctcttaataaagttttaagttttctgcaaagaatcctta

SEQ ID NO: 21381 - DNA, 311 bp, Homo sapiens
  source 1..311: mol_type = unassigned DNA
agttgtgagagaatgtgtggaggagccagctggctttggacaggtcctgcggcacagtctgtggcttctgagggaaaagggcctcggggccgtcatccagctcctcccagtgggaaatatgagtgagcttctaagagcaagatcccaatcctcagaaagaggaaatgaccaagagtcttcccagccggttggatctgtgattgtccaggagcccactgaggaaaaacgtcaagaagaggaaccaccaactgataatcagggtattgcacctagtggggagattgaaaatcaagcagtgcctgcttttcaag

SEQ ID NO: 21382 - DNA, 742 bp, Homo sapiens
  source 1..742: mol_type = unassigned DNA
cttcattctttctcactgactgggactcagctggtaggtccgcagatcagtcctcctgggaatttagttgtgagtgaatgtgaaggggagccagcgggctttggacaggtcctgcggcacagaaaccacagtccgtggcttctgagagaaaagggcctcgccgtcgacgtccggctcctcccaggtcgcgacgccccatgggcctttgtcgtcgtttctgggccaggacgacggaggaaggtggaccgtagaggggaggaatcacgtgaagatggggcgagtgctgggcgtgctgttggagagtgaaacatgagtggacatcaaagaacaagatccagatctagagaaagaagagatgatcaagactctaatcatccagtaggggctgtggttgcccaggagctgcccagtaatgaccagcttcaacaagaggaaccaccaattgaaagtcaggattatacacctggtcaagagagagacgagggagcactggacttccaagtgctaggcctggcagcctatctctgggaactgactcggtcaaagactgggggtgaacgtggagatggtcctaatgtcaagggagaatttctgccaaatctggagcctgttaaaataccagaagcaggtgaagggcaaccatcggtttaaatgaagacaagctgaaaccatacatgcagtctttatgttggaaacttcaccagtaaaattctctcaataaagtttcacaattgtctgcaaa

SEQ ID NO: 21383 - DNA, 577 bp, Homo sapiens
  source 1..577: mol_type = unassigned DNA
gcacagaaaccacagtccgtggcttctgagagaaaagggcctcgccgtcgacgtccggctcctcccaggtcgcgacgccccatgggcctttgtcgtcgtttctgggccaggacgacggaggaaggtggaccgtagaggggaggaatcacgtgaagatggggcgagtgctgggcgtgctgttggagtatgccactttcagagtgaaacatgagtggacatcaaagaacaagatccagatctagagaaagaagagatgatcaagactctaatcatccagtaggggctgtggttgcccaggagctgcccagtaatgaccagcttcaacaagaggaaccaccaattgaaagtcaggattatacacctggtcaagagagagacgagggagcactggacttccaagtgctaggcctggcagcctatctctgggaactgactcggtcaaagactgggggtgaacgtggagatggtcctaatgtcaagggagaatttctgccaaatctggagcctgttaaaataccagaagcaggtgaagggcaaccatcggtttaaatgaagacaagctgaaaccatacatgca

SEQ ID NO: 21384 - DNA, 499 bp, Homo sapiens
  source 1..499: mol_type = unassigned DNA
gccacttctcttcccttcattcttcgccaggctctctgctgactcaagttcttcagttcacgatcttctagttgcagcgatgagtgcacgagtgagatcaagatccagaggaagaggagatggtcaggaggctcccgatgtggttgcattcgtggctcccggtgaatctcagcaagaggaaccaccaactgacaatcaggatattgaacctggacaagagagagaaggaacacctccgatcgaagaacgtaaagtagaaggtgattgccaggaaatggatctggaaaagactcggagtgagcgtggagatggctctgatgtaaaagagaagactccacctaatcctaagcatgctaagactaaagaagcaggagatgggcagccataagttaaaaagaagacaagctgaagctacacacatggctgatgtcacattgaaaatgtgactgaaaatttgaaaattctctcaataaagtttgagttttctctgaagaagtca

SEQ ID NO: 21385 - DNA, 487 bp, Homo sapiens
  source 1..487: mol_type = unassigned DNA
tgacactgctgaggtctaaacaaggaggcagaagtagtcttcagttcacgatcttctagttgcagcgatgagtgcacgagtgagatcaagatccagaggaagaggagatggtcaggaggctcccgatgtggttgcattcgtggctcccggtgaatctcagcaagaggaaccaccaactgacaatcaggatattgaacctggacaagagagagaaggaacacctccgatcgaagaacgtaaagtagaaggtgattgccaggaaatggatctggaaaagactcggagtgagcgtggagatggctctgatgtaaaagagaagactccacctaatcctaagcatgctaagactaaagaagcaggagatgggcagccataagttaaaaagaagacaagctgaagctacacacatggctgatgtcacattgaaaatgtgactgaaaatttgaaaattctctcaataaagtttgagttttctctgaagaagtca

SEQ ID NO: 21386 - DNA, 6139 bp, Homo sapiens
  source 1..6139: mol_type = unassigned DNA
gtcttcctcccccagggttgtggccacgcgcagcggcggcggttgttccgcttcccctccggcccgggccgtcgccattgccgaaggctccctcccctcccctccctggcgtgcgcaggactccgccgccgctgggcctagcggtagcagcggctgctccagcgcggcgtctcttcccgccccgcttccccttccctcccctcccctccccgcaccgcgcgctagcccggggcggctccgcagcccgccgggagctctgaccgaggcgcctcgctggggcggggaccttgccttgcccggggccatttcataattctgaatcatgtctgataacggagaactggaagataagcctccagcacctcctgtgcgaatgagcagcaccatctttagcactggaggcaaagaccctttgtcagccaatcacagtttgaaacctttgccctctgttccagaagagaaaaagcccaggcataaaatcatctccatattctcaggcacagagaaaggaagtaaaaagaaagaaaaggaacggccagaaatttctcctccatctgattttgagcacaccatccatgttggctttgatgctgttactggagaattcactggcatgccagaacagtgggctcgattactacagacctccaatatcaccaaactagagcaaaagaagaatcctcaggctgtgctggatgtcctaaagttctacgactccaacacagtgaagcagaaatatctgagctttactcctcctgagaaagatggctttccttctggaacaccagcactgaatgccaagggaacagaagcacccgcagtagtgacagaggaggaggatgatgatgaagagactgctcctcccgttattgccccgcgaccggatcatacgaaatcaatttacacacggtctgtaattgaccctgttcctgcaccagttggtgattcacatgttgatggtgctgccaagtctttagacaaacagaaaaagaagactaagatgacagatgaagagattatggagaaattaagaactatcgtgagcataggtgaccctaagaaaaaatatacaagatatgaaaaaattggacaaggggcttctggtacagttttcactgctactgacgttgcactgggacaggaggttgctatcaaacaaattaatttacagaaacagccaaagaaggaactgatcattaacgagattctggtgatgaaagaattgaaaaatcccaacatcgttaactttttggacagttacctggtaggagatgaattgtttgtggtcatggaataccttgctggggggtcactcactgatgtggtaacagaaacgtgcatggatgaagcacagattgctgctgtatgcagagagtgtttacaggcattggagtttttacatgctaatcaagtgatccacagagacatcaaaagtgacaatgtacttttgggaatggaaggatctgttaagctcactgactttggtttctgtgcccagatcacccctgagcagagcaaacgcagtaccatggtcggaacgccatactggatggcaccagaggtggttacacggaaagcttatggccctaaagtcgacatatggtctctgggtatcatggctattgagatggtagaaggagagcctccatacctcaatgaaaatcccttgagggccttgtacctaatagcaactaatggaaccccagaacttcagaatccagagaaactttccccaatatttcgggatttcttaaatcgatgtttggaaatggatgtggaaaaaaggggttcagccaaagaattattacagcatcctttcctgaaactggccaaaccgttatctagcttgacaccactgatcatggcagctaaagaagcaatgaagagtaaccgttaacatcactgctgtggcctcatactcttttttccattttctacaagaagccttttagtatatgaaaattattactctttttggggtttaaagaaatggtctgcataacctgaatgaaagaagcaaatgactattctctgaagacaaccaagagaaaattgcaaaaagacaagtatgacttttatatgaaccccttctttagggtccagaaggaattgtggactgaatcactagccttaggtctttcagcaaacagcctatcagggccatttatcatgtgtgagatttgcattttactttgctgactttgttgtaatagatcccattcattgtcccctttggggtatttccaatacttgaatggcagattggagtttttcagagtatgtgtttcatctgctagtctttctctccttcatagcttttcttttcctggacttgctccttttgagttgcttttgcgtttctcatgcctaggcaagtgtaatagaaattatgtagctccttatgttggcaaaggagctctatatagtttcactttgtataaaagttaggaccagctgttgttacatgtaatattttagttcagaacttgacctgaaggaagggaagaaaagtatgtgatttttaccttttttaacaaatgtgaaaaagtcagttttagaaatttcgtggtagtaagttcggcatttgttacatgtatagagagaagactaataatctctatttataactaaatcattgagatagaaaaagattcccattgactgtagacttcttcccattttgtcttcccttctgcctgtttccccttcaggcttggctctaggaaccaaagtgatttgttgttgttccaacctgggctttgtgactttggttagtgccactaccttcttccctcctttcccccttcaatttggaaataaatttctgtatatgttgcaattttaggtttaggtttgttctttttctttttcattaatcctctctcacctcacagataccccctcccatggcaaataatataataaccagtgaattttcaggaatttaaaaattagcttttttccacttaaaggagaaaaatatttgggactagcagcagaggcagtaagagatgtgaaccttggtgagctctgatacagtgagaagagattatactcatgaaagagaatgttagtgttacagagaagcagccgatagcaaatcgactgtagagacttggcggcggtggcattgccccaggtcgtcagcagtgtggtattatctatgagaacttgagcgacagagtatttcttgatgaatttatagatcatttgagatgttgagttactttagtttagttttgttttgttttttcaaataagtagagactattgtaaaaaacgagaaaggaaaatgaaatgtgcgtgttgatagcaataatttgtttcttttaaagattctaaaaggtctgagacctgtagcattaattatttgagtgccctcccttctcccctcccctcccttttctcttctcttttttcctctcctcttcttctcctttattcattgttttgcttttggagtgggtgttgttcaagtatctgtggtttggttctggcattttgttcccaccatccccttcccccattaacttcccccctgcttgccatcctgcagtagtataaatcatgaataaaaaataattttgctgttgtagtatacattggagaaactggcaggttttatttccattattttatttccactatatctatgataagatgcaattataaggagagaagtgactgttttttattgataaggcaagattttcagaaaaatgagtaaaataattaatgaaacatatttagagcacttaatggtctctgttttcaatataattcttgatttcatttttctctggaatatattggccttctacagctattactgaattatagaaactggtttatttctggcagaaagctgcagtgccacctgagttccaaattttaccattctttgtaaacagttggatggattatgataaagaagatgctaccaatgaaatagaaaaccaacgagatgagaagactgtgatcctcatgtactcagaggcacttccctcctaagtcaaagaccatcctcactgactatgtgccaacgcctcgtttcaggcttgtgactcaacaaagggcttttccattgatagaagcagtttgggatttgtagttgcgacttcttcgatagttacctgcacgtccattgctggcaactgacttgtcattaaaacctggctctttggttaagggagctacgctgtggtttattcttaagttacgtggataaactaacctctaacagaaatatactttggttaattttgaaatgtgtcatttttaaacaatcttaaaagtaatacagaattgtgatttattaattttaaaacattcagaacttgttgaaagaaaaattatatctgaatcaagattcatgttttttatttttattttttttgatacagagtctcactctgtcactcaggctggagtgcagtgacatgatctcagctcactgcaacctccgcttcctgggttcaagcaattctcatgcctcagcctcctgagtagctgagaccacaggcacccgccaccacacccagctatttttttgtatttttagtagagacagagtctcaccacattgcccaggctggtctccaactcctgagctcaggcagtctgcccaccttggcctcccaaagtgctgcagttacaggcgtgagccactgcacctggcctcatgttttttaaataattgccttttatatttaccctttttgtcatcactttagaatgaaaattcccatttaaatctgaaagttaccttaatagtcctcttgtgttattaggacagtattattatagtacttatttattttattttagatttaaagttatcttctctttttcttttttcttctgctgcttttagggacaattaaaactgggaaactatgaaacatggaacattttatcctacctgaaagtaaacgagtaattgtgaagcataagacactgaggctaatacaactctgtcttcatgtgttgactgcctggcacatagtattcattctcttccctttaacatagaagtgtccagctgcgtacagtctagtaaccagcaactgtaaacgaacctgtgcctctaacaagcgattctaaaccacctatgagtatttcttttagggctcacttaaatacatgtttgtatatactgtattctagccagaataattttagatctgatcaggtagtagctaaaattagaaaaaaacaaaatagatgcttaaagaatttgcatccatttttgagtctaaatcttttaaaatatactgagatccacatctagtgaaatgtcagtgtcaaaatattatagattatagctaaaatccagattaatactcatttggggttttttatagtggaacttcatagtaatacaaaaagcagattgtcttcctgtctccgctgctcccacagtaggtattgaaactggtaaaatcagttttttgatagtgtgtgtatataagaaaaaatagatacacacattcttttttctcagtcaacacattgattgaacactctggcaaagatgctgtggtggatgaggttggagttcgaaagaagaagcaagcgctggcctggccttgaaagaaccgaagtctttcccattcacttctctagaaagctgccaagacagaggcagaaagaaatggatgatagttctgtcaagcacacttctgttctcttagaacttagaagtgtttctaagagaacagaagtaataagagaaacagttacgtgtggaattcaacatctttggttggaacgcattggctttttttttcttgttttgatagaaatggaattaagcaaaagtagtttttgtcttttctgttgtcttcaaattttatgccttttatttttaatttaatcccgttcaattatttaattgttatacattgacattaactgctgtattttgactttgttcaataattttgttctttcagggctagaaataaactttttaaaaaaagtgtgcatttttccctttcctaaacttttattctttcttttgatcagcgtaaaagaatattttaatgtcttttgatagcataaaagaatatttaaatgtcttaataggttttcaaagaacatttagtatttttagtgataaatgttttaaaccttttaa

SEQ ID NO: 21387 - DNA, 2178 bp, Homo sapiens
  source 1..2178: mol_type = unassigned DNA
gagctgtgaaattagttgtaactgaaaatgtctgacggtctggataatgaagagaaacccccggctcctccactgaggatgaatagtaacaaccgggattcttcagcactcaaccacagctccaaaccacttcccatggcccctgaagagaagaataagaaagccaggcttcgctctatcttcccaggaggaggggataaaaccaataagaagaaggagaaagagcgcccagagatctctcttccttcagactttgagcatacgattcatgtggggtttgatgcagtcaccggggaattcactccagatctctatggctcacagatgtgcccagggaagctcccagagggaattccagagcaatgggcacgattactccaaacttccaacataacaaaattggaacagaagaagaacccacaagctgttctagatgttctcaaattctatgattccaaagaaacagtcaacaaccagaaatacatgagctttacatcaggagataaaagtgcacatggatacatagcagcccatccttcgagtacaaaaacagcatctgagcctccattggcccctcctgtgtctgaagaagaagatgaagaggaagaagaagaagaagatgaaaatgagccaccaccagttatcgcaccaagaccagagcatacaaaatcaatctatactcgttctgtggttgaatccattgcttcaccagcagtaccaaataaagaggtcacaccaccctctgctgaaaatgccaattccagtactttgtacaggaacacagatcggcaaagaaaaaaatccaagatgacagatgaggagatcttagagaagctaagaagcattgtgagtgttggggacccaaagaaaaaatacacaagatttgaaaaaattggtcaaggggcatcaggtactgtttatacagcactagacattgcaacaggacaagaggtggccataaagcagatgaaccttcaacagcaacccaagaaggaattaattattaatgaaattctggtcatgagggaaaataagaaccctaatattgttaattatttagatagctacttggtgggtgatgaactatgggtagtcatggaatacttggctggtggctctctgactgatgtggtcacagagacctgtatggatgaaggacagatagcagctgtctgcagagagtgcctgcaagctttggatttcctgcactcaaaccaggtgatccatagagatataaagagtgacaatattcttctcgggatggatggctctgttaaattgactgactttgggttctgtgcccagatcactcctgagcaaagtaaacgaagcactatggtgggaaccccatattggatggcacctgaggtggtgactcgaaaagcttatggtccgaaagttgatatctggtctcttggaattatggcaattgaaatggtggaaggtgaacccccttaccttaatgaaaatccactcagggcattgtatctgatagccactaatggaactccagagctccagaatcctgagagactgtcagctgtattccgtgactttttaaatcgctgtcttgagatggatgtggataggcgaggatctgccaaggagcttttgcagcatccatttttaaaattagccaagcctctctccagcctgactcctctgattatcgctgcaaaggaagcaattaagaacagcagccgctaagactgcaagccttacacctcaccatctccctcatgagtaagactgaaataaaactctgctgcaggaaagatggaagaaaagacagtcaaatggggtgggggttctttacctttcaaatgaatagaaacttcttataagcctttttcctactccctcagattatgtaatttatttgtaagcctgaatcgcagcccaaacagggcagcaatgttgaagtgaccataaagtggtcacttccaccgtgaagcgaaagagccagtagtgaatcccctcattttgtgcattcactttgaagaaaaaggtttctcaaagatgcacactccctcttcatagtgttgtgtttgtttttaagttagagagtagtccctcttgcattcaaacctccttcaaaactccttacccaatgtgatgtttttcacttgcattgtcattagatgtccagaaaaaaaaaagatgtcaaaatgtttttct

SEQ ID NO: 21388 - DNA, 2241 bp, Homo sapiens
  source 1..2241: mol_type = unassigned DNA
gagctgtgaaattagttgtaactgaaaatgtctgacggtctggataatgaagagaaacccccggctcctccactgaggatgaatagtaacaaccgggattcttcagcactcaaccacagctccaaaccacttcccatggcccctgaagagaagaataagaaagccaggcttcgctctatcttcccaggaggaggggataaaaccaataagaagaaggagaaagagcgcccagagatctctcttccttcagactttgagcatacgattcatgtggggtttgatgcagtcaccggggaattcactaactcccctttccagacctctagacctgtgacggtcgcttcaagtcaatcagagggaaaaatgccagatctctatggctcacagatgtgcccagggaagctcccagagggaattccagagcaatgggcacgattactccaaacttccaacataacaaaattggaacagaagaagaacccacaagctgttctagatgttctcaaattctatgattccaaagaaacagtcaacaaccagaaatacatgagctttacatcaggagataaaagtgcacatggatacatagcagcccatccttcgagtacaaaaacagcatctgagcctccattggcccctcctgtgtctgaagaagaagatgaagaggaagaagaagaagaagatgaaaatgagccaccaccagttatcgcaccaagaccagagcatacaaaatcaatctatactcgttctgtggttgaatccattgcttcaccagcagtaccaaataaagaggtcacaccaccctctgctgaaaatgccaattccagtactttgtacaggaacacagatcggcaaagaaaaaaatccaagatgacagatgaggagatcttagagaagctaagaagcattgtgagtgttggggacccaaagaaaaaatacacaagatttgaaaaaattggtcaaggggcatcaggtactgtttatacagcactagacattgcaacaggacaagaggtggccataaagcagatgaaccttcaacagcaacccaagaaggaattaattattaatgaaattctggtcatgagggaaaataagaaccctaatattgttaattatttagatagctacttggtgggtgatgaactatgggtagtcatggaatacttggctggtggctctctgactgatgtggtcacagagacctgtatggatgaaggacagatagcagctgtctgcagagagtgcctgcaagctttggatttcctgcactcaaaccaggtgatccatagagatataaagagtgacaatattcttctcgggatggatggctctgttaaattgactgactttgggttctgtgcccagatcactcctgagcaaagtaaacgaagcactatggtgggaaccccatattggatggcacctgaggtggtgactcgaaaagcttatggtccgaaagttgatatctggtctcttggaattatggcaattgaaatggtggaaggtgaacccccttaccttaatgaaaatccactcagggcattgtatctgatagccactaatggaactccagagctccagaatcctgagagactgtcagctgtattccgtgactttttaaatcgctgtcttgagatggatgtggataggcgaggatctgccaaggagcttttgcagcatccatttttaaaattagccaagcctctctccagcctgactcctctgattatcgctgcaaaggaagcaattaagaacagcagccgctaagactgcaagccttacacctcaccatctccctcatgagtaagactgaaataaaactctgctgcaggaaagatggaagaaaagacagtcaaatggggtgggggttctttacctttcaaatgaatagaaacttcttataagcctttttcctactccctcagattatgtaatttatttgtaagcctgaatcgcagcccaaacagggcagcaatgttgaagtgaccataaagtggtcacttccaccgtgaagcgaaagagccagtagtgaatcccctcattttgtgcattcactttgaagaaaaaggtttctcaaagatgcacactccctcttcatagtgttgtgtttgtttttaagttagagagtagtccctcttgcattcaaacctccttcaaaactccttacccaatgtgatgtttttcacttgcattgtcattagatgtccagaaaaaaaaaagatgtcaaaatgtttttct

SEQ ID NO: 21389 - DNA, 2510 bp, Homo sapiens
  source 1..2510: mol_type = unassigned DNA
agaggaaaggtcttgacggggtggctggatccgtggcagaatccagttccagattctagacttgagggttctgggctgttggtctgtagaagcgaaggagagaaggactcaaatccaggccaagtgtatggctgtctgaggtattggaacagaaggaggtccattcctgttggtgacaacaccgtggccctgttctgggatgagcaaggtgtaaaggtttcccccaagaaagagcagctgagtccttgcatcttgtggcagctggtgtgcccagcactgagtctgtaggagctgaagccagcccggacccttctcatgggcagtgcccacctgtgctgaagtcctgcagcggtggcggtgtgaggagctgtgaaattagttgtaactgaaaatgtctgacggtctggataatgaagagaaacccccggctcctccactgaggatgaatagtaacaaccgggattcttcagcactcaaccacagctccaaaccacttcccatggcccctgaagagaagaataagaaagccaggcttcgctctatcttcccaggaggaggggataaaaccaataagaagaaggagaaagagcgcccagagatctctcttccttcagactttgagcatacgattcatgtggggtttgatgcagtcaccggggaattcactggaattccagagcaatgggcacgattactccaaacttccaacataacaaaattggaacagaagaagaacccacaagctgttctagatgttctcaaattctatgattccaaagaaacagtcaacaaccagaaatacatgagctttacatcaggagataaaagtgcacatggatacatagcagcccatccttcgagtacaaaaacagcatctgagcctccattggcccctcctgtgtctgaagaagaagatgaagaggaagaagaagaagaagatgaaaatgagccaccaccagttatcgcaccaagaccagagcatacaaaatcaatctatactcgttctgtggttgaatccattgcttcaccagcagtaccaaataaagaggtcacaccaccctctgctgaaaatgccaattccagtactttgtacaggaacacagatcggcaaagaaaaaaatccaagatgacagatgaggagatcttagagaagctaagaagcattgtgagtgttggggacccaaagaaaaaatacacaagatttgaaaaaattggtcaaggggcatcaggtactgtttatacagcactagacattgcaacaggacaagaggtggccataaagcagatgaaccttcaacagcaacccaagaaggaattaattattaatgaaattctggtcatgagggaaaataagaaccctaatattgttaattatttagatagctacttggtgggtgatgaactatgggtagtcatggaatacttggctggtggctctctgactgatgtggtcacagagacctgtatggatgaaggacagatagcagctgtctgcagagagtgcctgcaagctttggatttcctgcactcaaaccaggtgatccatagagatataaagagtgacaatattcttctcgggatggatggctctgttaaattgactgactttgggttctgtgcccagatcactcctgagcaaagtaaacgaagcactatggtgggaaccccatattggatggcacctgaggtggtgactcgaaaagcttatggtccgaaagttgatatctggtctcttggaattatggcaattgaaatggtggaaggtgaacccccttaccttaatgaaaatccactcagggcattgtatctgatagccactaatggaactccagagctccagaatcctgagagactgtcagctgtattccgtgactttttaaatcgctgtcttgagatggatgtggataggcgaggatctgccaaggagcttttgcagcatccatttttaaaattagccaagcctctctccagcctgactcctctgattatcgctgcaaaggaagcaattaagaacagcagccgctaagactgcaagccttacacctcaccatctccctcatgagtaagactgaaataaaactctgctgcaggaaagatggaagaaaagacagtcaaatggggtgggggttctttacctttcaaatgaatagaaacttcttataagcctttttcctactccctcagattatgtaatttatttgtaagcctgaatcgcagcccaaacagggcagcaatgttgaagtgaccataaagtggtcacttccaccgtgaagcgaaagagccagtagtgaatcccctcattttgtgcattcactttgaagaaaaaggtttctcaaagatgcacactccctcttcatagtgttgtgtttgtttttaagttagagagtagtccctcttgcattcaaacctccttcaaaactccttacccaatgtgatgtttttcacttgcattgtcattagatgtccagaaaaaaaaaagatgtcaaaatgtttttctaaaaaaagaaagc

SEQ ID NO: 21390 - DNA, 2606 bp, Homo sapiens
  source 1..2606: mol_type = unassigned DNA
ctggagcgctcggaggtagaggaaaggtcttgacggggtggctggatccgtggcagaatccagttccagattctagacttgagggttctgggctgttggtctgtagaagcgaaggagagaaggccatgttagtcttgctcccctcatggttttgcagactcaaatccaggccaagtgtatggctgtctgaggtattggaacagaaggaggtccattcctgttggtgacaacaccgtggccctgttctgggatgagcaaggtgtaaaggtttcccccaagaaagagcagctgagtccttgcatcttgtggcagctggtgtgcccagcactgagtctgtaggagctgaagccagcccggacccttctcatgggcagtgcccacctgtgctgaagtcctgcagcggtggcggtgtgaggagctgtgaaattagttgtaactgaaaatgtctgacggtctggataatgaagagaaacccccggctcctccactgaggatgaatagtaacaaccgggattcttcagcactcaaccacagctccaaaccacttcccatggcccctgaagagaagaataagaaagccaggcttcgctctatcttcccaggaggaggggataaaaccaataagaagaaggagaaagagcgcccagagatctctcttccttcagactttgagcatacgattcatgtggggtttgatgcagtcaccggggaattcactccagatctctatggctcacagatgtgcccagggaagctcccagagggaattccagagcaatgggcacgattactccaaacttccaacataacaaaattggaacagaagaagaacccacaagctgttctagatgttctcaaattctatgattccaaagaaacagtcaacaaccagaaatacatgagctttacatcaggagataaaagtgcacatggatacatagcagcccatccttcgagtacaaaaacagcatctgagcctccattggcccctcctgtgtctgaagaagaagatgaagaggaagaagaagaagaagatgaaaatgagccaccaccagttatcgcaccaagaccagagcatacaaaatcaatctatactcgttctgtggttgaatccattgcttcaccagcagtaccaaataaagaggtcacaccaccctctgctgaaaatgccaattccagtactttgtacaggaacacagatcggcaaagaaaaaaatccaagatgacagatgaggagatcttagagaagctaagaagcattgtgagtgttggggacccaaagaaaaaatacacaagatttgaaaaaattggtcaaggggcatcaggtactgtttatacagcactagacattgcaacaggacaagaggtggccataaagcagatgaaccttcaacagcaacccaagaaggaattaattattaatgaaattctggtcatgagggaaaataagaaccctaatattgttaattatttagatagctacttggtgggtgatgaactatgggtagtcatggaatacttggctggtggctctctgactgatgtggtcacagagacctgtatggatgaaggacagatagcagctgtctgcagagagtgcctgcaagctttggatttcctgcactcaaaccaggtgatccatagagatataaagagtgacaatattcttctcgggatggatggctctgttaaattgactgactttgggttctgtgcccagatcactcctgagcaaagtaaacgaagcactatggtgggaaccccatattggatggcacctgaggtggtgactcgaaaagcttatggtccgaaagttgatatctggtctcttggaattatggcaattgaaatggtggaaggtgaacccccttaccttaatgaaaatccactcagggcattgtatctgatagccactaatggaactccagagctccagaatcctgagagactgtcagctgtattccgtgactttttaaatcgctgtcttgagatggatgtggataggcgaggatctgccaaggagcttttgcagcatccatttttaaaattagccaagcctctctccagcctgactcctctgattatcgctgcaaaggaagcaattaagaacagcagccgctaagactgcaagccttacacctcaccatctccctcatgagtaagactgaaataaaactctgctgcaggaaagatggaagaaaagacagtcaaatggggtgggggttctttacctttcaaatgaatagaaacttcttataagcctttttcctactccctcagattatgtaatttatttgtaagcctgaatcgcagcccaaacagggcagcaatgttgaagtgaccataaagtggtcacttccaccgtgaagcgaaagagccagtagtgaatcccctcattttgtgcattcactttgaagaaaaaggtttctcaaagatgcacactccctcttcatagtgttgtgtttgtttttaagttagagagtagtccctcttgcattcaaacctccttcaaaactccttacccaatgtgatgtttttcacttgcattgtcattagatgtccagaaaaaaaaaagatgtcaaaatgtttttctaaaaaaagaaagc

SEQ ID NO: 21391 - DNA, 2196 bp, Homo sapiens
  source 1..2196: mol_type = unassigned DNA
gagctgtgaaattagttgtaactgaaaatgtctgacggtctggataatgaagagaaacccccggctcctccactgaggatgaatagtaacaaccgggattcttcagcactcaaccacagctccaaaccacttcccatggcccctgaagagaagaataagaaagccaggcttcgctctatcttcccaggaggaggggataaaaccaataagaagaaggagaaagagcgcccagagatctctcttccttcagactttgagcatacgattcatgtggggtttgatgcagtcaccggggaattcactaactcccctttccagacctctagacctgtgacggtcgcttcaagtcaatcagagggaaaaatgggaattccagagcaatgggcacgattactccaaacttccaacataacaaaattggaacagaagaagaacccacaagctgttctagatgttctcaaattctatgattccaaagaaacagtcaacaaccagaaatacatgagctttacatcaggagataaaagtgcacatggatacatagcagcccatccttcgagtacaaaaacagcatctgagcctccattggcccctcctgtgtctgaagaagaagatgaagaggaagaagaagaagaagatgaaaatgagccaccaccagttatcgcaccaagaccagagcatacaaaatcaatctatactcgttctgtggttgaatccattgcttcaccagcagtaccaaataaagaggtcacaccaccctctgctgaaaatgccaattccagtactttgtacaggaacacagatcggcaaagaaaaaaatccaagatgacagatgaggagatcttagagaagctaagaagcattgtgagtgttggggacccaaagaaaaaatacacaagatttgaaaaaattggtcaaggggcatcaggtactgtttatacagcactagacattgcaacaggacaagaggtggccataaagcagatgaaccttcaacagcaacccaagaaggaattaattattaatgaaattctggtcatgagggaaaataagaaccctaatattgttaattatttagatagctacttggtgggtgatgaactatgggtagtcatggaatacttggctggtggctctctgactgatgtggtcacagagacctgtatggatgaaggacagatagcagctgtctgcagagagtgcctgcaagctttggatttcctgcactcaaaccaggtgatccatagagatataaagagtgacaatattcttctcgggatggatggctctgttaaattgactgactttgggttctgtgcccagatcactcctgagcaaagtaaacgaagcactatggtgggaaccccatattggatggcacctgaggtggtgactcgaaaagcttatggtccgaaagttgatatctggtctcttggaattatggcaattgaaatggtggaaggtgaacccccttaccttaatgaaaatccactcagggcattgtatctgatagccactaatggaactccagagctccagaatcctgagagactgtcagctgtattccgtgactttttaaatcgctgtcttgagatggatgtggataggcgaggatctgccaaggagcttttgcagcatccatttttaaaattagccaagcctctctccagcctgactcctctgattatcgctgcaaaggaagcaattaagaacagcagccgctaagactgcaagccttacacctcaccatctccctcatgagtaagactgaaataaaactctgctgcaggaaagatggaagaaaagacagtcaaatggggtgggggttctttacctttcaaatgaatagaaacttcttataagcctttttcctactccctcagattatgtaatttatttgtaagcctgaatcgcagcccaaacagggcagcaatgttgaagtgaccataaagtggtcacttccaccgtgaagcgaaagagccagtagtgaatcccctcattttgtgcattcactttgaagaaaaaggtttctcaaagatgcacactccctcttcatagtgttgtgtttgtttttaagttagagagtagtccctcttgcattcaaacctccttcaaaactccttacccaatgtgatgtttttcacttgcattgtcattagatgtccagaaaaaaaaaagatgtcaaaatgtttttct

SEQ ID NO: 21392 - DNA, 2477 bp, Homo sapiens
  source 1..2477: mol_type = unassigned DNA
aatcacagtcaaaatacacccagatgctctcacacacccagacgcgcgcgcatccccgggccatggggcgcacgtgagcccgcaccccgcgcacccagccctgcctctcgccagagcatcctcagcagctgccaccgaagcagcctcctccttctctcttcctcctcctcctaccacggccgccgccaccaccgctgcggctgtgatctcctatcccctctggtcctccttcctcccccagttcctgctcctcctcccatcccctgctcctcctgcccagcagcgaagggcagaaccctcggctgccgccctccttcgctctgaccaagaagaggctggaacaggagctgtgaaattagttgtaactgaaaatgtctgacggtctggataatgaagagaaacccccggctcctccactgaggatgaatagtaacaaccgggattcttcagcactcaaccacagctccaaaccacttcccatggcccctgaagagaagaataagaaagccaggcttcgctctatcttcccaggaggaggggataaaaccaataagaagaaggagaaagagcgcccagagatctctcttccttcagactttgagcatacgattcatgtggggtttgatgcagtcaccggggaattcactggaattccagagcaatgggcacgattactccaaacttccaacataacaaaattggaacagaagaagaacccacaagctgttctagatgttctcaaattctatgattccaaagaaacagtcaacaaccagaaatacatgagctttacatcaggagataaaagtgcacatggatacatagcagcccatccttcgagtacaaaaacagcatctgagcctccattggcccctcctgtgtctgaagaagaagatgaagaggaagaagaagaagaagatgaaaatgagccaccaccagttatcgcaccaagaccagagcatacaaaatcaatctatactcgttctgtggttgaatccattgcttcaccagcagtaccaaataaagaggtcacaccaccctctgctgaaaatgccaattccagtactttgtacaggaacacagatcggcaaagaaaaaaatccaagatgacagatgaggagatcttagagaagctaagaagcattgtgagtgttggggacccaaagaaaaaatacacaagatttgaaaaaattggtcaaggggcatcaggtactgtttatacagcactagacattgcaacaggacaagaggtggccataaagcagatgaaccttcaacagcaacccaagaaggaattaattattaatgaaattctggtcatgagggaaaataagaaccctaatattgttaattatttagatagctacttggtgggtgatgaactatgggtagtcatggaatacttggctggtggctctctgactgatgtggtcacagagacctgtatggatgaaggacagatagcagctgtctgcagagagtgcctgcaagctttggatttcctgcactcaaaccaggtgatccatagagatataaagagtgacaatattcttctcgggatggatggctctgttaaattgactgactttgggttctgtgcccagatcactcctgagcaaagtaaacgaagcactatggtgggaaccccatattggatggcacctgaggtggtgactcgaaaagcttatggtccgaaagttgatatctggtctcttggaattatggcaattgaaatggtggaaggtgaacccccttaccttaatgaaaatccactcagggcattgtatctgatagccactaatggaactccagagctccagaatcctgagagactgtcagctgtattccgtgactttttaaatcgctgtcttgagatggatgtggataggcgaggatctgccaaggagcttttgcagcatccatttttaaaattagccaagcctctctccagcctgactcctctgattatcgctgcaaaggaagcaattaagaacagcagccgctaagactgcaagccttacacctcaccatctccctcatgagtaagactgaaataaaactctgctgcaggaaagatggaagaaaagacagtcaaatggggtgggggttctttacctttcaaatgaatagaaacttcttataagcctttttcctactccctcagattatgtaatttatttgtaagcctgaatcgcagcccaaacagggcagcaatgttgaagtgaccataaagtggtcacttccaccgtgaagcgaaagagccagtagtgaatcccctcattttgtgcattcactttgaagaaaaaggtttctcaaagatgcacactccctcttcatagtgttgtgtttgtttttaagttagagagtagtccctcttgcattcaaacctccttcaaaactccttacccaatgtgatgtttttcacttgcattgtcattagatgtccagaaaaaaaaaagatgtcaaaatgtttttct

SEQ ID NO: 21393 - DNA, 573 bp, Homo sapiens
  source 1..573: mol_type = unassigned DNA
ggagctgtgaaattagttgtaactgaaaatgtctgacggtctggataatgaagagaaacccccggctcctccactgaggatgaatagtaacaaccgggattcttcagcactcaaccacagctccaaaccacttcccatggcccctgaagagaagaataagaaagccaggcttcgctctatcttcccaggaggaggggataaaaccaataagaagaaggagaaagagcgcccagagatctctcttccttcagactttgagcatacgattcatgtggggtttgatgcagtcaccggggaattcactaactcccctttccagacctctagacctgtgacggtcgcttcaagtcaatcagagggaaaaatgccagatctctatggctcacagatgtgcccagggaagctcccagagggaattccagagcaatgggcacgattactccaaacttccaacataacaaaattggaacagaagaagaacccacaagctgttctagatgttctcaaattctatgattccaaagaaacagtcaacaaccagaaatacatgagctttacatcaggagataaaag

SEQ ID NO: 21394 - DNA, 2550 bp, Homo sapiens
  source 1..2550: mol_type = unassigned DNA
aatcacagtcaaaatacacccagatgctctcacacacccagacgcgcgcgcatccccgggccatggggcgcacgtgagcccgcaccccgcgcacccagccctgcctctcgccagagcatcctcagcagctgccaccgaagcagcctcctccttctctcttcctcctcctcctaccacggccgccgccaccaccgctgcggctgtgatctcctatcccctctggtcctccttcctcccccagttcctgctcctcctcccatcccctgctcctcctgcccagcagcgaagggcagaaccctcggctgccgccctccttcgctctgaccaagaagaggctggaacagaataacatacagaggacagctttctcttctgaggagtcagaagttcagttcgcccaacatggaatgacttgaggagctgtgaaattagttgtaactgaaaatgtctgacggtctggataatgaagagaaacccccggctcctccactgaggatgaatagtaacaaccgggattcttcagcactcaaccacagctccaaaccacttcccatggcccctgaagagaagaataagaaagccaggcttcgctctatcttcccaggaggaggggataaaaccaataagaagaaggagaaagagcgcccagagatctctcttccttcagactttgagcatacgattcatgtggggtttgatgcagtcaccggggaattcactggaattccagagcaatgggcacgattactccaaacttccaacataacaaaattggaacagaagaagaacccacaagctgttctagatgttctcaaattctatgattccaaagaaacagtcaacaaccagaaatacatgagctttacatcaggagataaaagtgcacatggatacatagcagcccatccttcgagtacaaaaacagcatctgagcctccattggcccctcctgtgtctgaagaagaagatgaagaggaagaagaagaagaagatgaaaatgagccaccaccagttatcgcaccaagaccagagcatacaaaatcaatctatactcgttctgtggttgaatccattgcttcaccagcagtaccaaataaagaggtcacaccaccctctgctgaaaatgccaattccagtactttgtacaggaacacagatcggcaaagaaaaaaatccaagatgacagatgaggagatcttagagaagctaagaagcattgtgagtgttggggacccaaagaaaaaatacacaagatttgaaaaaattggtcaaggggcatcaggtactgtttatacagcactagacattgcaacaggacaagaggtggccataaagcagatgaaccttcaacagcaacccaagaaggaattaattattaatgaaattctggtcatgagggaaaataagaaccctaatattgttaattatttagatagctacttggtgggtgatgaactatgggtagtcatggaatacttggctggtggctctctgactgatgtggtcacagagacctgtatggatgaaggacagatagcagctgtctgcagagagtgcctgcaagctttggatttcctgcactcaaaccaggtgatccatagagatataaagagtgacaatattcttctcgggatggatggctctgttaaattgactgactttgggttctgtgcccagatcactcctgagcaaagtaaacgaagcactatggtgggaaccccatattggatggcacctgaggtggtgactcgaaaagcttatggtccgaaagttgatatctggtctcttggaattatggcaattgaaatggtggaaggtgaacccccttaccttaatgaaaatccactcagggcattgtatctgatagccactaatggaactccagagctccagaatcctgagagactgtcagctgtattccgtgactttttaaatcgctgtcttgagatggatgtggataggcgaggatctgccaaggagcttttgcagcatccatttttaaaattagccaagcctctctccagcctgactcctctgattatcgctgcaaaggaagcaattaagaacagcagccgctaagactgcaagccttacacctcaccatctccctcatgagtaagactgaaataaaactctgctgcaggaaagatggaagaaaagacagtcaaatggggtgggggttctttacctttcaaatgaatagaaacttcttataagcctttttcctactccctcagattatgtaatttatttgtaagcctgaatcgcagcccaaacagggcagcaatgttgaagtgaccataaagtggtcacttccaccgtgaagcgaaagagccagtagtgaatcccctcattttgtgcattcactttgaagaaaaaggtttctcaaagatgcacactccctcttcatagtgttgtgtttgtttttaagttagagagtagtccctcttgcattcaaacctccttcaaaactccttacccaatgtgatgtttttcacttgcattgtcattagatgtccagaaaaaaaaaagatgtcaaaatgtttttct

SEQ ID NO: 21395 - DNA, 2098 bp, Homo sapiens
  source 1..2098: mol_type = unassigned DNA
cagaatccagttccagattctagacttgagggttctgggctgttggtctgtagaagcgaaggagagaaggactcaaatccaggccaagtgtatggctgtctgaggtattggaacagaaggaggtccattcctgttggtgacaacaccgtggccctgttctgggatgagcaaggtgtaaaggtttcccccaagaaagagcagctgagtccttgcatcttgtggcagctggtgtgcccagcactgagtctgtaggagctgaagccagcccggacccttctcatgggcagtgcccacctgtgctgaagtcctgcagcggtggcggtgtgaggagctgtgaaattagttgtaactgaaaatgtctgacggtctggataatgaagagaaacccccggctcctccactgaggatgaatagtaacaaccgggattcttcagcactcaaccacagctccaaaccacttcccatggcccctgaagagaagaataagaaagccaggcttcgctctatcttcccaggaggaggggataaaaccaataagaagaaggagaaagagcgcccagagatctctcttccttcagactttgagcatacgattcatgtggggtttgatgcagtcaccggggaattcactaactcccctttccagacctctagacctgtgacggtcgcttcaagtcaatcagagggaaaaatgccagatctctatggctcacagatgtgcccagggaagctcccagagggaattccagagcaatgggcacgattactccaaacttccaacataacaaaattggaacagaagaagaacccacaagctgttctagatgttctcaaattctatgattccaaagaaacagtcaacaaccagaaatacatgagctttacatcaggagataaaagtgcacatggatacatagcagcccatccttcgagtacaaaaacagcatctgagcctccattggcccctcctgtgtctgaagaagaagatgaagaggaagaagaagaagaagatgaaaatgagccaccaccagttatcgcaccaagaccagagcatacaaaatcaatctatactcgttctgtggttgaatccattgcttcaccagcagtaccaaataaagaggtcacaccaccctctgctgaaaatgccaattccagtactttgtacaggaacacagatcggcaaagaaaaaaatccaagatgacagatgaggagatcttagagaagctaagaagcattgtgagtgttggggacccaaagaaaaaatacacaagatttgaaaaaattggtcaaggggcatcaggtactgtttatacagcactagacattgcaacaggacaagaggtggccataaagcagatgaaccttcaacagcaacccaagaaggaattaattattaatgaaattctggtcatgagggaaaataagaaccctaatattgttaattatttagatagctacttggtgggtgatgaactatgggtagtcatggaatacttggctggtggctctctgactgatgtggtcacagagacctgtatggatgaaggacagatagcagctgtctgcagagagtgcctgcaagctttggatttcctgcactcaaaccaggtgatccatagagatataaagagtgacaatattcttctcgggatggatggctctgttaaattgactgactttgggttctgtgcccagatcactcctgagcaaagtaaacgaagcactatggtgggaaccccatattggatggcacctgaggtggtgactcgaaaagcttatggtccgaaagttgatatctggtctcttggaattatggcaattgaaatggtggaaggtgaacccccttaccttaatgaaaatccactcagggcattgtatctgatagccactaatggaactccagagctccagaatcctgagagactgtcagctgtattccgtgactttttaaatcgctgtcttgagatggatgtggataggcgaggatctgccaaggagcttttgcagcatccatttttaaaattagccaagcctctctccagcctgactcctctgattatcgctgcaaaggaagcaattaagaacagcagccgctaa

SEQ ID NO: 21396 - DNA, 2638 bp, Homo sapiens
  source 1..2638: mol_type = unassigned DNA
ctggagcgctcggaggtagaggaaaggtcttgacggggtggctggatccgtggcagaatccagttccagattctagacttgagggttctgggctgttggtctgtagaagcgaaggagagaaggccatgttagtcttgctcccctcatggttttgcagactcaaatccaggccaagtgtatggctgtctgaggtattggaacagaaggaggtccattcctgttggtgacaacaccgtggccctgttctgggatgagcaaggtgtaaaggtttcccccaagaaagagcagctgagtccttgcatcttgtggcagctggtgtgcccagcactgagtctgtaggagctgaagccagcccggacccttctcatgggcagtgcccacctgtgctgaagtcctgcagcggtggcggtgtgaggagctgtgaaattagttgtaactgaaaatgtctgacggtctggataatgaagagaaacccccggctcctccactgaggatgaatagtaacaaccgggattcttcagcactcaaccacagctccaaaccacttcccatggcccctgaagagaagaataagaaagccaggcttcgctctatcttcccaggaggaggggataaaaccaataagaagaaggagaaagagcgcccagagatctctcttccttcagactttgagcatacgattcatgtggggtttgatgcagtcaccggggaattcactaactcccctttccagacctctagacctgtgacggtcgcttcaagtcaatcagagggaaaaatgggaattccagagcaatgggcacgattactccaaacttccaacataacaaaattggaacagaagaagaacccacaagctgttctagatgttctcaaattctatgattccaaagaaacagtcaacaaccagaaatacatgagctttacatcaggagataaaagtgcacatggatacatagcagcccatccttcgagtacaaaaacagcatctgagcctccattggcccctcctgtgtctgaagaagaagatgaagaggaagaagaagaagaagatgaaaatgagccaccaccagttatcgcaccaagaccagagcatacaaaatcaatctatactcgttctgtggttgaatccattgcttcaccagcagtaccaaataaagaggtcacaccaccctctgctgaaaatgccaattccagtactttgtacaggaacacagatcggcaaagaaaaaaatccaagatgacagatgaggagatcttagagaagctaagaagcattgtgagtgttggggacccaaagaaaaaatacacaagatttgaaaaaattggtcaaggggcatcaggtactgtttatacagcactagacattgcaacaggacaagaggtggccataaagcagatgaaccttcaacagcaacccaagaaggaattaattattaatgaaattctggtcatgagggaaaataagaaccctaatattgttaattatttagatagctacttggtgggtgatgaactatgggtagtcatggaatacttggctggtggctctctgactgatgtggtcacagagacctgtatggatgaaggacagatagcagctgtctgcagagagtgcctgcaagctttggatttcctgcactcaaaccaggtgatccatagagatataaagagtgacaatattcttctcgggatggatggctctgttaaattgactgactttgggttctgtgcccagatcactcctgagcaaagtaaacgaagcactatggtgggaaccccatattggatggcacctgaggtggtgactcgaaaagcttatggtccgaaagttgatatctggtctcttggaattatggcaattgaaatggtggaaggtgaacccccttaccttaatgaaaatccactcagggcattgtatctgatagccactaatggaactccagagctccagaatcctgagagactgtcagctgtattccgtgactttttaaatcgctgtcttgagatggatgtggataggcgaggatctgccaaggagcttttgcagcatccatttttaaaattagccaagcctctctccagcctgactcctctgattatcgctgcaaaggaagcaattaagaacagcagccgctaagactgcaagccttacacctcaccatctccctcatgagtaagactgaaataaaactctgctgcaggaaagatggaagaaaagacagtcaaatggggtgggggttctttacctttcaaatgaatagaaacttcttataagcctttttcctactccctcagattatgtaatttatttgtaagcctgaatcgcagcccaaacagggcagcaatgttgaagtgaccataaagtggtcacttccaccgtgaagcgaaagagccagtagtgaatcccctcattttgtgcattcactttgaagaaaaaggtttctcaaagatgcacactccctcttcatagtgttgtgtttgtttttaagttagagagtagtccctcttgcattcaaacctccttcaaaactccttacccaatgtgatgtttttcacttgcattgtcattagatgtccagaaaaaaaaaagatgtcaaaatgtttttctaaaaaaagaaagcaaaaaaagcaaggc

SEQ ID NO: 21397 - DNA, 3865 bp, Homo sapiens
  source 1..3865: mol_type = unassigned DNA
gtgccgtccccctgctggggacagcagctgggtccagcagagagctggctgggggcttgacaggagtttatcctaactgatgctgggtgggcgcaggccctgagatgggcgtcagggagaggggacgccagacacacggcctgagcagggtgaggagcagctgccagccccggcaggcccaggccctgtctgggtgcacaggacagagacacagcaagatgcccagggagtgccgcttcctgggctagagacaagcaccagcctgcagtggagaacgcaggaccccgctgcccagaaggagcagccacggcctgcggaggactggcccagcaaggtcccaggtcttccctctcctcagcgcctaagagagaggcccagtgcgggtgaggagtcgcgaggaagaggcggaaggcgccggaaggcaccatgttccgcaagaaaaagaagaaacgccctgagatctcagcgccacagaacttccagcaccgtgtccacacctccttcgaccccaaagaaggcaagtttgtgggcctccccccacaatggcagaacatcctggacacactgcggcgccccaagcccgtggtggacccttcgcgaatcacacgggtgcagctccagcccatgaagacagtggtgcggggcagcgcgatgcctgtggatggctacatctcggggctgctcaacgacatccagaagttgtcagtcatcagctccaacaccctgcgtggccgcagccccaccagccggcggcgggcacagtccctggggctgctgggggatgagcactgggccaccgacccagacatgtacctccagagcccccagtctgagcgcactgacccccacggcctctacctcagctgcaacgggggcacaccagcaggccacaagcagatgccgtggcccgagccacagagcccacgggtcctgcccaatgggctggctgcaaaggcacagtccctgggccccgccgagtttcagggtgcctcgcagcgctgtctgcagctgggtgcctgcctgcagagctccccaccaggagcctcgccccccacgggcaccaataggcatggaatgaaggctgccaagcatggctctgaggaggcccggccacagtcctgcctggtgggctcagccacaggcaggccaggtggggaaggcagccctagccctaagacccgggagagcagcctgaagcgcaggctattccgaagcatgttcctgtccactgctgccacagcccctccaagcagcagcaagccaggccctccaccacagagcaagcccaactcctctttccgaccgccgcagaaagacaaccccccaagcctggtggccaaggcccagtccttgccctcggaccagccggtggggaccttcagccctctgaccacttcggataccagcagcccccagaagtccctccgcacagccccggccacaggccagcttccaggccggtcttccccagcgggatccccccgcacctggcacgcccagatcagcaccagcaacctgtacctgccccaggaccccacggttgccaagggtgccctggctggtgaggacacaggtgttgtgacacatgagcagttcaaggctgcgctcaggatggtggtggaccagggtgacccccggctgctgctggacagctacgtgaagattggcgagggctccaccggcatcgtctgcttggcccgggagaagcactcgggccgccaggtggccgtcaagatgatggacctcaggaagcagcagcgcagggagctgctcttcaacgaggtggtgatcatgcgggactaccagcacttcaacgtggtggagatgtacaagagctacctggtgggcgaggagctgtgggtgctcatggagttcctgcagggaggagccctcacagacatcgtctcccaagtcaggctgaatgaggagcagattgccactgtgtgtgaggctgtgctgcaggccctggcctacctgcatgctcagggtgtcatccaccgggacatcaagagtgactccatcctgctgaccctcgatggcagggtgaagctctcggacttcggattctgtgctcagatcagcaaagacgtccctaagaggaagtccctggtgggaaccccctactggatggctcctgaagtgatctccaggtctttgtatgccactgaggtggatatctggtctctgggcatcatggtgattgagatggtagatggggagccaccgtacttcagtgactccccagtgcaagccatgaagaggctccgggacagccccccacccaagctgaaaaactctcacaaggtctccccagtgctgcgagacttcctggagcggatgctggtgcgggacccccaagagagagccacagcccaggagctcctagaccaccccttcctgctgcagacagggctacctgagtgcctggtgcccctgatccagctctaccgaaagcagacctccacctgctgagcccaccccaagtatgcctgccacctacgcccacaggcagggcacactgggcagccagcctgccggcaggacttgcctgcctcctcctctcagtattctctccaaagattgaaatgtgaagccccagccccaccctctgcccttcagcctactgggccaggccggacctgccccctcagtgtctctccctcccgagtccccagatggagacccctttctacaggatgaccccttgatatttgcacagggatatttctaagaaacgcagaggccagcgttcctggcctctgcagccaacacagtagaaaaggctgctgtggttttttaaaggcagttgtccactagtgtcctaggccactgcagagggcagactgctggtctccacagatacctgctgttctcagctccagcttcaaacctcgagtctcgagagggccacggggtggtttttatgaccggaatcccgcttcctccctcacgtctgatgtcctgaaggtgcagtcccacctgtacagcccctccccgcccagaactgtgaatggcctgctccaggccatggctgggggcagggagtgaggggacaatttctgagtgaaagagaaagaatggggtcggtggtgaaggtgctctcactttacagaatggagagaacatcgtgtgtgtgtgtgtgtgtgtgtgtgtgtgtgtgtgtgtgtaaggggaggaaagccaccttgacagcccaggtccctccaggtcacccacagccagtttcaggaaggctgcccctctctcccactaagttctggcctgaagggacctgctttcttggcctggcttccacctctccactcctgtgtctacctggccagtggagtggtccatgctaagtctaacactcctgggagctcaggaggcttctgagcttctcctgtactgtgcatcgtgagggccagagacaggaatgtaaggattggcaactgtgttacctttcaagtttatctcaataaccaggtcatcagggacccattgttctcttcagaaccctatctgggagagaaggcgaaccacctccgggtttccatcatgtcaaggtcacaggcatccatgtgtgcaaaccatctgccccagctgcctccacagactgctgtctccttgtcctcctcggccctgccccacttcagggctgctgtgagatggaattccaggaaagaacttcaggtgtctggaccctttctatctagataatatttttagattcttctgctccctagtgacctacctgggggcaaagaaattgcaaggacttttttttaagggtcagagttttcaaaacaaaagcatcttccctagaaatttttgtgaattgtttgcacttgtgcctgttttaaattaaattgagtgttcaaagcca

SEQ ID NO: 21398 - DNA, 3878 bp, Homo sapiens
  source 1..3878: mol_type = unassigned DNA
aaagaccagctatgcagcttctttcatggcctatttttattatctccttctcttaaatctgggctcagaatccacgatccctatgattgtaacaagaacaatcaagctttgaagatagtggacttttcctacagtgttgaccttagggtgcagctggatgtttttaccctcagcggctttcggactgtacagatcctggaaggacaaaagatcctggctaactgttcttctccctaccagggagtgccgcttcctgggctagagacaagcaccagcctgcagtggagaacgcaggaccccgctgcccagaaggagcagccacggcctgcggaggactggcccagcaaggtcccaggtcttccctctcctcagcgcctaagagagaggcccagtgcgggtgaggagtcgcgaggaagaggcggaaggcgccggaaggcaccatgttccgcaagaaaaagaagaaacgccctgagatctcagcgccacagaacttccagcaccgtgtccacacctccttcgaccccaaagaaggcaagtttgtgggcctccccccacaatggcagaacatcctggacacactgcggcgccccaagcccgtggtggacccttcgcgaatcacacgggtgcagctccagcccatgaagacagtggtgcggggcagcgcgatgcctgtggatggctacatctcggggctgctcaacgacatccagaagttgtcagtcatcagctccaacaccctgcgtggccgcagccccaccagccggcggcgggcacagtccctggggctgctgggggatgagcactgggccaccgacccagacatgtacctccagagcccccagtctgagcgcactgacccccacggcctctacctcagctgcaacgggggcacaccagcaggccacaagcagatgccgtggcccgagccacagagcccacgggtcctgcccaatgggctggctgcaaaggcacagtccctgggccccgccgagtttcagggtgcctcgcagcgctgtctgcagctgggtgcctgcctgcagagctccccaccaggagcctcgccccccacgggcaccaataggcatggaatgaaggctgccaagcatggctctgaggaggcccggccacagtcctgcctggtgggctcagccacaggcaggccaggtggggaaggcagccctagccctaagacccgggagagcagcctgaagcgcaggctattccgaagcatgttcctgtccactgctgccacagcccctccaagcagcagcaagccaggccctccaccacagagcaagcccaactcctctttccgaccgccgcagaaagacaaccccccaagcctggtggccaaggcccagtccttgccctcggaccagccggtggggaccttcagccctctgaccacttcggataccagcagcccccagaagtccctccgcacagccccggccacaggccagcttccaggccggtcttccccagcgggatccccccgcacctggcacgcccagatcagcaccagcaacctgtacctgccccaggaccccacggttgccaagggtgccctggctggtgaggacacaggtgttgtgacacatgagcagttcaaggctgcgctcaggatggtggtggaccagggtgacccccggctgctgctggacagctacgtgaagattggcgagggctccaccggcatcgtctgcttggcccgggagaagcactcgggccgccaggtggccgtcaagatgatggacctcaggaagcagcagcgcagggagctgctcttcaacgaggtggtgatcatgcgggactaccagcacttcaacgtggtggagatgtacaagagctacctggtgggcgaggagctgtgggtgctcatggagttcctgcagggaggagccctcacagacatcgtctcccaagtcaggctgaatgaggagcagattgccactgtgtgtgaggctgtgctgcaggccctggcctacctgcatgctcagggtgtcatccaccgggacatcaagagtgactccatcctgctgaccctcgatggcagggtgaagctctcggacttcggattctgtgctcagatcagcaaagacgtccctaagaggaagtccctggtgggaaccccctactggatggctcctgaagtgatctccaggtctttgtatgccactgaggtggatatctggtctctgggcatcatggtgattgagatggtagatggggagccaccgtacttcagtgactccccagtgcaagccatgaagaggctccgggacagccccccacccaagctgaaaaactctcacaaggtctccccagtgctgcgagacttcctggagcggatgctggtgcgggacccccaagagagagccacagcccaggagctcctagaccaccccttcctgctgcagacagggctacctgagtgcctggtgcccctgatccagctctaccgaaagcagacctccacctgctgagcccaccccaagtatgcctgccacctacgcccacaggcagggcacactgggcagccagcctgccggcaggacttgcctgcctcctcctctcagtattctctccaaagattgaaatgtgaagccccagccccaccctctgcccttcagcctactgggccaggccggacctgccccctcagtgtctctccctcccgagtccccagatggagacccctttctacaggatgaccccttgatatttgcacagggatatttctaagaaacgcagaggccagcgttcctggcctctgcagccaacacagtagaaaaggctgctgtggttttttaaaggcagttgtccactagtgtcctaggccactgcagagggcagactgctggtctccacagatacctgctgttctcagctccagcttcaaacctcgagtctcgagagggccacggggtggtttttatgaccggaatcccgcttcctccctcacgtctgatgtcctgaaggtgcagtcccacctgtacagcccctccccgcccagaactgtgaatggcctgctccaggccatggctgggggcagggagtgaggggacaatttctgagtgaaagagaaagaatggggtcggtggtgaaggtgctctcactttacagaatggagagaacatcgtgtgtgtgtgtgtgtgtgtgtgtgtgtgtgtgtgtgtgtaaggggaggaaagccaccttgacagcccaggtccctccaggtcacccacagccagtttcaggaaggctgcccctctctcccactaagttctggcctgaagggacctgctttcttggcctggcttccacctctccactcctgtgtctacctggccagtggagtggtccatgctaagtctaacactcctgggagctcaggaggcttctgagcttctcctgtactgtgcatcgtgagggccagagacaggaatgtaaggattggcaactgtgttacctttcaagtttatctcaataaccaggtcatcagggacccattgttctcttcagaaccctatctgggagagaaggcgaaccacctccgggtttccatcatgtcaaggtcacaggcatccatgtgtgcaaaccatctgccccagctgcctccacagactgctgtctccttgtcctcctcggccctgccccacttcagggctgctgtgagatggaattccaggaaagaacttcaggtgtctggaccctttctatctagataatatttttagattcttctgctccctagtgacctacctgggggcaaagaaattgcaaggacttttttttaagggtcagagttttcaaaacaaaagcatcttccctagaaatttttgtgaattgtttgcacttgtgcctgttttaaattaaattgagtgttcaaagcc

SEQ ID NO: 21399 - DNA, 3795 bp, Homo sapiens
  source 1..3795: mol_type = unassigned DNA
aaagaccagctatgcagcttctttcatggcctatttttattatctccttctcttaaatctgggctcagaatccacgatccctatgattgtaacaagaacaatcaagctttgaagatagtggacttttcctacagtgttgaccttagggtgcagctggatgtttttaccctcagcggctttcggactgtacagatcctggaaggacaaaagatcctggctaactgttcttctccctaccaggcctgcggaggactggcccagcaaggtcccaggtcttccctctcctcagcgcctaagagagaggcccagtgcgggtgaggagtcgcgaggaagaggcggaaggcgccggaaggcaccatgttccgcaagaaaaagaagaaacgccctgagatctcagcgccacagaacttccagcaccgtgtccacacctccttcgaccccaaagaaggcaagtttgtgggcctccccccacaatggcagaacatcctggacacactgcggcgccccaagcccgtggtggacccttcgcgaatcacacgggtgcagctccagcccatgaagacagtggtgcggggcagcgcgatgcctgtggatggctacatctcggggctgctcaacgacatccagaagttgtcagtcatcagctccaacaccctgcgtggccgcagccccaccagccggcggcgggcacagtccctggggctgctgggggatgagcactgggccaccgacccagacatgtacctccagagcccccagtctgagcgcactgacccccacggcctctacctcagctgcaacgggggcacaccagcaggccacaagcagatgccgtggcccgagccacagagcccacgggtcctgcccaatgggctggctgcaaaggcacagtccctgggccccgccgagtttcagggtgcctcgcagcgctgtctgcagctgggtgcctgcctgcagagctccccaccaggagcctcgccccccacgggcaccaataggcatggaatgaaggctgccaagcatggctctgaggaggcccggccacagtcctgcctggtgggctcagccacaggcaggccaggtggggaaggcagccctagccctaagacccgggagagcagcctgaagcgcaggctattccgaagcatgttcctgtccactgctgccacagcccctccaagcagcagcaagccaggccctccaccacagagcaagcccaactcctctttccgaccgccgcagaaagacaaccccccaagcctggtggccaaggcccagtccttgccctcggaccagccggtggggaccttcagccctctgaccacttcggataccagcagcccccagaagtccctccgcacagccccggccacaggccagcttccaggccggtcttccccagcgggatccccccgcacctggcacgcccagatcagcaccagcaacctgtacctgccccaggaccccacggttgccaagggtgccctggctggtgaggacacaggtgttgtgacacatgagcagttcaaggctgcgctcaggatggtggtggaccagggtgacccccggctgctgctggacagctacgtgaagattggcgagggctccaccggcatcgtctgcttggcccgggagaagcactcgggccgccaggtggccgtcaagatgatggacctcaggaagcagcagcgcagggagctgctcttcaacgaggtggtgatcatgcgggactaccagcacttcaacgtggtggagatgtacaagagctacctggtgggcgaggagctgtgggtgctcatggagttcctgcagggaggagccctcacagacatcgtctcccaagtcaggctgaatgaggagcagattgccactgtgtgtgaggctgtgctgcaggccctggcctacctgcatgctcagggtgtcatccaccgggacatcaagagtgactccatcctgctgaccctcgatggcagggtgaagctctcggacttcggattctgtgctcagatcagcaaagacgtccctaagaggaagtccctggtgggaaccccctactggatggctcctgaagtgatctccaggtctttgtatgccactgaggtggatatctggtctctgggcatcatggtgattgagatggtagatggggagccaccgtacttcagtgactccccagtgcaagccatgaagaggctccgggacagccccccacccaagctgaaaaactctcacaaggtctccccagtgctgcgagacttcctggagcggatgctggtgcgggacccccaagagagagccacagcccaggagctcctagaccaccccttcctgctgcagacagggctacctgagtgcctggtgcccctgatccagctctaccgaaagcagacctccacctgctgagcccaccccaagtatgcctgccacctacgcccacaggcagggcacactgggcagccagcctgccggcaggacttgcctgcctcctcctctcagtattctctccaaagattgaaatgtgaagccccagccccaccctctgcccttcagcctactgggccaggccggacctgccccctcagtgtctctccctcccgagtccccagatggagacccctttctacaggatgaccccttgatatttgcacagggatatttctaagaaacgcagaggccagcgttcctggcctctgcagccaacacagtagaaaaggctgctgtggttttttaaaggcagttgtccactagtgtcctaggccactgcagagggcagactgctggtctccacagatacctgctgttctcagctccagcttcaaacctcgagtctcgagagggccacggggtggtttttatgaccggaatcccgcttcctccctcacgtctgatgtcctgaaggtgcagtcccacctgtacagcccctccccgcccagaactgtgaatggcctgctccaggccatggctgggggcagggagtgaggggacaatttctgagtgaaagagaaagaatggggtcggtggtgaaggtgctctcactttacagaatggagagaacatcgtgtgtgtgtgtgtgtgtgtgtgtgtgtgtgtgtgtgtgtaaggggaggaaagccaccttgacagcccaggtccctccaggtcacccacagccagtttcaggaaggctgcccctctctcccactaagttctggcctgaagggacctgctttcttggcctggcttccacctctccactcctgtgtctacctggccagtggagtggtccatgctaagtctaacactcctgggagctcaggaggcttctgagcttctcctgtactgtgcatcgtgagggccagagacaggaatgtaaggattggcaactgtgttacctttcaagtttatctcaataaccaggtcatcagggacccattgttctcttcagaaccctatctgggagagaaggcgaaccacctccgggtttccatcatgtcaaggtcacaggcatccatgtgtgcaaaccatctgccccagctgcctccacagactgctgtctccttgtcctcctcggccctgccccacttcagggctgctgtgagatggaattccaggaaagaacttcaggtgtctggaccctttctatctagataatatttttagattcttctgctccctagtgacctacctgggggcaaagaaattgcaaggacttttttttaagggtcagagttttcaaaacaaaagcatcttccctagaaatttttgtgaattgtttgcacttgtgcctgttttaaattaaattgagtgttcaaagcc

SEQ ID NO: 21400 - DNA, 565 bp, Homo sapiens
  source 1..565: mol_type = unassigned DNA
aaaattgccaagcaacgttggagcagctcggcgccccaaacgagcaggtcgatgcctgaggatttaatggagaaatcccaaagcctgcggaggactggcccagcaaggtcccaggtcttccctctcctcagcgcctaagagagaggcccagtgcgggtgaggagtcgcgaggaagaggcggaaggcgccggaaggcaccatgttccgcaagaaaaagaagaaacgccctgagatctcagcgccacagaacttccagcaccgtgtccacacctccttcgaccccaaagaaggcaagtttgtgggcctccccccacaatggcagaacatcctggacacactgcggcgccccaagcccgtggtggacccttcgcgaatcacacgggtgcagctccagcccatgaagacagtggtgcggggcagcgcgatgcctgtggatggctacatctcggggctgctcaacgacatccagaagttgtcagtcatcagctccaacaccctgcgtggccgcagccccaccagccggcggcgggcacagtccctggggctgctgggggatgagcactgg

SEQ ID NO: 21401 - DNA, 560 bp, Homo sapiens
  source 1..560: mol_type = unassigned DNA
acacgcggcccgctcaggtccgggagagtcggcccgcggctctggagcgtgcatctgcgatgccagtgaacgaggcctgcggaggactggcccagcaaggtcccaggtcttccctctcctcagcgcctaagagagaggcccagtgcgggtgaggagtcgcgaggaagaggcggaaggcgccggaaggcaccatgttccgcaagaaaaagaagaaacgccctgagatctcagcgccacagaacttccagcaccgtgtccacacctccttcgaccccaaagaaggcaagtttgtgggcctccccccacaatggcagaacatcctggacacactgcggcgccccaagcccgtggtggacccttcgcgaatcacacgggtgcagctccagcccatgaagacagtggtgcggggcagcgcgatgcctgtggatggctacatctcggggctgctcaacgacatccagaagttgtcagtcatcagctccaacaccctgcgtggccgcagccccaccagccggcggcgggcacagtccctggggctgctgggggatgagcactgggcc

SEQ ID NO: 21402 - DNA, 571 bp, Homo sapiens
  source 1..571: mol_type = unassigned DNA
ttcgcgtccccgagagggcgcagcagtggggcctgcgagctggggccgggtggccgcgccgggtcggagtgtggctggagaggggccgccccggaagcggtgctgcgcccaacgtccccttctccccgcctgcggaggactggcccagcaaggtcccaggtcttccctctcctcagcgcctaagagagaggcccagtgcgggtgaggagtcgcgaggaagaggcggaaggcgccggaaggcaccatgttccgcaagaaaaagaagaaacgccctgagatctcagcgccacagaacttccagcaccgtgtccacacctccttcgaccccaaagaaggcaagtttgtgggcctccccccacaatggcagaacatcctggacacactgcggcgccccaagcccgtggtggacccttcgcgaatcacacgggtgcagctccagcccatgaagacagtggtgcggggcagcgcgatgcctgtggatggctacatctcggggctgctcaacgacatccagaagttgtcagtcatcagctccaacaccctgcgtggccgcagccccaccagccggcgg

SEQ ID NO: 21403 - DNA, 598 bp, Homo sapiens
  source 1..598: mol_type = unassigned DNA
aaaatcgcggtcaggtgaagccggcgctgcaccaacgtgtaagcgcggcccctcctcggcgttcccgcgccgaggtccctcccgcggagggcgggcccggctcccacgacctcttcgagcgttcctgggcttcccgctccgcaggcctgcggaggactggcccagcaaggtcccaggtcttccctctcctcagcgcctaagagagaggcccagtgcgggtgaggagtcgcgaggaagaggcggaaggcgccggaaggcaccatgttccgcaagaaaaagaagaaacgccctgagatctcagcgccacagaacttccagcaccgtgtccacacctccttcgaccccaaagaaggcaagtttgtgggcctccccccacaatggcagaacatcctggacacactgcggcgccccaagcccgtggtggacccttcgcgaatcacacgggtgcagctccagcccatgaagacagtggtgcggggcagcgcgatgcctgtggatggctacatctcggggctgctcaacgacatccagaagttgtcagtcatcagctccaacaccctgcgtggccgcagccccaccagccggcggcgggcacagt

SEQ ID NO: 21404 - DNA, 4020 bp, Homo sapiens
  source 1..4020: mol_type = unassigned DNA
attttgggagctggaaacttggagctgcacctgagtcccgccccttctagctctcccctccctaccttgggctccaggaagatgggacttgctgtgagtctgctgccaccccctaaagatatggaagacgctgtgggggccagaagtgcccggggggctgtggcagcaggcagagtgcaatagcagatatggtggtcaggctgcctgtgtgtgtcctctggaggtgttgggacagaagggcagtcttgtccgagctgactggagtcctcccgggctggctctgaactcatctcccacggggatgtttcggtaaaggagtggcttctggggtcggagtggcatttggagagcgaggctggattggcttaggctggcctgggcagggagtgccgcttcctgggctagagacaagcaccagcctgcagtggagaacgcaggaccccgctgcccagaaggagcagccacggcctgcggaggactggcccagcaaggtcccaggtcttccctctcctcagcgcctaagagagaggcccagtgcgggtgaggagtcgcgaggaagaggcggaaggcgccggaaggcaccatgttccgcaagaaaaagaagaaacgccctgagatctcagcgccacagaacttccagcaccgtgtccacacctccttcgaccccaaagaaggcaagtttgtgggcctccccccacaatggcagaacatcctggacacactgcggcgccccaagcccgtggtggacccttcgcgaatcacacgggtgcagctccagcccatgaagacagtggtgcggggcagcgcgatgcctgtggatggctacatctcggggctgctcaacgacatccagaagttgtcagtcatcagctccaacaccctgcgtggccgcagccccaccagccggcggcgggcacagtccctggggctgctgggggatgagcactgggccaccgacccagacatgtacctccagagcccccagtctgagcgcactgacccccacggcctctacctcagctgcaacgggggcacaccagcaggccacaagcagatgccgtggcccgagccacagagcccacgggtcctgcccaatgggctggctgcaaaggcacagtccctgggccccgccgagtttcagggtgcctcgcagcgctgtctgcagctgggtgcctgcctgcagagctccccaccaggagcctcgccccccacgggcaccaataggcatggaatgaaggctgccaagcatggctctgaggaggcccggccacagtcctgcctggtgggctcagccacaggcaggccaggtggggaaggcagccctagccctaagacccgggagagcagcctgaagcgcaggctattccgaagcatgttcctgtccactgctgccacagcccctccaagcagcagcaagccaggccctccaccacagagcaagcccaactcctctttccgaccgccgcagaaagacaaccccccaagcctggtggccaaggcccagtccttgccctcggaccagccggtggggaccttcagccctctgaccacttcggataccagcagcccccagaagtccctccgcacagccccggccacaggccagcttccaggccggtcttccccagcgggatccccccgcacctggcacgcccagatcagcaccagcaacctgtacctgccccaggaccccacggttgccaagggtgccctggctggtgaggacacaggtgttgtgacacatgagcagttcaaggctgcgctcaggatggtggtggaccagggtgacccccggctgctgctggacagctacgtgaagattggcgagggctccaccggcatcgtctgcttggcccgggagaagcactcgggccgccaggtggccgtcaagatgatggacctcaggaagcagcagcgcagggagctgctcttcaacgaggtggtgatcatgcgggactaccagcacttcaacgtggtggagatgtacaagagctacctggtgggcgaggagctgtgggtgctcatggagttcctgcagggaggagccctcacagacatcgtctcccaagtcaggctgaatgaggagcagattgccactgtgtgtgaggctgtgctgcaggccctggcctacctgcatgctcagggtgtcatccaccgggacatcaagagtgactccatcctgctgaccctcgatggcagggtgaagctctcggacttcggattctgtgctcagatcagcaaagacgtccctaagaggaagtccctggtgggaaccccctactggatggctcctgaagtgatctccaggtctttgtatgccactgaggtggatatctggtctctgggcatcatggtgattgagatggtagatggggagccaccgtacttcagtgactccccagtgcaagccatgaagaggctccgggacagccccccacccaagctgaaaaactctcacaaggtctccccagtgctgcgagacttcctggagcggatgctggtgcgggacccccaagagagagccacagcccaggagctcctagaccaccccttcctgctgcagacagggctacctgagtgcctggtgcccctgatccagctctaccgaaagcagacctccacctgctgagcccaccccaagtatgcctgccacctacgcccacaggcagggcacactgggcagccagcctgccggcaggacttgcctgcctcctcctctcagtattctctccaaagattgaaatgtgaagccccagccccaccctctgcccttcagcctactgggccaggccggacctgccccctcagtgtctctccctcccgagtccccagatggagacccctttctacaggatgaccccttgatatttgcacagggatatttctaagaaacgcagaggccagcgttcctggcctctgcagccaacacagtagaaaaggctgctgtggttttttaaaggcagttgtccactagtgtcctaggccactgcagagggcagactgctggtctccacagatacctgctgttctcagctccagcttcaaacctcgagtctcgagagggccacggggtggtttttatgaccggaatcccgcttcctccctcacgtctgatgtcctgaaggtgcagtcccacctgtacagcccctccccgcccagaactgtgaatggcctgctccaggccatggctgggggcagggagtgaggggacaatttctgagtgaaagagaaagaatggggtcggtggtgaaggtgctctcactttacagaatggagagaacatcgtgtgtgtgtgtgtgtgtgtgtgtgtgtgtgtgtgtgtgtaaggggaggaaagccaccttgacagcccaggtccctccaggtcacccacagccagtttcaggaaggctgcccctctctcccactaagttctggcctgaagggacctgctttcttggcctggcttccacctctccactcctgtgtctacctggccagtggagtggtccatgctaagtctaacactcctgggagctcaggaggcttctgagcttctcctgtactgtgcatcgtgagggccagagacaggaatgtaaggattggcaactgtgttacctttcaagtttatctcaataaccaggtcatcagggacccattgttctcttcagaaccctatctgggagagaaggcgaaccacctccgggtttccatcatgtcaaggtcacaggcatccatgtgtgcaaaccatctgccccagctgcctccacagactgctgtctccttgtcctcctcggccctgccccacttcagggctgctgtgagatggaattccaggaaagaacttcaggtgtctggaccctttctatctagataatatttttagattcttctgctccctagtgacctacctgggggcaaagaaattgcaaggacttttttttaagggtcagagttttcaaaacaaaagcatcttccctagaaatttttgtgaattgtttgcacttgtgcctgttttaaattaaattgagtgttcaaagc

SEQ ID NO: 21405 - DNA, 1146 bp, Homo sapiens
  source 1..1146: mol_type = unassigned DNA
ccccttctccccgtaagccccgcaaggagcctgccgcctcttgcacctgagccaggagttcagtcgggaggcgggcgcggagcggttcccagcgcctggacgtcagccagtcgcaacacccgcgggaacacttgctacatttgccataatgcatttctgatctgtttccgcgcaggcctgcggaggactggcccagcaaggtcccaggtcttccctctcctcagcgcctaagagagaggcccagtgcgggtgaggagtcgcgaggaagaggcggaaggcgccggaaggcaccatgttccgcaagaaaaagaagaaacgccctgagatctcagcgccacagaacttccagcaccgtgtccacacctccttcgaccccaaagaaggcaagtttgtgggcctccccccacaatggcagaacatcctggacacactgcggcgccccaagcccgtggtggacccttcgcgaatcacacgggtgcagctccagcccatgaagacagtggtgcggggcagcgcgatgcctgtggatggctacatctcggggctgctcaacgacatccagaagttgtcagtcatcagctccaacaccctgcgtggccgcagccccaccagccggcggcgggcacagtccctggggctgctgggggatgagcactgggccaccgacccagacatgtacctccagagcccccagtctgagcgcactgacccccacggcctctacctcagctgcaacgggggcacaccagcaggccacaagcagatgccgtggcccgagccacagagcccacgggtcctgcccaatgggctggctgcaaaggcacagtccctgggccccgccgagtttcagggtgcctcgcagcgctgtctgcagctgggtgcctgcctgcagagctccccaccaggagcctcgccccccacgggcaccaataggcatggaatgaaggctgccaagcatggctctgaggaggcccggccacagtcctgcctggtgggctcagccacaggcaggccaggtggggaaggcagccctagccctaagacccgggagagcagcctgaagcgcaggctattccgaagcatgttcctgtccactgctgccacagcccctccaagcagcagcaagccaggccctccaccacagag

SEQ ID NO: 21406 - DNA, 891 bp, Homo sapiens
  source 1..891: mol_type = unassigned DNA
aaaaccagctgagaccagcacctgccagatctgaatgcgcagctccaagttctggggggtgggggtgggggtgagccaaggaggtctggcttctctagggcaagggtaggaaggacagcagggaggctcaccctgagcccggcaggcagcccttcctcctcctccccttcagcaaagaaaggcagataaaaacgtgtttttataaatagctccagccccagctgatttgtaaattcagtgggttttttgtgtcaatgacatcaccttcctccccatggcaacccccgacgatatcaaaattgccaagcaacgttggagcagctcggcgccccaaacgagcaggtcgatgcctgaggatttaatggagaaatcccaaaggagtgccgcttcctgggctagagacaagcaccagcctgcagtggagaacgcaggaccccgctgcccagaaggagcagccacggcctgcggaggactggcccagcaaggtcccaggtcttccctctcctcagcgcctaagagagaggcccagtgcgggtgaggagtcgcgaggaagaggcggaaggcgccggaaggcaccatgttccgcaagaaaaagaagaaacgccctgagatctcagcgccacagaacttccagcaccgtgtccacacctccttcgaccccaaagaaggcaagtttgtgggcctccccccacaatggcagaacatcctggacacactgcggcgccccaagcccgtggtggacccttcgcgaatcacacgggtgcagctccagcccatgaagacagtggtgcggggcagcgcgatgcctgtggatggctacatctcggggctgctcaacgacatccagaagttgtcagtcatcagctccaacaccctgcgtggccgcagccc

SEQ ID NO: 21407 - DNA, 586 bp, Homo sapiens
  source 1..586: mol_type = unassigned DNA
ccagcggtgagtgctatctttcgcggcgacggcgggcatcaggtgggctgagtcgatggatcacgggagccccccagcccggcctgcatccctgagggcagtgcccctcgcagtcaggtgtctcggcggcccccacaacacagtttcatgatcaacatgggagactcccacgtggacaccagctccaccgtgtccgaggcggtggccgaagaagtatctcttttcagcatgacggacatgattctgttttcgctcatcgtgggtctcctaacctactggttcctcttcagaaagaaaaaagaagaagtccccgagttcaccaaaattcagacattgacctcctctgtcagagagagcagctttgtggaaaagatgaagaaaacggggaggaacatcatcgtgttctacggctcccagacggggactgcagaggagtttgccaaccgcctgtccaaggacgcccaccgctacgggatgcgaggcatgtcagcggaccctgaggagtatgacctggccgacctgagcagcctgccagagatcgacaacgccctggtggttttctgcatggccacctacggtgagggag

SEQ ID NO: 21408 - DNA, 548 bp, Homo sapiens
  source 1..548: mol_type = unassigned DNA
gagtgctatctttcgcggcgacggcgggtttcatgatcaacatgggagactcccacgtggacaccagctccaccgtgtccgaggcggtggccgaagaagtatctcttttcagcatgacggacatgattctgttttcgctcatcgtgggtctcctaacctactggttcctcttcagaaagaaaaaagaagaagtccccgagttcaccaaaattcagacattgacctcctctgtcagagagagcagctttgtggaaaagatgaagaaaacggggaggaacatcatcgtgttctacggctcccagacggggactgcagaggagtttgccaaccgcctgtccaaggacgcccaccgctacgggatgcgaggcatgtcagcggaccctgaggagtatgacctggccgacctgagcagcctgccagagatcgacaacgccctggtggttttctgcatggccacctacggtgagggagaccccaccgacaatgcccaggacttctacgactggctgcaggagacagacgtggatctctctggggtcaagttcgcg

SEQ ID NO: 21409 - DNA, 736 bp, Homo sapiens
  source 1..736: mol_type = unassigned DNA
aagaaaagttgctatattttgcaaaagacataaatctacagattcaagaaactgagtgaaccccacagaaggtataaagaagaaactcagagattaaagactctttcagggcagaaggctcacacaggcttccagaacctcctcggagcgattgtagggactgcctgacccggaagagagttgtcagtcaagaccgccagagttttcccatcagagtatttggcatagcagaggtggctcccaaactgtgccagggcactgcagcaaactcacaagtgatcattctcaatgcggcggacgctcaagtctgttgaactccatgcgaagtgctagcttgggacagttcacggttccaacgtgagatccttgctgcattccttcttaggattttacatctttgcgaagctgggtttgcagtggttgttcagacctaactatacgtggaactgttaggcatttttttttggcctacggataccattaaaaatttgctgagataccagggactccacaaacgaaggacatttgggatctgtccagacagtttcatgatcaacatgggagactcccacgtggacaccagctccaccgtgtccgaggcggtggccgaagaagtatctcttttcagcatgacggacatgattctgttttcgctcatcgtgggtctcctaacctactggttcctcttcagaaagaaaaaagaagaagtccccgagttcaccaaaattcagacatt

SEQ ID NO: 21410 - DNA, 2158 bp, Homo sapiens
  source 1..2158: mol_type = unassigned DNA
gaaggcggtggtagcgcctcagtggtgtgggcctgagccctgcccaggtgcccgcagagagcagccgggctgccagcgtttcatgatcaacatgggagactcccacgtggacaccagctccaccgtgtccgaggcggtggccgaagaagtatctcttttcagcatgacggacatgattctgttttcgctcatcgtgggtctcctaacctactggttcctcttcagaaagaaaaaagaagaagtccccgagttcaccaaaattcagacattgacctcctctgtcagagagagcagctttgtggaaaagatgaagaaaacggggaggaacatcatcgtgttctacggctcccagacggggactgcagaggagtttgccaaccgcctgtccaaggacgcccaccgctacgggatgcgaggcatgtcagcggaccctgaggagtatgacctggccgacctgagcagcctgccagagatcgacaacgccctggtggttttctgcatggccacctacggtgagggagaccccaccgacaatgcccaggacttctacgactggctgcaggagacagacgtggatctctctggggtcaagttcgcggtgtttggtcttgggaacaagacctacgagcacttcaatgccatgggcaagtacgtggacaagcggctggagcagctcggcgcccagcgcatctttgagctggggttgggcgacgacgatgggaacttggaggaggacttcatcacctggcgagagcagttctggccggccgtgtgtgaacactttggggtggaagccactggcgaggagtccagcattcgccagtacgagcttgtggtccacaccgacatagatgcggccaaggtgtacatgggggagatgggccggctgaagagctacgagaaccagaagcccccctttgatgccaagaatccgttcctggctgcagtcaccaccaaccggaagctgaaccagggaaccgagcgccacctcatgcacctggaattggacatctcggactccaaaatcaggtatgaatctggggaccacgtggctgtgtacccagccaacgactctgctctcgtcaaccagctgggcaaaatcctgggtgccgacctggacgtcgtcatgtccctgaacaacctggatgaggagtccaacaagaagcacccattcccgtgccctacgtcctaccgcacggccctcacctactacctggacatcaccaacccgccgcgtaccaacgtgctgtacgagctggcgcagtacgcctcggagccctcggagcaggagctgctgcgcaagatggcctcctcctccggcgagggcaaggagctgtacctgagctgggtggtggaggcccggaggcacatcctggccatcctgcaggactgcccgtccctgcggccccccatcgaccacctgtgtgagctgctgccgcgcctgcaggcccgctactactccatcgcctcatcctccaaggtccaccccaactctgtgcacatctgtgcggtggttgtggagtacgagaccaaggctggccgcatcaacaagggcgtggccaccaactggctgcgggccaaggagcctgccggggagaacggcggccgtgcgctggcggtgcccacatctacgtctgtggggatgcacggaacatggccagggatgtgcagaacaccttctacgacatcgtggctgagctcggggccatggagcacgcgcaggcggtggactacatcaagaaactgatgaccaagggccgctactccctggacgtgtggagctaggggcctgcctgccccacccaccccacagactccggcctgtaatcagctctcctggctccctcccgtagtctcctgggtgtgtttggcttggccttggcatgggcgcaggcccagtgacaaagactcctctgggcctggggtgcatcctcctcagcccccaggccaggtgaggtccaccggcccctggcagcacagcccagggcctgcatgggggcaccgggctccatgcctctggaggcctctggccctcggtggctgcacagaagggctctttctctctgctgagctgggcccagcccctccacgtgatttccagtgagtgtaaataattttaaataacctctggcccttggaataaagttctgttttctgt

SEQ ID NO: 21411 - DNA, 631 bp, Homo sapiens
  source 1..631: mol_type = unassigned DNA
agagagcagccgggctgccagcggtgagtgctatctttcgcggcgacggcggggtgggtgaggtcgggccccaagactcggggtttgccgggcgcctcagttcaccgcggccgcctggctctctgcgtcggggtgggccctcgggcctgggcactgcgcgtctggcccgacgctcgggcggaaggcatggctcccaccccggccctcctccgcgtcgcccttcccctagagctgatctcccgcggcggcctgagggtcgacttttccacagcttgggccgagagagcccggcaggccctcggctgagggttagggctcggtatctcagggctcggggtccagtccccgcgccgccgccccccacgggctaagccactttaactctccgagcctcagtttccccatctgtacgatgaatgggcctcgggaggcagcgaattctgggggtacctaacgtgagaggcgctcgatgcatgctcatgggacccgaatctaaccctgcagcatcagtttcatgatcaacatgggagactcccacgtggacaccagctccaccgtgtccgaggcggtggccgaagaagtatctcttttcagcatgacggacatgattctgttttcgctcatcgtgggt

SEQ ID NO: 21412 - DNA, 561 bp, Homo sapiens
  source 1..561: mol_type = unassigned DNA
gcacttgagaactctcacagggagggaagcaagcatacaattcaacaagaatggcacgtttcatgatcaacatgggagactcccacgtggacaccagctccaccgtgtccgaggcggtggccgaagaagtatctcttttcagcatgacggacatgattctgttttcgctcatcgtgggtctcctaacctactggttcctcttcagaaagaaaaaagaagaagtccccgagttcaccaaaattcagacattgacctcctctgtcagagagagcagctttgtggaaaagatgaagaaaacggggaggaacatcatcgtgttctacggctcccagacggggactgcagaggagtttgccaaccgcctgtccaaggacgcccaccgctacgggatgcgaggcatgtcagcggaccctgaggagtatgacctggccgacctgagcagcctgccagagatcgacaacgccctggtggttttctgcatggccacctacggtgagggagaccccaccgacaatgcccaggacttctacgactggctgcaggagacagacgtggatctct

SEQ ID NO: 21413 - DNA, 625 bp, Homo sapiens
  source 1..625: mol_type = unassigned DNA
agcaaggagaccggaagaaggtctggggaagttatttggacaatgaagagagccagtttcatgatcaacatgggagactcccacgtggacaccagctccaccgtgtccgaggcggtggccgaagaagtatctcttttcagcatgacggacatgattctgttttcgctcatcgtgggtctcctaacctactggttcctcttcagaaagaaaaaagaagaagtccccgagttcaccaaaattcagacattgacctcctctgtcagagagagcagctttgtggaaaagatgaagaaaacggggaggaacatcatcgtgttctacggctcccagacggggactgcagaggagtttgccaaccgcctgtccaaggacgcccaccgctacgggatgcgaggcatgtcagcggaccctgaggagtatgacctggccgacctgagcagcctgccagagatcgacaacgccctggtggttttctgcatggccacctacggtgagggagaccccaccgacaatgcccaggacttctacgactggctgcaggagacagacgtggatctctctggggtcaagttcgcggtgtttggtcttgggaacaagacctacgagcacttcaatgccatgggca

SEQ ID NO: 21414 - DNA, 283 bp, Homo sapiens
  source 1..283: mol_type = unassigned DNA
gacttcctgggccctgaagctccaaggacaaaagactcctgtcccttttcccttcctctccattctgggtctcccaccaccaccaagtccttttcatgatcaacatgggagactcccacgtggacaccagctccaccgtgtccgaggcggtggccgaagaagtatctcttttcagcatgacggacatgattctgttttcgctcatcgtgggtctcctaacctactggttcctcttcagaaagaaaaaagaagaagtccccgagttcaccaaaattcagacatt

SEQ ID NO: 21415 - DNA, 1888 bp, Homo sapiens
  source 1..1888: mol_type = unassigned DNA
agagactgctatgggctcccggtggcctgcggtgcctccctggggactccagatccatgtatctgaaaggcagccctccagacccccaccctgtcctcagcagccagggcaggccacttgtgagaccctctcctctgccccagaccccagcactacgagaatgtcccctccctgtccccagccccagtcggctccagggggcattgggtgctggagactaaaggtgtttggtcttgggaacaagacctacgagcacttcaatgccatgggcaagtacgtggacaagcggctggagcagctcggcgcccagcgcatctttgagctggggttgggcgacgacgatgggaacttggaggaggacttcatcacctggcgagagcagttctggccggccgtgtgtgaacactttggggtggaagccactggcgaggagtccagcattcgccagtacgagcttgtggtccacaccgacatagatgcggccaaggtgtacatgggggagatgggccggctgaagagctacgagaaccagaagcccccctttgatgccaagaatccgttcctggctgcagtcaccaccaaccggaagctgaaccagggaaccgagcgccacctcatgcacctggaattggacatctcggactccaaaatcaggtatgaatctggggaccacgtggctgtgtacccagccaacgactctgctctcgtcaaccagctgggcaaaatcctgggtgccgacctggacgtcgtcatgtccctgaacaacctggatgaggagtccaacaagaagcacccattcccgtgccctacgtcctaccgcacggccctcacctactacctggacatcaccaacccgccgcgtaccaacgtgctgtacgagctggcgcagtacgcctcggagccctcggagcaggagctgctgcgcaagatggcctcctcctccggcgagggcaaggagctgtacctgagctgggtggtggaggcccggaggcacatcctggccatcctgcaggactgcccgtccctgcggccccccatcgaccacctgtgtgagctgctgccgcgcctgcaggcccgctactactccatcgcctcatcctccaaggtccaccccaactctgtgcacatctgtgcggtggttgtggagtacgagaccaaggctggccgcatcaacaagggcgtggccaccaactggctgcgggccaaggagcctgccggggagaacggcggccgtgcgctggtgcccatgttcgtgcgcaagtcccagttccgcctgcccttcaaggccaccacgcctgtcatcatggtgggccccggcaccggggtggcacccttcataggcttcatccaggagcgggcctggctgcgacagcagggcaaggaggtgggggagacgctgctgtactacggctgccgccgctcggatgaggactacctgtaccgggaggagctggcgcagttccacagggacggtgcgctcacccagctcaacgtggccttctcccgggagcagtcccacaaggtctacgtccagcacctgctaaagcaagaccgagagcacctgtggaagttgatcgaaggcggtgcccacatctacgtctgtggcaccccctcttcctgcccagggatgcacggaacatggccagggatgtgcagaacaccttctacgacatcgtggctgagctcggggccatggagcacgcgcaggcggtggactacatcaagaaactgatgaccaagggccgctactccctggacgtgtggagctaggggcctgcctgccccacccaccccacagactccggcctgtaatcagctctcctggctccctcccgtagtctcctgggtgtgtttggcttggccttggcatgggcgcaggcccagtgac

SEQ ID NO: 21416 - DNA, 498 bp, Homo sapiens
  source 1..498: mol_type = unassigned DNA
agaccgccctcagcacaggacctgccctggctggtcagccctgcctggggcacccacagccccagctgtccagtttcatgatcaacatgggagactcccacgtggacaccagctccaccgtgtccgaggcggtggccgaagaagtatctcttttcagcatgacggacatgattctgttttcgctcatcgtgggtctcctaacctactggttcctcttcagaaagaaaaaagaagaagtccccgagttcaccaaaattcagacattgacctcctctgtcagagagagcagctttgtggaaaagatgaagaaaacggggaggaacatcatcgtgttctacggctcccagacggggactgcagaggagtttgccaaccgcctgtccaaggacgcccaccgctacgggatgcgaggcatgtcagcggaccctgaggagtatgacctggccgacctgagcagcctgccagagatcgacaacgccctggtggttttctgcatgg

SEQ ID NO: 21417 - DNA, 2522 bp, Homo sapiens
  source 1..2522: mol_type = unassigned DNA
acgcccccacccccgcggccggcgaaggcggtggtagcgcctcagtggtgtgggcctgagccctgcccaggtgcccgcagagagcagccgggctgccagcgtttcatgatcaacatgggagactcccacgtggacaccagctccaccgtgtccgaggcggtggccgaagaagtatctcttttcagcatgacggacatgattctgttttcgctcatcgtgggtctcctaacctactggttcctcttcagaaagaaaaaagaagaagtccccgagttcaccaaaattcagacattgacctcctctgtcagagagagcagctttgtggaaaagatgaagaaaacggggaggaacatcatcgtgttctacggctcccagacggggactgcagaggagtttgccaaccgcctgtccaaggacgcccaccgctacgggatgcgaggcatgtcagcggaccctgaggagtatgacctggccgacctgagcagcctgccagagatcgacaacgccctggtggttttctgcatggccacctacggtgagggagaccccaccgacaatgcccaggacttctacgactggctgcaggagacagacgtggatctctctggggtcaagttcgcggtgtttggtcttgggaacaagacctacgagcacttcaatgccatgggcaagtacgtggacaagcggctggagcagctcggcgcccagcgcatctttgagctggggttgggcgacgacgatgggaacttggaggaggacttcatcacctggcgagagcagttctggccggccgtgtgtgaacactttggggtggaagccactggcgaggagtccagcattcgccagtacgagcttgtggtccacaccgacatagatgcggccaaggtgtacatgggggagatgggccggctgaagagctacgagaaccagaagcccccctttgatgccaagaatccgttcctggctgcagtcaccaccaaccggaagctgaaccagggaaccgagcgccacctcatgcacctggaattggacatctcggactccaaaatcaggtatgaatctggggaccacgtggctgtgtacccagccaacgactctgctctcgtcaaccagctgggcaaaatcctgggtgccgacctggacgtcgtcatgtccctgaacaacctggatgaggagtccaacaagaagcacccattcccgtgccctacgtcctaccgcacggccctcacctactacctggacatcaccaacccgccgcgtaccaacgtgctgtacgagctggcgcagtacgcctcggagccctcggagcaggagctgctgcgcaagatggcctcctcctccggcgagggcaaggagctgtacctgagctgggtggtggaggcccggaggcacatcctggccatcctgcaggactgcccgtccctgcggccccccatcgaccacctgtgtgagctgctgccgcgcctgcaggcccgctactactccatcgcctcatcctccaaggtccaccccaactctgtgcacatctgtgcggtggttgtggagtacgagaccaaggctggccgcatcaacaagggcgtggccaccaactggctgcgggccaaggagcctgccggggagaacggcggccgtgcgctggtgcccatgttcgtgcgcaagtcccagttccgcctgcccttcaaggccaccacgcctgtcatcatggtgggccccggcaccggggtggcacccttcataggcttcatccaggagcgggcctggctgcgacagcagggcaaggaggtgggggagacgctgctgtactacggctgccgccgctcggatgaggactacctgtaccgggaggagctggcgcagttccacagggacggtgcgctcacccagctcaacgtggccttctcccgggagcagtcccacaaggtctacgtccagcacctgctaaagcaagaccgagagcacctgtggaagttgatcgaaggcggtgcccacatctacgtctgtggggatgcacggaacatggccagggatgtgcagaacaccttctacgacatcgtggctgagctcggggccatggagcacgcgcaggcggtggactacatcaagaaactgatgaccaagggccgctactccctggacgtgtggagctaggggcctgcctgccccacccaccccacagactccggcctgtaatcagctctcctggctccctcccgtagtctcctgggtgtgtttggcttggccttggcatgggcgcaggcccagtgacaaagactcctctgggcctggggtgcatcctcctcagcccccaggccaggtgaggtccaccggcccctggcagcacagcccagggcctgcatgggggcaccgggctccatgcctctggaggcctctggccctcggtggctgcacagaagggctctttctctctgctgagctgggcccagcccctccacgtgatttccagtgagtgtaaataattttaaataacctctggcccttggaataaagttctgttttctgta

SEQ ID NO: 21418 - DNA, 1905 bp, Homo sapiens
  source 1..1905: mol_type = unassigned DNA
agagatcgacaacgccctggtggttttctgcatggccacctacggtgagggagaccccaccgacaatgcccaggacttctacgactggctgcaggagacagacgtggatctctctggggtcaagttcgcgcttggaggaggacttcatcacctggcgagagcagttctggccggccgtgtgtgaacactttggggtggaagccactggcgaggagtccagcattcgccagtacgagcttgtggtccacaccgacatagatgcggccaaggtgtacatgggggagatgggccggctgaagagctacgagaaccagaagcccccctttgatgccaagaatccgttcctggctgcagtcaccaccaaccggaagctgaaccagggaaccgagcgccacctcatgcacctggaattggacatctcggactccaaaatcaggtatgaatctggggaccacgtggctgtgtacccagccaacgactctgctctcgtcaaccagctgggcaaaatcctgggtgccgacctggacgtcgtcatgtccctgaacaacctggatgaggagtccaacaagaagcacccattcccgtgccctacgtcctaccgcacggccctcacctactacctggacatcaccaacccgccgcgtaccaacgtgctgtacgagctggcgcagtacgcctcggagccctcggagcaggagctgctgcgcaagatggcctcctcctccggcgagggcaaggagctgtacctgagctgggtggtggaggcccggaggcacatcctggccatcctgcaggactgcccgtccctgcggccccccatcgaccacctgtgtgagctgctgccgcgcctgcaggcccgctactactccatcgcctcatcctccaaggtccaccccaactctgtgcacatctgtgcggtggttgtggagtacgagaccaaggctggccgcatcaacaagggcgtggccaccaactggctgcgggccaaggagcctgccggggagaacggcggccgtgcgctggtgcccatgttcgtgcgcaagtcccagttccgcctgcccttcaaggccaccacgcctgtcatcatggtgggccccggcaccggggtggcacccttcataggcttcatccaggagcgggcctggctgcgacagcagggcaaggaggtgggggagacgctgctgtactacggctgccgccgctcggatgaggactacctgtaccgggaggagctggcgcagttccacagggacggtgcgctcacccagctcaacgtggccttctcccgggagcagtcccacaaggtctacgtccagcacctgctaaagcaagaccgagagcacctgtggaagttgatcgaaggcggtgcccacatctacgtctgtggggatgcacggaacatggccagggatgtgcagaacaccttctacgacatcgtggctgagctcggggccatggagcacgcgcaggcggtggactacatcaagaaactgatgaccaagggccgctactccctggacgtgtggagctaggggcctgcctgccccacccaccccacagactccggcctgtaatcagctctcctggctccctcccgtagtctcctgggtgtgtttggcttggccttggcatgggcgcaggcccagtgacaaagactcctctgggcctggggtgcatcctcctcagcccccaggccaggtgaggtccaccggcccctggcagcacagcccagggcctgcatgggggcaccgggctccatgcctctggaggcctctggccctcggtggctgcacagaagggctctttctctctgctgagctgggcccagcccctccacgtgatttccagtgagtgtaaataattttaaataacctctggcccttggaataaagttctgttttctgt

SEQ ID NO: 21419 - DNA, 1385 bp, Homo sapiens
  source 1..1385: mol_type = unassigned DNA
agcctgcgcaccaccgttcttttaactgcgcaggcgcgccggaagcacctagagagcggcgcgtgcgcagcgggagtcgaagcggagatcccggggtcgcgcgagagccgcaagcggagttggtgggcgctatgctatcacccgaggcagagcgagtgctgcggtaccttgtagaagtggaggagctcgccgaggaggtgctggcggacaagcggcagattgtggacctggacactaaaaggaatcagaatcgagagggcctgagggccctgcagaaggatctcagcctctctgaagatgtgatggtttgcttcgggaacatgtttatcaagatgcctcaccctgagacaaaggaaatgattgaaaaagatcaagatcatctggataaagaaatagaaaaactgcggaagcaacttaaagtgaaggtcaaccgcctttttgaggcccaaggcaaaccggagctgaagggttttaacttgaaccccctcaaccaggatgagcttaaagctctcaaggtcatcttgaaaggatgagactcaagaaccaagatgggggaccagcaaccccccagggtcatggaggacccaggaccctccaaccttgacacctgtaaggacaggatctgccctgtaaggggccagccgtcaggaatctggccatgaaaacctctttgtagtgcttggctactctgtgatggcaggagggaaccttcagcctgtctggctgctggacctggacaccagggctcggtggacacaagatctattgacgggccttggtagccaccagtgggtgtgtggggcagtggctgtgggggtgtaagaatgactgcaacaggcacttcccaacaatggcctgctgttcacatggaccctgagcaaggaaggagggagggaggggcagagtggagtgtcattccagcattcctctcagaagggagagaggttttcaggctggtgccatgcgattggaataaagcaggaggctcatgggtggttgctgaatgaagaacagaatcttggtgctttgtggctcaccacagccatctgtggggcaggcacacacacctcccgccagctccaattttgcactttttccctgcttgattccaagagtaggtgctgcctagcagcccttcgtggccactctttactcaggagggccttgcagagtcctgcaccaggcctgggtgagtggatgcgcctcttaccatatgacacgtgtcaagatgcccttccgccccctctgaaagtggggcccggccagcactgctcgttactgtctgccttcagtggtctgaggtcccagtatgaactgccgtgaagtcaaaactcttatgtgttcattaagggctcaataaatgttagctgaatgaatgaatagca

SEQ ID NO: 21420 - DNA, 2838 bp, Homo sapiens
  source 1..2838: mol_type = unassigned DNA
aaattgattcccgcacgctgcagcctcccggtcagacgaatttctcccaatcggatgaagttcaccctgggcctggggtcgcgggcgtggagagtgtcctgggagggggcagcagcggcggcggcaggccctggagcgggcggcagcgcgctccgctgccgcgcacagcgcgtctccagcccgcggctgggccgccgcggctctcggctctcgggcgccctccctctatgcctctcacgcggcggcggcggcgcccaagctctcccggactgcgccgggcccagccccggccaccccggccaccccggcgccaggcagctggccggcccgctcgctatggagcagacgtatggcgaggtgaaccagctgggcggtgtgttcgtcaacggccgccccctgcccaacgccatccgcttgcgcattgtggagctggcgcagctgggcatccgaccctgtgacatcagtcggcagctccgcgtatcccacggctgcgtgagcaagatcctggcgcgctacaacgagaccggctccattctgcccggggccatcggggggagcaagccccgcgtcaccactcccaacgtggtcaagcacatccgggactacaagcaaggagaccctggcatctttgcctgggagatccgcgaccggctgctggccgacggcgtctgtgacaagtacaatgtgccttcggtgagctccatcagccgcatcctgcgcaacaagatcggcagcctggcgcagcccggaccgtacgaggcaagtaagcagccgccgtcgcagcctacgctgccctacaaccacatctaccagtacccctaccccagtcccgtgtcgcccacgggcgccaagatgggcagccaccccggggtcccgggcacggcgggccacgtcagcatcccgcgctcatggccctcggcacactcggtcagcaacatcctgggcatccggacgtttatggagcaaacaggggccctggctgggagcgaaggcaccgcttactctcccaagatggaagactgggccggcgtgaaccgcacggccttccccgccacccccgcagtgaatgggctagagaaacctgccttagaggcagacattaaatacactcagtcggcctccaccctctctgccgtgggcggctttctccccgcctgcgcctacccggcctccaaccagcacggcgtgtacagcgccccgggcggcggctacctcgccccgggcccgccgtggccgcctgcgcaaggtcctcctctggcgccccccggggccggcgtagctgtgcatggcggggaactcgcggcagcaatgaccttcaagcatcccagccgagaaggaagcctcccagctccggcagcaaggccccggacgccctcagtagcttacacggactgcccatcccggcctcgacctcctaggggcagctctccccggacccgagcccggagggaacggcaggcggacccgggcgcacaggtctgcgcggcggccccggcaatcggcacgggcaggatcggaggactcgcggaggaggaagccagtgccggcccgcggggtgcacgcccagccagcccccaggcccagccctgcctctggccggacccaccacacttcctttattggtctgggtttttaggcttctctgaacttgggttttagactgccgtaccctcctcacaatccttgctctgacgtggcctccttcgctctgccagcttcaaatttcttttttgtcactcccttgtccgtctccgtctcgcctctctccctgtttccttcccccctctttctttctcactctccctcccttccctttctctttcccttcctccctaccttccaccccggctttccccgaccttccagggctccctctgcccttccactctcttttccttgctccgacctctgctccagtcccgcttcttcccccgtctcctctttctagtcctctatatgctatcagccctttttcctggtccatccctgtcgttccttctctctctgtctctggttctactgtcaagggccctagttccctttgttttactgcttccccaaccctccctcagtccctgagagccctagagccatctcggtgacagtcccttctctggcacctgggactttgtagccttcactcctctgagcccaccagccctaatggaggggggctcaaacctaggaagtggacagaaaagccacagcctttattttgtattttttttgtaataacaaaccctaaaaaaccctccatgaactgtcctctcccgtcgatccccgcagcatattgtctggaaatctgttttctttctcagagcccagtggccgccgggcttctcttcccttctgagatgatgtcaccccaaagaagactggggtaggagtagggagcacaggggttgttggtgttttcagtgcttagaaaactgggttgtcctgcaggtgtctcctcccacccctccactcgcaacacttgctagggaatccgaccagtggtaaacacatcagcactttttggtgttcaggggtcagcacatttgttaatttaaaccacagactgcttccaggtacaaaggttcatttggacttctggtttgcaagggatgagggttaaaaaaaacaaaacaaaacaaacaacaacaacaacaaaaacaacccagaaagtatcttctagagccagccgcaagagctgtgagctgcttccaagttaggcgagctggtggtggtaccctggacataatgcaattctgtagtcagagcaatatccctggcgagagcctgacatcgcctgttaaaggtggctgcctctgaataaaggaaagcgtctgaaaggtg

SEQ ID NO: 21421 - DNA, 4057 bp, Homo sapiens
  source 1..4057: mol_type = unassigned DNA
cgggggcctggcccgcgcgctcccctcccgcaggcgccacctcggacatccccgggattgctacttctctgccaacttcgccaactcgccagcacttggagaggcccggctcccctcccggcgccctctgaccgcccccgccccgcgcgctctccgaccaccgcctctcggatgaccaggttccaggggagctgagcgagtcgcctcccccgcccagcttcagccctggctgcagctgcagcgcgagccatgcgcccccagtgcaccccggcccggcccaccgccccggggccattctgctgaccgcccagccccgagccccgacagtggcaagttgcggctactgcagttgcaagctccggccaacccggaggagccccagcggggagcgcagtgctgcgccccccgcccccgcgcgccccgcagcagccgggcgttcactcatcctccctcccccaccgtccctcccttttctcctcaagtcctgaagttgagtttgagaggcgacacggcggcggcggccgcgctgctcccgctcctctgcctccccatggatatgcactgcaaagcagaccccttctccgcgatgcacccagggcacgggggtgtgaaccagctcgggggggtgtttgtgaacggccggcccctacccgacgtggtgaggcagcgcatcgtggagctggcccaccagggtgtgcggccctgtgacatctcccggcagctgcgggtcagccacggctgtgtcagcaaaatcctgggcaggtactacgagaccggcagcatcaagccgggtgtgatcggtggctccaagcccaaagtggcgacgcccaaagtggtggacaagattgctgaatacaaacgacagaacccgactatgttcgcctgggagattcgagaccggctcctggccgagggcatctgtgacaatgacacagtgcccagcgtctcttccatcaacagaatcatccggaccaaagttcagcagcctttccacccaacgccggatggggctgggacaggagtgaccgcccctggccacaccattgttcccagcacggcctcccctcctgtttccagcgcctccaatgacccagtgggatcctactccatcaatgggatcctggggattcctcgctccaatggtgagaagaggaaacgtgatgaagatgtgtctgagggctcagtccccaatggagattcccagagtggtgtggacagtttgcggaagcacttgcgagctgacaccttcacccagcagcagctggaagctttggatcgggtctttgagcgtccttcctaccctgacgtcttccaggcatcagagcacatcaaatcagaacaggggaacgagtactccctcccagccctgacccctgggcttgatgaagtcaagtcgagtctatctgcatccaccaaccctgagctgggcagcaacgtgtcaggcacacagacatacccagttgtgactggtcgtgacatggcgagcaccactctgcctggttacccccctcacgtgccccccactggccagggaagctaccccacctccaccctggcaggaatggtgcctgggagcgagttctccggcaacccgtacagccacccccagtacacggcctacaacgaggcttggagattcagcaaccccgccttactaagttccccttattattatagtgccgccccccggggctccgcccctgccgctgctgccgctgcctatgaccgccactagttaccgcggggaccacatcaagcttcaggccgacagcttcggcctccacatcgtccccgtctgaccccaccccggagggagggaggaccgacgcgacgcgatgcctcccggccaccgccccagcctcaccccatcccacgacccccgcaacccttcacatcacccccctcgaaggtcggacaggacgggtggagccgtgggcgggaccctcaggcccgggcccgccgcccccagccccgcctgccgcccctccccgcctgcctggactgcgcggcgccgtgagggggattcggcccagctcgtcccggcctccaccaagccagccccgaagcccgccagccaccctgccggactcgggcgcgacctgctggcgcgcgccggatgtttctgtgacacacaatcagcgcggaccgcagcgcggcccagccccgggcacccgcctcggacgctcgggcgccaggaggcttcgctggaggggctgggccaaggagattaagaagaaaacgactttctgcaggaggaagagcccgctgccgaatccctgggaaaaattcttttcccccagtgccagccggactgccctcgccttccgggtgtgccctgtcccagaagatggaatgggggtgtgggggtccggctctaggaacgggctttgggggcgtcaggtctttccaaggttgggacccaaggatcggggggcccagcagcccgcaccgatcgagccggactctcggctcttcactgctcctcctggcctgcctagttccccagggcccggcacctcctgctgcgagacccggctctcagccctgccttgcccctacctcagcgtctcttccacctgctggcctcccagtttcccctcctgccagtccttcgcctgtcccttgacgccctgcatcctcctccctgactcgcagccccatcggacgctctcccgggaccgccgcaggaccagtttccatagactgcggactggggtcttcctccagcagttacttgatgccccctcccccgacacagactctcaatctgccggtggtaagaaccggttctgagctggcgtctgagctgctgcggggtggaagtggggggctgcccactccactcctcccatcccctcccagcctcctcctccggcaggaactgaacagaaccacaaaaagtctacatttatttaatatgatggtctttgcaaaaaggaacaaaacaacacaaaagcccaccaggctgctgctttgtggaaagacggtgtgtgtcgtgtgaaggcgaaacccggtgtacataacccctccccctccgccccgccccgcccggccccgtagagtccctgtcgcccgccggccctgcctgtagatacgccccgctgtctgtgctgtgagagtcgccgctcgctgggggggaagggggggacacagctacacgcccattaaagcacagcacgtcctgggggaggggggcattttttatgttacaaaaaaaaattacgaaagaaaagaaatctctatgcaaaatgacgaacatggtcctgtggactcctctggcctgttttgttggctctttctctgtaattccgtgttttcgctttttcctccctgcccctctctccctctgcccctctctcctctccgcttctctccccctctgtctctgtctctctccgtctctgtcgctcttgtctgtctgtctctgctctttcctcggcctctctccccagacctggcccggccgccctgtctccgcaggctagatccgaggtggcagctccagcccccgggctcgccccctcgcgggcgtgccccgcgcgccccgggcggccgaaggccgggccgccccgtcccgccccgtagttgctctttcggtagtggcgatgcgccctgcatgtctcctcacccgtggatcgtgacgactcgaaataacagaaacaaagtcaataaagtgaaaataaataaaaatccttgaacaaatccgaaaaggcttggagtcctcgcccagatctctctcccctgcgagccctttttatttgagaaggaaaaagagaaaagagaatcgtttaagggaacccggcgcccagccaggctccagtggcccgaacggggcggcgagggcggcgagggcgccgaggtccggcccatcccagtcctgtggggctggccgggcagagaccccggacccaggcccaggcctaacctgctaaatgtccccggacggttctggtctcctcggccactttcagtgcgtcggttcgttttgattctttttcttttgtgcacataagaaataaataataataataaataaagaataaaattttgtatgtca

SEQ ID NO: 21422 - DNA, 3516 bp, Homo sapiens
  source 1..3516: mol_type = unassigned DNA
cgggggcctggcccgcgcgctcccctcccgcaggcgccacctcggacatccccgggattgctacttctctgccaacttcgccaactcgccagcacttggagaggcccggctcccctcccggcgccctctgaccgcccccgccccgcgcgctctccgaccaccgcctctcggatgaccaggttccaggggagctgagcgagtcgcctcccccgcccagcttcagccctggctgcagctgcagcgcgagccatgcgcccccagtgcaccccggcccggcccaccgccccggggccattctgctgaccgcccagccccgagccccgacagtggcaagttgcggctactgcagttgcaagctccggccaacccggaggagccccagcggggagcgcagtgctgcgccccccgcccccgcgcgccccgcagcagccgggcgttcactcatcctccctcccccaccgtccctcccttttctcctcaagtcctgaagttgagtttgagaggcgacacggcggcggcggccgcgctgctcccgctcctctgcctccccatggatatgcactgcaaagcagaccccttctccgcgatgcacccagggcacgggggtgtgaaccagctcgggggggtgtttgtgaacggccggcccctacccgacgtggtgaggcagcgcatcgtggagctggcccaccagggtgtgcggccctgtgacatctcccggcagctgcgggtcagccacggctgtgtcagcaaaatcctgggcaggtactacgagaccggcagcatcaagccgggtgtgatcggtggctccaagcccaaagtggcgacgcccaaagtggtggacaagattgctgaatacaaacgacagaacccgactatgttcgcctgggagattcgagaccggctcctggccgagggcatctgtgacaatgacacagtgcccagcgtctcttccatcaacagaatcatccggaccaaagttcagcagcctttccacccaacgccggatggggctgggacaggagtgaccgcccctggccacaccattgttcccagcacggcctcccctcctgtttccagcgcctccaatgacccagtgggatcctactccatcaatgggatcctggggattcctcgctccaatggtgagaagaggaaacgtgatgaagatgtgtctgagggctcagtccccaatggagattcccagagtggtgtggacagtttgcggaagcacttgcgagctgacaccttcacccagcagcagctggaagctttggatcgggtctttgagcgtccttcctaccctgacgtcttccaggcatcagagcacatcaaatcagaacaggggaacgagtactccctcccagccctgacccctgggcttgatgaagtcaagtcgagtctatctgcatccaccaaccctgagctgggcagcaacgtgtcaggcacacagacatacccagttgtgactggtcgtgacatggcgagcaccactctgcctggttacccccctcacgtgccccccactggccagggaagctaccccacctccaccctggcaggaatggtgcctgaggctgcagttggtccctcatcctccctcatgagcaagccggggaggaagcttgcagaagtgcccccttgtgtgcaacccactggagcgagttctccggcaacccgtacagccacccccagtacacggcctacaacgaggcttggagattcagcaaccccgccttactaagttccccttattattatagtgccgccccccggggctccgcccctgccgctgctgccgctgcctatgaccgccactagttaccgcggggaccacatcaagcttcaggccgacagcttcggcctccacatcgtccccgtctgaccccaccccggagggagggaggaccgacgcgacgcgatgcctcccggccaccgccccagcctcaccccatcccacgacccccgcaacccttcacatcacccccctcgaaggtcggacaggacgggtggagccgtgggcgggaccctcaggcccgggcccgccgcccccagccccgcctgccgcccctccccgcctgcctggactgcgcggcgccgtgagggggattcggcccagctcgtcccggcctccaccaagccagccccgaagcccgccagccaccctgccggactcgggcgcgacctgctggcgcgcgccggatgtttctgtgacacacaatcagcgcggaccgcagcgcggcccagccccgggcacccgcctcggacgctcgggcgccaggaggcttcgctggaggggctgggccaaggagattaagaagaaaacgactttctgcaggaggaagagcccgctgccgaatccctgggaaaaattcttttcccccagtgccagccggactgccctcgccttccgggtgtgccctgtcccagaagatggaatgggggtgtgggggtccggctctaggaacgggctttgggggcgtcaggtctttccaaggttgggacccaaggatcggggggcccagcagcccgcaccgatcgagccggactctcggctcttcactgctcctcctggcctgcctagttccccagggcccggcacctcctgctgcgagacccggctctcagccctgccttgcccctacctcagcgtctcttccacctgctggcctcccagtttcccctcctgccagtccttcgcctgtcccttgacgccctgcatcctcctccctgactcgcagccccatcggacgctctcccgggaccgccgcaggaccagtttccatagactgcggactggggtcttcctccagcagttacttgatgccccctcccccgacacagactctcaatctgccggtggtaagaaccggttctgagctggcgtctgagctgctgcggggtggaagtggggggctgcccactccactcctcccatcccctcccagcctcctcctccggcaggaactgaacagaaccacaaaaagtctacatttatttaatatgatggtctttgcaaaaaggaacaaaacaacacaaaagcccaccaggctgctgctttgtggaaagacggtgtgtgtcgtgtgaaggcgaaacccggtgtacataacccctccccctccgccccgccccgcccggccccgtagagtccctgtcgcccgccggccctgcctgtagatacgccccgctgtctgtgctgtgagagtcgccgctcgctgggggggaagggggggacacagctacacgcccattaaagcacagcacgtcctgggggaggggggcattttttatgttacaaaaaaaaattacgaaagaaaagaaatctctatgcaaaatgacgaacatggtcctgtggactcctctggcctgttttgttggctctttctctgtaattccgtgttttcgctttttcctccctgcccctctctccctctgcccctctctcctctccgcttctctccccctctgtctctgtctctctccgtctctgtcgctcttgtctgtctgtctctgctcttt

SEQ ID NO: 21423 - DNA, 4122 bp, Homo sapiens
  source 1..4122: mol_type = unassigned DNA
cgggggcctggcccgcgcgctcccctcccgcaggcgccacctcggacatccccgggattgctacttctctgccaacttcgccaactcgccagcacttggagaggcccggctcccctcccggcgccctctgaccgcccccgccccgcgcgctctccgaccaccgcctctcggatgaccaggttccaggggagctgagcgagtcgcctcccccgcccagcttcagccctggctgcagctgcagcgcgagccatgcgcccccagtgcaccccggcccggcccaccgccccggggccattctgctgaccgcccagccccgagccccgacagtggcaagttgcggctactgcagttgcaagctccggccaacccggaggagccccagcggggagcgcagtgctgcgccccccgcccccgcgcgccccgcagcagccgggcgttcactcatcctccctcccccaccgtccctcccttttctcctcaagtcctgaagttgagtttgagaggcgacacggcggcggcggccgcgctgctcccgctcctctgcctccccatggatatgcactgcaaagcagaccccttctccgcgatgcacccagggcacgggggtgtgaaccagctcgggggggtgtttgtgaacggccggcccctacccgacgtggtgaggcagcgcatcgtggagctggcccaccagggtgtgcggccctgtgacatctcccggcagctgcgggtcagccacggctgtgtcagcaaaatcctgggcaggtactacgagaccggcagcatcaagccgggtgtgatcggtggctccaagcccaaagtggcgacgcccaaagtggtggacaagattgctgaatacaaacgacagaacccgactatgttcgcctgggagattcgagaccggctcctggccgagggcatctgtgacaatgacacagtgcccagcgtctcttccatcaacagaatcatccggaccaaagttcagcagcctttccacccaacgccggatggggctgggacaggagtgaccgcccctggccacaccattgttcccagcacggcctcccctcctgtttccagcgcctccaatgacccagtgggatcctactccatcaatgggatcctggggattcctcgctccaatggtgagaagaggaaacgtgatgaagttgaggtatacactgatcctgcccacattagaggaggtggaggtttgcatctggtctggactttaagagatgtgtctgagggctcagtccccaatggagattcccagagtggtgtggacagtttgcggaagcacttgcgagctgacaccttcacccagcagcagctggaagctttggatcgggtctttgagcgtccttcctaccctgacgtcttccaggcatcagagcacatcaaatcagaacaggggaacgagtactccctcccagccctgacccctgggcttgatgaagtcaagtcgagtctatctgcatccaccaaccctgagctgggcagcaacgtgtcaggcacacagacatacccagttgtgactggtcgtgacatggcgagcaccactctgcctggttacccccctcacgtgccccccactggccagggaagctaccccacctccaccctggcaggaatggtgcctggtagcgagttctccggcaacccgtacagccacccccagtacacggcctacaacgaggcttggagattcagcaaccccgccttactaagttccccttattattatagtgccgccccccggggctccctgccgctgctgccgctgcctatgaccgccactagttaccgcggggaccacatcaagcttcaggccgacagcttcggcctccacatcgtccccgtctgaccccaccccggagggagggaggaccgacgcgacgcgatgcctcccggccaccgccccagcctcaccccatcccacgacccccgcaacccttcacatcacccccctcgaaggtcggacaggacgggtggagccgtgggcgggaccctcaggcccgggcccgccgcccccagccccgcctgccgcccctccccgcctgcctggactgcgcggcgccgtgagggggattcggcccagctcgtcccggcctccaccaagccagccccgaagcccgccagccaccctgccggactcgggcgcgacctgctggcgcgcgccggatgtttctgtgacacacaatcagcgcggaccgcagcgcggcccagccccgggcacccgcctcggacgctcgggcgccaggaggcttcgctggaggggctgggccaaggagattaagaagaaaacgactttctgcaggaggaagagcccgctgccgaatccctgggaaaaattcttttcccccagtgccagccggactgccctcgccttccgggtgtgccctgtcccagaagatggaatgggggtgtgggggtccggctctaggaacgggctttgggggcgtcaggtctttccaaggttgggacccaaggatcggggggcccagcagcccgcaccgatcgagccggactctcggctcttcactgctcctcctggcctgcctagttccccagggcccggcacctcctgctgcgagacccggctctcagccctgccttgcccctacctcagcgtctcttccacctgctggcctcccagtttcccctcctgccagtccttcgcctgtcccttgacgccctgcatcctcctccctgactcgcagccccatcggacgctctcccgggaccgccgcaggaccagtttccatagactgcggactggggtcttcctccagcagttacttgatgccccctcccccgacacagactctcaatctgccggtggtaagaaccggttctgagctggcgtctgagctgctgcggggtggaagtggggggctgcccactccactcctcccatcccctcccagcctcctcctccggcaggaactgaacagaaccacaaaaagtctacatttatttaatatgatggtctttgcaaaaaggaacaaaacaacacaaaagcccaccaggctgctgctttgtggaaagacggtgtgtgtcgtgtgaaggcgaaacccggtgtacataacccctccccctccgccccgccccgcccggccccgtagagtccctgtcgcccgccggccctgcctgtagatacgccccgctgtctgtgctgtgagagtcgccgctcgctgggggggaagggggggacacagctacacgcccattaaagcacagcacgtcctgggggaggggggcattttttatgttacaaaaaaaaattacgaaagaaaagaaatctctatgcaaaatgacgaacatggtcctgtggactcctctggcctgttttgttggctctttctctgtaattccgtgttttcgctttttcctccctgcccctctctccctctgcccctctctcctctccgcttctctccccctctgtctctgtctctctccgtctctgtcgctcttgtctgtctgtctctgctctttcctcggcctctctccccagacctggcccggccgccctgtctccgcaggctagatccgaggtggcagctccagcccccgggctcgccccctcgcgggcgtgccccgcgcgccccgggcggccgaaggccgggccgccccgtcccgccccgtagttgctctttcggtagtggcgatgcgccctgcatgtctcctcacccgtggatcgtgacgactcgaaataacagaaacaaagtcaataaagtgaaaataaataaaaatccttgaacaaatccgaaaaggcttggagtcctcgcccagatctctctcccctgcgagccctttttatttgagaaggaaaaagagaaaagagaatcgtttaagggaacccggcgcccagccaggctccagtggcccgaacggggcggcgagggcggcgagggcgccgaggtccggcccatcccagtcctgtggggctggccgggcagagaccccggacccaggcccaggcctaacctgctaaatgtccccggacggttctggtctcctcggccactttcagtgcgtcggttcgttttgattctttttcttttgtgcacataagaaataaataataataataaataaagaataaaattttgtatgtca

SEQ ID NO: 21424 - DNA, 4209 bp, Homo sapiens
  source 1..4209: mol_type = unassigned DNA
cgggggcctggcccgcgcgctcccctcccgcaggcgccacctcggacatccccgggattgctacttctctgccaacttcgccaactcgccagcacttggagaggcccggctcccctcccggcgccctctgaccgcccccgccccgcgcgctctccgaccaccgcctctcggatgaccaggttccaggggagctgagcgagtcgcctcccccgcccagcttcagccctggctgcagctgcagcgcgagccatgcgcccccagtgcaccccggcccggcccaccgccccggggccattctgctgaccgcccagccccgagccccgacagtggcaagttgcggctactgcagttgcaagctccggccaacccggaggagccccagcggggagcgcagtgctgcgccccccgcccccgcgcgccccgcagcagccgggcgttcactcatcctccctcccccaccgtccctcccttttctcctcaagtcctgaagttgagtttgagaggcgacacggcggcggcggccgcgctgctcccgctcctctgcctccccatggatatgcactgcaaagcagaccccttctccgcgatgcacccagggcacgggggtgtgaaccagctcgggggggtgtttgtgaacggccggcccctacccgacgtggtgaggcagcgcatcgtggagctggcccaccagggtgtgcggccctgtgacatctcccggcagctgcgggtcagccacggctgtgtcagcaaaatcctgggcaggtactacgagaccggcagcatcaagccgggtgtgatcggtggctccaagcccaaagtggcgacgcccaaagtggtggacaagattgctgaatacaaacgacagaacccgactatgttcgcctgggagattcgagaccggctcctggccgagggcatctgtgacaatgacacagtgcccagcgtctcttccatcaacagaatcatccggaccaaagttcagcagcctttccacccaacgccggatggggctgggacaggagtgaccgcccctggccacaccattgttcccagcacggcctcccctcctgtttccagcgcctccaatgacccagtgggatcctactccatcaatgggatcctggggattcctcgctccaatggtgagaagaggaaacgtgatgaagttgaggtatacactgatcctgcccacattagaggaggtggaggtttgcatctggtctggactttaagagatgtgtctgagggctcagtccccaatggagattcccagagtggtgtggacagtttgcggaagcacttgcgagctgacaccttcacccagcagcagctggaagctttggatcgggtctttgagcgtccttcctaccctgacgtcttccaggcatcagagcacatcaaatcagaacaggggaacgagtactccctcccagccctgacccctgggcttgatgaagtcaagtcgagtctatctgcatccaccaaccctgagctgggcagcaacgtgtcaggcacacagacatacccagttgtgactggtcgtgacatggcgagcaccactctgcctggttacccccctcacgtgccccccactggccagggaagctaccccacctccaccctggcaggaatggtgcctgaggctgcagttggtccctcatcctccctcatgagcaagccggggaggaagcttgcagaagtgcccccttgtgtgcaacccactggagcgagttctccggcaacccgtacagccacccccagtacacggcctacaacgaggcttggagattcagcaaccccgccttactaagttccccttattattatagtgccgccccccggggctccgcccctgccgctgctgccgctgcctatgaccgccactagttaccgcggggaccacatcaagcttcaggccgacagcttcggcctccacatcgtccccgtctgaccccaccccggagggagggaggaccgacgcgacgcgatgcctcccggccaccgccccagcctcaccccatcccacgacccccgcaacccttcacatcacccccctcgaaggtcggacaggacgggtggagccgtgggcgggaccctcaggcccgggcccgccgcccccagccccgcctgccgcccctccccgcctgcctggactgcgcggcgccgtgagggggattcggcccagctcgtcccggcctccaccaagccagccccgaagcccgccagccaccctgccggactcgggcgcgacctgctggcgcgcgccggatgtttctgtgacacacaatcagcgcggaccgcagcgcggcccagccccgggcacccgcctcggacgctcgggcgccaggaggcttcgctggaggggctgggccaaggagattaagaagaaaacgactttctgcaggaggaagagcccgctgccgaatccctgggaaaaattcttttcccccagtgccagccggactgccctcgccttccgggtgtgccctgtcccagaagatggaatgggggtgtgggggtccggctctaggaacgggctttgggggcgtcaggtctttccaaggttgggacccaaggatcggggggcccagcagcccgcaccgatcgagccggactctcggctcttcactgctcctcctggcctgcctagttccccagggcccggcacctcctgctgcgagacccggctctcagccctgccttgcccctacctcagcgtctcttccacctgctggcctcccagtttcccctcctgccagtccttcgcctgtcccttgacgccctgcatcctcctccctgactcgcagccccatcggacgctctcccgggaccgccgcaggaccagtttccatagactgcggactggggtcttcctccagcagttacttgatgccccctcccccgacacagactctcaatctgccggtggtaagaaccggttctgagctggcgtctgagctgctgcggggtggaagtggggggctgcccactccactcctcccatcccctcccagcctcctcctccggcaggaactgaacagaaccacaaaaagtctacatttatttaatatgatggtctttgcaaaaaggaacaaaacaacacaaaagcccaccaggctgctgctttgtggaaagacggtgtgtgtcgtgtgaaggcgaaacccggtgtacataacccctccccctccgccccgccccgcccggccccgtagagtccctgtcgcccgccggccctgcctgtagatacgccccgctgtctgtgctgtgagagtcgccgctcgctgggggggaagggggggacacagctacacgcccattaaagcacagcacgtcctgggggaggggggcattttttatgttacaaaaaaaaattacgaaagaaaagaaatctctatgcaaaatgacgaacatggtcctgtggactcctctggcctgttttgttggctctttctctgtaattccgtgttttcgctttttcctccctgcccctctctccctctgcccctctctcctctccgcttctctccccctctgtctctgtctctctccgtctctgtcgctcttgtctgtctgtctctgctctttcctcggcctctctccccagacctggcccggccgccctgtctccgcaggctagatccgaggtggcagctccagcccccgggctcgccccctcgcgggcgtgccccgcgcgccccgggcggccgaaggccgggccgccccgtcccgccccgtagttgctctttcggtagtggcgatgcgccctgcatgtctcctcacccgtggatcgtgacgactcgaaataacagaaacaaagtcaataaagtgaaaataaataaaaatccttgaacaaatccgaaaaggcttggagtcctcgcccagatctctctcccctgcgagccctttttatttgagaaggaaaaagagaaaagagaatcgtttaagggaacccggcgcccagccaggctccagtggcccgaacggggcggcgagggcggcgagggcgccgaggtccggcccatcccagtcctgtggggctggccgggcagagaccccggacccaggcccaggcctaacctgctaaatgtccccggacggttctggtctcctcggccactttcagtgcgtcggttcgttttgattctttttcttttgtgcacataagaaataaataataataataaataaagaataaaattttgtatgtca

SEQ ID NO: 21425 - DNA, 677 bp, Homo sapiens
  source 1..677: mol_type = unassigned DNA
gcggccgcgctgctcccgctcctctgcctccccatggatatgcactgcaaagcagaccccttctccgcgatgcacccagggcacgggggtgtgaaccagctcgggggggtgtttgtgaacggccggcccctacccgacgtggtgaggcagcgcatcgtggagctggcccaccagggtgtgcggccctgtgacatctcccggcagctgcgggtcagccacggctgtgtcagcaaaatcctgggcaggtactacgagaccggcagcatcaagccgggtgtgatcggtggctccaagcccaaagtggcgacgcccaaagtggtggacaagattgctgaatacaaacgacagaacccgactatgttcgcctgggagattcgagaccggctcctggccgagggcatctgtgacaatgacacagtgcccagcgtctcttccatcaacagaatcatccggaccaaagttcagcagcctttccacccaacgccggatggggctgggacaggagtgaccgcccctggccacaccattgttcccagcacggcctcccctcctgtttccagcgcctccaatgacccagtgggatcctactccatcaatgggatcctggggattcctcgctccaatggtgagaagaggaaacgtgatgaagttgaggtatacactgatcctgcccacat

SEQ ID NO: 21426 - DNA, 4126 bp, Homo sapiens
  source 1..4126: mol_type = unassigned DNA
cgggggcctggcccgcgcgctcccctcccgcaggcgccacctcggacatccccgggattgctacttctctgccaacttcgccaactcgccagcacttggagaggcccggctcccctcccggcgccctctgaccgcccccgccccgcgcgctctccgaccaccgcctctcggatgaccaggttccaggggagctgagcgagtcgcctcccccgcccagcttcagccctggctgcagctgcagcgcgagccatgcgcccccagtgcaccccggcccggcccaccgccccggggccattctgctgaccgcccagccccgagccccgacagtggcaagttgcggctactgcagttgcaagctccggccaacccggaggagccccagcggggagcgcagtgctgcgccccccgcccccgcgcgccccgcagcagccgggcgttcactcatcctccctcccccaccgtccctcccttttctcctcaagtcctgaagttgagtttgagaggcgacacggcggcggcggccgcgctgctcccgctcctctgcctccccatggatatgcactgcaaagcagaccccttctccgcgatgcacccagggcacgggggtgtgaaccagctcgggggggtgtttgtgaacggccggcccctacccgacgtggtgaggcagcgcatcgtggagctggcccaccagggtgtgcggccctgtgacatctcccggcagctgcgggtcagccacggctgtgtcagcaaaatcctgggcaggtactacgagaccggcagcatcaagccgggtgtgatcggtggctccaagcccaaagtggcgacgcccaaagtggtggacaagattgctgaatacaaacgacagaacccgactatgttcgcctgggagattcgagaccggctcctggccgagggcatctgtgacaatgacacagtgcccagcgtctcttccatcaacagaatcatccggaccaaagttcagcagcctttccacccaacgccggatggggctgggacaggagtgaccgcccctggccacaccattgttcccagcacggcctcccctcctgtttccagcgcctccaatgacccagtgggatcctactccatcaatgggatcctggggattcctcgctccaatggtgagaagaggaaacgtgatgaagttgaggtatacactgatcctgcccacattagaggaggtggaggtttgcatctggtctggactttaagagatgtgtctgagggctcagtccccaatggagattcccagagtggtgtggacagtttgcggaagcacttgcgagctgacaccttcacccagcagcagctggaagctttggatcgggtctttgagcgtccttcctaccctgacgtcttccaggcatcagagcacatcaaatcagaacaggggaacgagtactccctcccagccctgacccctgggcttgatgaagtcaagtcgagtctatctgcatccaccaaccctgagctgggcagcaacgtgtcaggcacacagacatacccagttgtgactggtcgtgacatggcgagcaccactctgcctggttacccccctcacgtgccccccactggccagggaagctaccccacctccaccctggcaggaatggtgcctgggagcgagttctccggcaacccgtacagccacccccagtacacggcctacaacgaggcttggagattcagcaaccccgccttactaagttccccttattattatagtgccgccccccggggctccgcccctgccgctgctgccgctgcctatgaccgccactagttaccgcggggaccacatcaagcttcaggccgacagcttcggcctccacatcgtccccgtctgaccccaccccggagggagggaggaccgacgcgacgcgatgcctcccggccaccgccccagcctcaccccatcccacgacccccgcaacccttcacatcacccccctcgaaggtcggacaggacgggtggagccgtgggcgggaccctcaggcccgggcccgccgcccccagccccgcctgccgcccctccccgcctgcctggactgcgcggcgccgtgagggggattcggcccagctcgtcccggcctccaccaagccagccccgaagcccgccagccaccctgccggactcgggcgcgacctgctggcgcgcgccggatgtttctgtgacacacaatcagcgcggaccgcagcgcggcccagccccgggcacccgcctcggacgctcgggcgccaggaggcttcgctggaggggctgggccaaggagattaagaagaaaacgactttctgcaggaggaagagcccgctgccgaatccctgggaaaaattcttttcccccagtgccagccggactgccctcgccttccgggtgtgccctgtcccagaagatggaatgggggtgtgggggtccggctctaggaacgggctttgggggcgtcaggtctttccaaggttgggacccaaggatcggggggcccagcagcccgcaccgatcgagccggactctcggctcttcactgctcctcctggcctgcctagttccccagggcccggcacctcctgctgcgagacccggctctcagccctgccttgcccctacctcagcgtctcttccacctgctggcctcccagtttcccctcctgccagtccttcgcctgtcccttgacgccctgcatcctcctccctgactcgcagccccatcggacgctctcccgggaccgccgcaggaccagtttccatagactgcggactggggtcttcctccagcagttacttgatgccccctcccccgacacagactctcaatctgccggtggtaagaaccggttctgagctggcgtctgagctgctgcggggtggaagtggggggctgcccactccactcctcccatcccctcccagcctcctcctccggcaggaactgaacagaaccacaaaaagtctacatttatttaatatgatggtctttgcaaaaaggaacaaaacaacacaaaagcccaccaggctgctgctttgtggaaagacggtgtgtgtcgtgtgaaggcgaaacccggtgtacataacccctccccctccgccccgccccgcccggccccgtagagtccctgtcgcccgccggccctgcctgtagatacgccccgctgtctgtgctgtgagagtcgccgctcgctgggggggaagggggggacacagctacacgcccattaaagcacagcacgtcctgggggaggggggcattttttatgttacaaaaaaaaattacgaaagaaaagaaatctctatgcaaaatgacgaacatggtcctgtggactcctctggcctgttttgttggctctttctctgtaattccgtgttttcgctttttcctccctgcccctctctccctctgcccctctctcctctccgcttctctccccctctgtctctgtctctctccgtctctgtcgctcttgtctgtctgtctctgctctttcctcggcctctctccccagacctggcccggccgccctgtctccgcaggctagatccgaggtggcagctccagcccccgggctcgccccctcgcgggcgtgccccgcgcgccccgggcggccgaaggccgggccgccccgtcccgccccgtagttgctctttcggtagtggcgatgcgccctgcatgtctcctcacccgtggatcgtgacgactcgaaataacagaaacaaagtcaataaagtgaaaataaataaaaatccttgaacaaatccgaaaaggcttggagtcctcgcccagatctctctcccctgcgagccctttttatttgagaaggaaaaagagaaaagagaatcgtttaagggaacccggcgcccagccaggctccagtggcccgaacggggcggcgagggcggcgagggcgccgaggtccggcccatcccagtcctgtggggctggccgggcagagaccccggacccaggcccaggcctaacctgctaaatgtccccggacggttctggtctcctcggccactttcagtgcgtcggttcgttttgattctttttcttttgtgcacataagaaataaataataataataaataaagaataaaattttgtatgtca

SEQ ID NO: 21427 - DNA, 958 bp, Homo sapiens
  source 1..958: mol_type = unassigned DNA
caaacttttccgccctgggctcgggatcctggactccggggcctccccgtcctcccctttcccgggttccagctccggcctctggactaggaaccgacagcccccctccccgcgtccctccctctctctccagccgttttggggaggggctctccacgctccggatagttcccgagggtcatccgcgccgcactcgcctttccgtttcgccttcacctggatataatttccgagcgaagctgcccccaggatgaccacgctggccggcgctgtgcccaggatgatgcggccgggcccggggcagaactacccgcgtagcgggttcccgctggaagtgtccactcccctcggccagggccgcgtcaaccagctcggcggtgtttttatcaacggcaggccgctgcccaaccacatccgccacaagatcgtggagatggcccaccacggcatccggccctgcgtcatctcgcgccagctgcgcgtgtcccacggctgcgtctccaagatcctgtgcaggtaccaggagactggctccatacgtcctggtgccatcggcggcagcaagcccaagcaggtgacaacgcctgacgtggagaagaaaattgaggaatacaaaagagagaacccgggcatgttcagctgggaaatccgagacaaattactcaaggacgcggtctgtgatcgaaacaccgtgccgtcagtgagttccatcagccgcatcctgagaagtaaattcgggaaaggtgaagaggaggaggccgacttggagaggaaggaggcagaggaaagcgagaagaaggccaaacacagcatcgacggcatcctgagcgagcgaggaaaggccctggtctccggagtttcctcgcattaaaggagagagagagagagtactcttttgggcaacggccctccaaaattgcccccacattggctgccttataaatatgtctgtgtgttg

SEQ ID NO: 21428 - DNA, 1715 bp, Homo sapiens
  source 1..1715: mol_type = unassigned DNA
actcggtgtcaccacaggaggagactcaggcaggccgcgctccagcctcaccaggctccccggctcgccgtggctctctgagcccccttttcagggaccccagtcgctggaacatttgcccagactcgtaccaaacttttccgccctgggctcgggatcctggactccggggcctccccgtcctcccctttcccgggttccagctccggcctctggactaggaaccgacagcccccctccccgcgtccctccctctctctccagccgttttggggaggggctctccacgctccggatagttcccgagggtcatccgcgccgcactcgcctttccgtttcgccttcacctggatataatttccgagcgaagctgcccccaggatgaccacgctggccggcgctgtgcccaggatgatgcggccgggcccggggcagaactacccgcgtagcgggttcccgctggaagtgtccactcccctcggccagggccgcgtcaaccagctcggcggtgtttttatcaacggcaggccgctgcccaaccacatccgccacaagatcgtggagatggcccaccacggcatccggccctgcgtcatctcgcgccagctgcgcgtgtcccacggctgcgtctccaagatcctgtgcaggtaccaggagactggctccatacgtcctggtgccatcggcggcagcaagcccaagcaggtgacaacgcctgacgtggagaagaaaattgaggaatacaaaagagagaacccgggcatgttcagctgggaaatccgagacaaattactcaaggacgcggtctgtgatcgaaacaccgtgccgtcagtgagttccatcagccgcatcctgagaagtaaattcgggaaaggtgaagaggaggaggccgacttggagaggaaggaggcagaggaaagcgagaagaaggccaaacacagcatcgacggcatcctgagcgagcgagcctcagcaccccaatcagatgaaggctctgatattgactctgaaccagatttaccactaaagaggaaacagcgcagaagccgaaccaccttcacagcagaacagctggaggaactggagcgtgcttttgagagaactcattaccctgacatttatactagggaggaactggcccagagggcgaagctcaccgaggcccgagtacaggtctggtttagcaaccgccgtgcaagatggaggaagcaagctggggccaatcaactgatggctttcaaccatctcattcccggggggttccctcccactgccatgccgaccttgccaacgtaccagctgtcggagacctcttaccagcccacatctattccacaagctgtgtcagatcccagcagcaccgttcacagacctcaaccgcttcctccaagcactgtacaccaaagcacgattccttccaacccagacagcagctctgcctactgcctccccagcaccaggcatggattttccagctatacagacagctttgtgcctccgtcggggccctccaaccccatgaaccccaccattggcaatggcctctcacctcaggtgcctttcattatctcaagccagatatcgcttggtttcaaatccttttgaacacgttcgacaaaagcagtggagaagaggaagacctggagcaataaaagacaaatgcaacattttaaggcaatggtttcacatggttacatatcaaaacatcccaattc

SEQ ID NO: 21429 - DNA, 3109 bp, Homo sapiens
  source 1..3109: mol_type = unassigned DNA
actcggtgtcaccacaggaggagactcaggcaggccgcgctccagcctcaccaggctccccggctcgccgtggctctctgagcccccttttcagggaccccagtcgctggaacatttgcccagactcgtaccaaacttttccgccctgggctcgggatcctggactccggggcctccccgtcctcccctttcccgggttccagctccggcctctggactaggaaccgacagcccccctccccgcgtccctccctctctctccagccgttttggggaggggctctccacgctccggatagttcccgagggtcatccgcgccgcactcgcctttccgtttcgccttcacctggatataatttccgagcgaagctgcccccaggatgaccacgctggccggcgctgtgcccaggatgatgcggccgggcccggggcagaactacccgcgtagcgggttcccgctggaagtgtccactcccctcggccagggccgcgtcaaccagctcggcggtgtttttatcaacggcaggccgctgcccaaccacatccgccacaagatcgtggagatggcccaccacggcatccggccctgcgtcatctcgcgccagctgcgcgtgtcccacggctgcgtctccaagatcctgtgcaggtaccaggagactggctccatacgtcctggtgccatcggcggcagcaagcccaagcaggtgacaacgcctgacgtggagaagaaaattgaggaatacaaaagagagaacccgggcatgttcagctgggaaatccgagacaaattactcaaggacgcggtctgtgatcgaaacaccgtgccgtcagtgagttccatcagccgcatcctgagaagtaaattcgggaaaggtgaagaggaggaggccgacttggagaggaaggaggcagaggaaagcgagaagaaggccaaacacagcatcgacggcatcctgagcgagcgagcctcagcaccccaatcagatgaaggctctgatattgactctgaaccagatttaccactaaagaggaaacagcgcagaagccgaaccaccttcacagcagaacagctggaggaactggagcgtgcttttgagagaactcattaccctgacatttatactagggaggaactggcccagagggcgaagctcaccgaggcccgagtacaggtctggtttagcaaccgccgtgcaagatggaggaagcaagctggggccaatcaactgatggctttcaaccatctcattcccggggggttccctcccactgccatgccgaccttgccaacgtaccagctgtcggagacctcttaccagcccacatctattccacaagctgtgtcagatcccagcagcaccgttcacagacctcaaccgcttcctccaagcactgtacaccaaagcacgattccttccaacccagacagcagctctgcctactgcctccccagcaccaggcatggattttccagctatacagacagctttgtgcctccgtcggggccctccaaccccatgaaccccaccattggcaatggcctctcacctcaggtgcctttcattatctcaagccagatatcgcgtaagtgaactgtccacttggagctaaaactggccctgtttctggtcttcgcagcctagatatgaagaatctgctctgaaaacaaaaaaaaattacccttttgttggggggggtggggcagtggtcccaataggagacaaaggagagtgattgattttcttcctccaatagttggtttcaaatccttttgaacacgttcgacaaaagcagtggagaagaggaagacctggagcaataaaagacaaatgcaacattttaaggcaatggtttcacatggttacatatcaaaacatcccaattctttagtgctgatcatcgaggagctagaacattccatttgcttgtgtgcgtgcgtgcgtgtgtgtgtgtgtgtgtgtattgagatttacccagactggtttgggcaagcagactgttctaaaatataatagaataccctaaagtataacatgtcgatgttcgatgctgatacttctacaactttaaaactgctcatttcatgaagcaagaatggaggaatccttgactcttacacactggaaattgaaataaagataaatgcaaccatttttaggaagctagactagctgtaaaggacctcctaaataaattatttgttactgtatcctcatttgtaatctagttgtcaataaatggcccggacatgtcttgctaacaggatatgggctaccaggaagaaggacttgtttccctttcctgtgtggggagaggtgtgtgacgtttttccagttcacatttatttggtagcccacctgggttggaggaagggcacggtggagagaaagtgacatgcattcacatatctgcttatcagtgtgcaatactgtgtacctcatggatgctttggcaatgcccaaggcgatataagcaaaatcagaagtatatttttgcaggtgcttttattttcacagcccataattcatagtgatagagtgcagtgatgtttgccatttgctggacaaccaacacccgggttgctcctttgattagagaccagatcagataattatgcttttaaactgattacgtttacattcttctcttttctatgaaaggcagggcaagaacagaagtgttcacatggctctcatgtacttttaaattatacaatgatatccaatattaaaagattataggaactgaggtttacatacgtttgtgtggtgacattttagaatgtcaataaatttgctttttgagatgttgagaggaacaagaaggtggaaggcagtgttatttatttctttctattcttggaaccacgaatgaggtaggcacaaatacattccttttagagttaagaactatgacgtagcgagttagtgagactagacatagtaccgaatttagttcatgcattggtcttagagggtgatggaacaagagaagtactatctttgtgttgcagcctcaaccaacaacaatgtgttgtaaaaatgtctttcatgtaaaaagtgcagtaaatatttactatttataatgaataaacagttatgaaaactt

SEQ ID NO: 21430 - DNA, 3610 bp, Homo sapiens
  source 1..3610: mol_type = unassigned DNA
gtccctccctctctctccagccgttttggggaggggctctccacgctccggatagttcccgagggtcatccgcgccgcactcgcctttccgtttcgccttcacctggatataatttccgagcgaagctgcccccaggatgaccacgctggccggcgctgtgcccaggatgatgcggccgggcccggggcagaactacccgcgtagcgggttcccgctggaagtgtccactcccctcggccagggccgcgtcaaccagctcggcggtgtttttatcaacggcaggccgctgcccaaccacatccgccacaagatcgtggagatggcccaccacggcatccggccctgcgtcatctcgcgccagctgcgcgtgtcccacggctgcgtctccaagatcctgtgcaggtaccaggagactggctccatacgtcctggtgccatcggcggcagcaagcccaagcaggtgacaacgcctgacgtggagaagaaaattgaggaatacaaaagagagaacccgggcatgttcagctgggaaatccgagacaaattactcaaggacgcggtctgtgatcgaaacaccgtgccgtcagtgagttccatcagccgcatcctgagaagtaaattcgggaaaggtgaagaggaggaggccgacttggagaggaaggaggcagaggaaagcgagaagaaggccaaacacagcatcgacggcatcctgagcgagcgagcctcagcaccccaatcagatgaaggctctgatattgactctgaaccagatttaccactaaagaggaaacagcgcagaagccgaaccaccttcacagcagaacagctggaggaactggagcgtgcttttgagagaactcattaccctgacatttatactagggaggaactggcccagagggcgaagctcaccgaggcccgagtacaggtctggtttagcaaccgccgtgcaagatggaggaagcaagctggggccaatcaactgatggctttcaaccatctcattcccggggggttccctcccactgccatgccgaccttgccaacgtaccagctgtcggagacctcttaccagcccacatctattccacaagctgtgtcagatcccagcagcaccgttcacagacctcaaccgcttcctccaagcactgtacaccaaagcacgattccttccaacccagacagcagctctgcctactgcctccccagcaccaggcatggattttccagctatacagacagctttgtgcctccgtcggggccctccaaccccatgaaccccaccattggcaatggcctctcacctcaggtaatgggactcctgaccaaccacggtggggtacctcatcagccccagactgattacgcgctctcccctctcaccgggggtctggaacctaccaccacggtgtcggccagctgcagtcagagactagaccatatgaagagcttggacagtctgccaacatctcagtcctactgtccacccacctatagcaccacaggctacagtatggaccctgtcacaggctaccaatatgggcagtatggacaaagtaagccttggactttttagggggcaatttctcctggaagggagataaactcaactcttccttaagaaaggtgaattagaggcaagattaagccacacatgccggtatcaatttttttttttttttgcaaagccagctgactgttccagcaggggcttccttgtgtaattattttcttaactgatgtcaacaacatcttgcggttattaattgttgagacgtgaaacctgattgccactaggtaaaacacaagggttggccaaaatgaaataatccctgacattagaaacacatgttcttaatgaggtcagctccaggatcatatgggggataatcccagggacacaaagttgtgtcaaacttgtctcaggaataaaaatattagtctcaagcctttgatagcacggtattaaatatgacattgtcagcctgtagctgatcttgcccctgactgtgaattgtcccagcatgacctaaaaagctgcgtgtgtttccttacaggtgcctttcattatctcaagccagatatcgcgtaagtgaactgtccacttggagctaaaactggccctgtttctggtcttcgcagcctagatatgaagaatctgctctgaaaacaaaaaaaaattacccttttgttggggggggtggggcagtggtcccaataggagacaaaggagagtgattgattttcttcctccaatagttggtttcaaatccttttgaacacgttcgacaaaagcagtggagaagaggaagacctggagcaataaaagacaaatgcaacattttaaggcaatggtttcacatggttacatatcaaaacatcccaattctttagtgctgatcatcgaggagctagaacattccatttgcttgtgtgcgtgcgtgcgtgtgtgtgtgtgtgtgtgtattgagatttacccagactggtttgggcaagcagactgttctaaaatataatagaataccctaaagtataacatgtcgatgttcgatgctgatacttctacaactttaaaactgctcatttcatgaagcaagaatggaggaatccttgactcttacacactggaaattgaaataaagataaatgcaaccatttttaggaagctagactagctgtaaaggacctcctaaataaattatttgttactgtatcctcatttgtaatctagttgtcaataaatggcccggacatgtcttgctaacaggatatgggctaccaggaagaaggacttgtttccctttcctgtgtggggagaggtgtgtgacgtttttccagttcacatttatttggtagcccacctgggttggaggaagggcacggtggagagaaagtgacatgcattcacatatctgcttatcagtgtgcaatactgtgtacctcatggatgctttggcaatgcccaaggcgatataagcaaaatcagaagtatatttttgcaggtgcttttattttcacagcccataattcatagtgatagagtgcagtgatgtttgccatttgctggacaaccaacacccgggttgctcctttgattagagaccagatcagataattatgcttttaaactgattacgtttacattcttctcttttctatgaaaggcagggcaagaacagaagtgttcacatggctctcatgtacttttaaattatacaatgatatccaatattaaaagattataggaactgaggtttacatacgtttgtgtggtgacattttagaatgtcaataaatttgctttttgagatgttgagaggaacaagaaggtggaaggcagtgttatttatttctttctattcttggaaccacgaatgaggtaggcacaaatacattccttttagagttaagaactatgacgtagcgagttagtgagactagacatagtaccgaatttagttcatgcattggtcttagagggtgatggaacaagagaagtactatctttgtgttgcagcctcaaccaacaacaatgtgttgtaaaaatgtctttcatgtaaaaagtgcagtaaatatttactatttataatgaataaacagttatgaaaa

SEQ ID NO: 21431 - DNA, 3170 bp, Homo sapiens
  source 1..3170: mol_type = unassigned DNA
aggaggagactcaggcaggccgcgctccagcctcaccaggctccccggctcgccgtggctctctgagcccccttttcagggaccccagtcgctggaacatttgcccagactcgtaccaaacttttccgccctgggctcgggatcctggactccggggcctccccgtcctcccctttcccgggttccagctccggcctctggactaggaaccgacagcccccctccccgcgtccctccctctctctccagccgttttggggaggggctctccacgctccggatagttcccgagggtcatccgcgccgcactcgcctttccgtttcgccttcacctggatataatttccgagcgaagctgcccccaggatgaccacgctggccggcgctgtgcccaggatgatgcggccgggcccggggcagaactacccgcgtagcgggttcccgctggaagtgtccactcccctcggccagggccgcgtcaaccagctcggcggtgtttttatcaacggcaggccgctgcccaaccacatccgccacaagatcgtggagatggcccaccacggcatccggccctgcgtcatctcgcgccagctgcgcgtgtcccacggctgcgtctccaagatcctgtgcaggtaccaggagactggctccatacgtcctggtgccatcggcggcagcaagcccaagcaggtgacaacgcctgacgtggagaagaaaattgaggaatacaaaagagagaacccgggcatgttcagctgggaaatccgagacaaattactcaaggacgcggtctgtgatcgaaacaccgtgccgtcagtgagttccatcagccgcatcctgagaagtaaattcgggaaaggtgaagaggaggaggccgacttggagaggaaggaggcagaggaaagcgagaagaaggccaaacacagcatcgacggcatcctgagcgagcgagcctcagcaccccaatcagatgaaggctctgatattgactctgaaccagatttaccactaaagaggaaacagcgcagaagccgaaccaccttcacagcagaacagctggaggaactggagcgtgcttttgagagaactcattaccctgacatttatactagggaggaactggcccagagggcgaagctcaccgaggcccgagtacaggtctggtttagcaaccgccgtgcaagatggaggaagcaagctggggccaatcaactgatggctttcaaccatctcattcccggggggttccctcccactgccatgccgaccttgccaacgtaccagctgtcggagacctcttaccagcccacatctattccacaagctgtgtcagatcccagcagcaccgttcacagacctcaaccgcttcctccaagcactgtacaccaaagcacgattccttccaacccagacagcagctctgcctactgcctccccagcaccaggcatggattttccagctatacagacagctttgtgcctccgtcggggccctccaaccccatgaaccccaccattggcaatggcctctcacctcaggtaatgggactcctgaccaaccacggtggggtacctcatcagccccagactgattacgcgctctcccctctcaccgggggtctggaacctaccaccacggtgtcggccagctgcagtcagagactagaccatatgaagagcttggacagtctgccaacatctcagtcctactgtccacccacctatagcaccacaggctacagtatggaccctgtcacaggctaccaatatgggcagtatggacaaagtgcctttcattatctcaagccagatatcgcttggtttcaaatccttttgaacacgttcgacaaaagcagtggagaagaggaagacctggagcaataaaagacaaatgcaacattttaaggcaatggtttcacatggttacatatcaaaacatcccaattctttagtgctgatcatcgaggagctagaacattccatttgcttgtgtgcgtgcgtgcgtgtgtgtgtgtgtgtgtgtattgagatttacccagactggtttgggcaagcagactgttctaaaatataatagaataccctaaagtataacatgtcgatgttcgatgctgatacttctacaactttaaaactgctcatttcatgaagcaagaatggaggaatccttgactcttacacactggaaattgaaataaagataaatgcaaccatttttaggaagctagactagctgtaaaggacctcctaaataaattatttgttactgtatcctcatttgtaatctagttgtcaataaatggcccggacatgtcttgctaacaggatatgggctaccaggaagaaggacttgtttccctttcctgtgtggggagaggtgtgtgacgtttttccagttcacatttatttggtagcccacctgggttggaggaagggcacggtggagagaaagtgacatgcattcacatatctgcttatcagtgtgcaatactgtgtacctcatggatgctttggcaatgcccaaggcgatataagcaaaatcagaagtatatttttgcaggtgcttttattttcacagcccataattcatagtgatagagtgcagtgatgtttgccatttgctggacaaccaacacccgggttgctcctttgattagagaccagatcagataattatgcttttaaactgattacgtttacattcttctcttttctatgaaaggcagggcaagaacagaagtgttcacatggctctcatgtacttttaaattatacaatgatatccaatattaaaagattataggaactgaggtttacatacgtttgtgtggtgacattttagaatgtcaataaatttgctttttgagatgttgagaggaacaagaaggtggaaggcagtgttatttatttctttctattcttggaaccacgaatgaggtaggcacaaatacattccttttagagttaagaactatgacgtagcgagttagtgagactagacatagtaccgaatttagttcatgcattggtcttagagggtgatggaacaagagaagtactatctttgtgttgcagcctcaaccaacaacaatgtgttgtaaaaatgtctttcatgtaaaaagtgcagtaaatatttactatttataatgaataaacagttatgaaaactt

SEQ ID NO: 21432 - DNA, 2258 bp, Homo sapiens
  source 1..2258: mol_type = unassigned DNA
actcggtgtcaccacaggaggagactcaggcaggccgcgctccagcctcaccaggctccccggctcgccgtggctctctgagcccccttttcagggaccccagtcgctggaacatttgcccagactcgtaccaaacttttccgccctgggctcgggatcctggactccggggcctccccgtcctcccctttcccgggttccagctccggcctctggactaggaaccgacagcccccctccccgcgtccctccctctctctccagccgttttggggaggggctctccacgctccggatagttcccgagggtcatccgcgccgcactcgcctttccgtttcgccttcacctggatataatttccgagcgaagctgcccccaggatgaccacgctggccggcgctgtgcccaggatgatgcggccgggcccggggcagaactacccgcgtagcgggttcccgctggaagtgtccactcccctcggccagggccgcgtcaaccagctcggcggtgtttttatcaacggcaggccgctgcccaaccacatccgccacaagatcgtggagatggcccaccacggcatccggccctgcgtcatctcgcgccagctgcgcgtgtcccacggctgcgtctccaagatcctgtgcaggtaccaggagactggctccatacgtcctggtgccatcggcggcagcaagcccaagcaggtgacaacgcctgacgtggagaagaaaattgaggaatacaaaagagagaacccgggcatgttcagctgggaaatccgagacaaattactcaaggacgcggtctgtgatcgaaacaccgtgccgtcagtgagttccatcagccgcatcctgagaagtaaattcgggaaaggtgaagaggaggaggccgacttggagaggaaggaggcagaggaaagcgagaagaaggccaaacacagcatcgacggcatcctgagcgagcgagcctcagcaccccaatcagatgaaggctctgatattgactctgaaccagatttaccactaaagaggaaacagcgcagaagccgaaccaccttcacagcagaacagctggaggaactggagcgtgcttttgagagaactcattaccctgacatttatactagggaggaactggcccagagggcgaagctcaccgaggcccgagtacaggtctggtttagcaaccgccgtgcaagatggaggaagcaagctggggccaatcaactgatggctttcaaccatctcattcccggggggttccctcccactgccatgccgaccttgccaacgtaccagctgtcggagacctcttaccagcccacatctattccacaagctgtgtcagatcccagcagcaccgttcacagacctcaaccgcttcctccaagcactgtacaccaaagcacgattccttccaacccagacagcagctctgcctactgcctccccagcaccaggcatggattttccagctatacagacagctttgtgcctccgtcggggccctccaaccccatgaaccccaccattggcaatggcctctcacctcaggtaatgggactcctgaccaaccacggtggggtacctcatcagccccagactgattacgcgctctcccctctcaccgggggtctggaacctaccaccacggtgtcggccagctgcagtcagagactagaccatatgaagagcttggacagtctgccaacatctcagtcctactgtccacccacctatagcaccacaggctacagtatggaccctgtcacaggctaccaatatgggcagtatggacaaagtgcctttcattatctcaagccagatatcgcgtaagtgaactgtccacttggagctaaaactggccctgtttctggtcttcgcagcctagatatgaagaatctgctctgaaaacaaaaaaaaattacccttttgttggggggggtggggcagtggtcccaataggagacaaaggagagtgattgattttcttcctccaatagttggtttcaaatccttttgaacacgttcgacaaaagcagtggagaagaggaagacctggagcaataaaagacaaatgcaacattttaaggcaatggtttcacatggttacatatcaaaacatcccaattctttagtgctgatcatcgaggagctagaacattccatttgcttgtgtgcgtgcgtgcgtgtgtgtgtgtgtgtgtgtattgagatttacccagactggtttgggcaagcagactgttctaaaatat

SEQ ID NO: 21433 - DNA, 1782 bp, Homo sapiens
  source 1..1782: mol_type = unassigned DNA
agtcgctggaacatttgcccagactcgtaccaaacttttccgccctgggctcgggatcctggactccggggcctccccgtcctcccctttcccgggttccagctccggcctctggactaggaaccgacagcccccctccccgcgtccctccctctctctccagccgttttggggaggggctctccacgctccggatagttcccgagggtcatccgcgccgcactcgcctttccgtttcgccttcacctggatataatttccgagcgaagctgcccccaggatgaccacgctggccggcgctgtgcccaggatgatgcggccgggcccggggcagaactacccgcgtagcgggttcccgctggaagtgtccactcccctcggccagggccgcgtcaaccagctcggcggtgtttttatcaacggcaggccgctgcccaaccacatccgccacaagatcgtggagatggcccaccacggcatccggccctgcgtcatctcgcgccagctgcgcgtgtcccacggctgcgtctccaagatcctgtgcaggtaccaggagactggctccatacgtcctggtgccatcggcggcagcaagcccaaggtgacaacgcctgacgtggagaagaaaattgaggaatacaaaagagagaacccgggcatgttcagctgggaaatccgagacaaattactcaaggacgcggtctgtgatcgaaacaccgtgccgtcagtgagttccatcagccgcatcctgagaagtaaattcgggaaaggtgaagaggaggaggccgacttggagaggaaggaggcagaggaaagcgagaagaaggccaaacacagcatcgacggcatcctgagcgagcgagcctcagcaccccaatcagatgaaggctctgatattgactctgaaccagatttaccactaaagaggaaacagcgcagaagccgaaccaccttcacagcagaacagctggaggaactggagcgtgcttttgagagaactcattaccctgacatttatactagggaggaactggcccagagggcgaagctcaccgaggcccgagtacaggtctggtttagcaaccgccgtgcaagatggaggaagcaagctggggccaatcaactgatggctttcaaccatctcattcccggggggttccctcccactgccatgccgaccttgccaacgtaccagctgtcggagacctcttaccagcccacatctattccacaagctgtgtcagatcccagcagcaccgttcacagacctcaaccgcttcctccaagcactgtacaccaaagcacgattccttccaacccagacagcagctctgcctactgcctccccagcaccaggcatggattttccagctatacagacagctttgtgcctccgtcggggccctccaaccccatgaaccccaccattggcaatggcctctcacctcaggtaatgggactcctgaccaaccacggtggggtacctcatcagccccagactgattacgcgctctcccctctcaccgggggtctggaacctaccaccacggtgtcggccagctgcagtcagagactagaccatatgaagagcttggacagtctgccaacatctcagtcctactgtccacccacctatagcaccacaggctacagtatggaccctgtcacaggctaccaatatgggcagtatggacaaagtgcctttcattatctcaagccagatatcgcgtaagtgaactgtccacttggagctaaaactggccctgtttctggtcttcgcag

SEQ ID NO: 21434 - DNA, 1254 bp, Homo sapiens
  source 1..1254: mol_type = unassigned DNA
ccctctctctccagccgttttggggaggggctctccacgctccggatagttcccgagggtcatccgcgccgcactcgcctttccgtttcgccttcacctggatataatttccgagcgaagctgcccccaggatgaccacgctggccggcgctgtgcccaggatgatgcggccgggcccggggcagaactacccgcgtagcgggttcccgctggaagtgtccactcccctcggccagggccgcgtcaaccagctcggcggtgtttttatcaacggcaggccgctgcccaaccacatccgccacaagatcgtggagatggcccaccacggcatccggccctgcgtcatctcgcgccagctgcgcgtgtcccacggctgcgtctccaagatcctgtgcaggtaccaggagactggctccatacgtcctggtgccatcggcggcagcaagcccaagcaggtgacaacgcctgacgtggagaagaaaattgaggaatacaaaagagagaacccgggcatgttcagctgggaaatccgagacaaattactcaaggacgcggtctgtgatcgaaacaccgtgccgtcagtgagttccatcagccgcatcctgagaagtaaattcgggaaaggtgaagaggaggaggccgacttggagaggaaggaggcagaggaaagcgagaagaaggccaaacacagcatcgacggcatcctgagcgagcgaggtaagcggtggcgccttgggcggcgcacttgctgggtgacttggagggcatcggctagctgacattggtgatctgacggcagccaagcccagctcggatcaaggtcccttcatgcgcggtgtctctgcgcctgagtaacgacatggaactgaaagaccagagggacactaggaatcaaaacaaacatttctattctgcttagtttttctgttttgtaaatctttctttcttaaccactttcagcccctgggattctagaactgtgaattgtgctctgttgtagggggcaggggaagctctcactctgttgccattaaatgtatgagactgggcatctctgagcaattgtagggccggggatagagggtacttgaatcttcagaagttgaagtagcttttatgccctcaggaaaggccctggtctccggagtttcctcgcattaaaggagagagagagagagtactcttttgggcaacggccctccaaaattgcccccacattggctgccttataaatatgtctgtgtgttgactggt

SEQ ID NO: 21435 - DNA, 1772 bp, Homo sapiens
  source 1..1772: mol_type = unassigned DNA
atgcatcaggacgggatcagcagcatgaaccagcttggggggctctttgtgaatggccggcccctgcctctggatacccggcagcagattgtgcggctagcagtcagtggaatgcggccctgtgacatctcacggatccttaaggtatctaatggctgtgtgagcaagatcctagggcgttactaccgcacaggtgtcttggagccaaagggcattgggggaagcaagccacggctggctacaccccctgtggtggctcgaattgcccagctgaagggtgagtgtccagccctctttgcctgggaaatccaacgccagctttgtgctgaagggctttgcacccaggacaagactcccagtgtctcctccatcaaccgagtcctgcgggcattacaggaggaccagggactaccgtgcacacggctcaggtcaccagctgttttggctccagctgtcctcactccccatagtggctctgagactccccggggtacccacccagggaccggccaccggaatcggactatcttctccccaagccaagcagaggcactggagaaagagttccagcgtgggcagtatcctgattcagtggcccgtggaaagctggctactgccacctctctgcctgaggacacggtgagggtctggttttccaacagaagagccaaatggcgtcggcaagagaagctcaagtgggaaatgcagctgccagcagtcccctggcagtgtgcccacagcagccctgcctgccctggaaccactgggtccctcctgctatcagctgtgctgggcaacagcaccagaaaggtgtctgagtgacaccccacctaaagcctgtctcaagccctgctggggccacttgcccccacagccgaattccctggactcaggactgctttgccttccttgcccttcctcccactgtcacctggccagtcttagtggctctcaggccctgctctggcctggctgcccactactgtatggcttggaatgaggcaggagtgggaaggagatggcatagagaagatctaataccatcctgcccattgtccttaccgtcctgcccatacagactgtggctccttcctccttcctgtgattgctccctcctgtgtggacgttgcctggccctgcctcgatgcctctctggcgcatcacctgattggaggggctggtaaagcaacacccacccacttctcacactagccttaagaggcctccactcagcagtaataaaagctgtttttattagcagtagttctgttgtccatcatgttttccctatgagcacccctatgcccactctaatattcaacaattatagacaatttgccctatcatttatttacatctatgtatctaccatctaatctatgcatgtatgtaggcaatacatgtatctaaacaatgtatttgtcaatgcatcaatttacctactctatgtatgcatctatatgtgtattatgtatgcgtgcatgcgtgcgcgcacacacacacacacacacacacactgacattatatcatggcattttattcctaaatcttccagcatgcatccccaaaaaacaagaaacttgtcttacataatcacaataatatatccacatctaagaaaatttactgtaacttcttaatctaagaaaattatgtatttttgtcatatgtattttgtcatatgtattttgtatttgcatatgtattttgtatttgcatatgtatttttgtcatagcagcaaacagagtgaaatgccatttttcatattct

SEQ ID NO: 21436 - DNA, 2010 bp, Homo sapiens
  source 1..2010: mol_type = unassigned DNA
caaagactcacccgtgagccagctctcaaagaaagcagcttgcgttgacagcctgggggcagcaaggatgcagtctcccaggagaggatgcactcggtggtgggaagccaggctggaggggcctgagtgaccctctccacaggcgggcagggcagtgggagaggtggtgtgtggatacctctgtctcacgcccagggatcagcagcatgaaccagcttggggggctctttgtgaatggccggcccctgcctctggatacccggcagcagattgtgcggctagcagtcagtggaatgcggccctgtgacatctcacggatccttaaggtatctaatggctgtgtgagcaagatcctagggcgttactaccgcacaggtgtcttggagccaaagggcattgggggaagcaagccacggctggctacaccccctgtggtggctcgaattgcccagctgaagggtgagtgtccagccctctttgcctgggaaatccaacgccagctttgtgctgaagggctttgcacccaggacaagactcccagtgtctcctccatcaaccgagtcctgcgggcattacaggaggaccagggactaccgtgcacacggctcaggtcaccagctgttttggctccagctgtcctcactccccatagtggctctgagactccccggggtacccacccagggaccggccaccggaatcggactatcttctccccaagccaagcagaggcactggagaaagagttccagcgtgggcagtatcctgattcagtggcccgtggaaagctggctactgccacctctctgcctgaggacacggtgagggtctggttttccaacagaagagccaaatggcgtcggcaagagaagctcaagtgggaaatgcagctgccaggtgcttcccaggggctgactgtaccaagggttgccccaggaatcatctctgcacagcagtcccctggcagtgtgcccacagcagccctgcctgccctggaaccactgggtccctcctgctatcagctgtgctgggcaacagcaccagaaaggtgtctgagtgacaccccacctaaagcctgtctcaagccctgctggggccacttgcccccacagccgaattccctggactcaggactgctttgccttccttgcccttcctcccactgtcacctggccagtcttagtggctctcaggccctgctctggcctggctgcccactactgtatggcttggaatgaggcaggagtgggaaggagatggcatagagaagatctaataccatcctgcccattgtccttaccgtcctgcccatacagactgtggctccttcctccttcctgtgattgctccctcctgtgtggacgttgcctggccctgcctcgatgcctctctggcgcatcacctgattggaggggctggtaaagcaacacccacccacttctcacactagccttaagaggcctccactcagcagtaataaaagctgtttttattagcagtagttctgttgtccatcatgttttccctatgagcacccctatgcccactctaatattcaacaattatagacaatttgccctatcatttatttacatctatgtatctaccatctaatctatgcatgtatgtaggcaatacatgtatctaaacaatgtatttgtcaatgcatcaatttacctactctatgtatgcatctatatgtgtattatgtatgcgtgcatgcgtgcgcgcacacacacacacacacacacacactgacattatatcatggcattttattcctaaatcttccagcatgcatccccaaaaaacaagaaacttgtcttacataatcacaataatatatccacatctaagaaaatttactgtaacttcttaatctaagaaaattatgtatttttgtcatatgtattttgtcatatgtattttgtatttgcatatgtattttgtatttgcatatgtatttttgtcatagcagcaaacagagtgaaatgccatttttcatattct

SEQ ID NO: 21437 - DNA, 1088 bp, Homo sapiens
  source 1..1088: mol_type = unassigned DNA
atgcatcaggacgggatcagcagcatgaaccagcttggggggctctttgtgaatggccggcccctgcctctggatacccggcagcagattgtgcggctagcagtcagtggaatgcggccctgtgacatctcacggatccttaaggtatctaatggctgtgtgagcaagatcctagggcgttactaccgcacaggtgtcttggagccaaagggcattgggggaagcaagccacggctggctacaccccctgtggtggctcgaattgcccagctgaagggtgagtgtccagccctctttgcctgggaaatccaacgccagctttgtgctgaagggctttgcacccaggacaagactcccagtgtctcctccatcaaccgagtcctgcgggcattacaggaggaccagggactaccgtgcacacggctcaggtcaccagctgttttggctccagctgtcctcactccccatagtggctctgagactccccggggtacccacccagggaccggccaccggaatcggactatcttctccccaagccaagcagaggcactggagaaagagttccagcgtgggcagtatcctgattcagtggcccgtggaaagctggctactgccacctctctgcctgaggacacggtgagggtctggttttccaacagaagagccaaatggcgtcggcaagagaagctcaagtgggaaatgcagctgccaggtgcttcccaggggctgactgtaccaagggttgccccaggaatcatctctgcacagcagtcccctggcagtgtgcccacagcagccctgcctgccctggaaccactgggtccctcctgctatcagctgtgctgggcaacagcaccagaaaggtgtctgagtgacaccccacctaaagcctgtctcaagccctgctgggactgtggctccttcctccttcctgtgattgctccctcctgtgtggacgttgcctggccctgcctcgatgcctctctggcgcatcacctgattggaggggctggtaaagcaacacccacccacttctcacactagccttaagaggcctccactcagcagtaataaaagctgttttt

SEQ ID NO: 21438 - DNA, 2260 bp, Homo sapiens
  source 1..2260: mol_type = unassigned DNA
gaaagctggtgtggagggagaagcgagtgtggtccggagaaagaaggcgtggagaagagggagggagcgagagcgagagaataaatatataaataaatacgagaacgaaatccactccgcagtctccgggctcggaaactttggccccgagcgccagagcgccagagcgcgagagcgcggcgctcgccactctgaggctggcggcctcgattccggccgcgttcccccggcccccctccgccgcggggcctggtctccgggttctgccaggcgcatcagcccgcacaacttctggccgaggccagccggcagaggcggacttggggttggagtgtttgtttgtttgaacttcctcgtcgtcgccaccttccctccccccaacctccaccccacctcacccccctccccagcttctggacgcgtttgactgcagccaggggtggggggtgggggtagggagtgtgtgtggaggggagggagaagaggttaaaaaaaagaagacgaagaagacggaaagaaagagatcgcagcaggggtgaagggagcggacgggaagcgatttttgccgactttggattcgtccccggcgtgcgcaagaatggcggcccttcccggcacggtaccgagaatgatgcggccggctccggggcagaactacccccgcacgggattccctttggaagtgtccaccccgcttggccaaggccgggtcaatcagctgggaggggtcttcatcaatgggcgacccctgcctaaccacatccgccacaagatagtggagatggcccaccatggcatccggccctgtgtcatctcccgacagctgcgtgtctcccacggctgcgtctccaagattctttgccgctaccaggagaccgggtccatccggcctggggccatcggcggcagcaagcccagacaggtggcgactccggatgtagagaaaaagattgaggagtacaagagggaaaacccaggcatgttcagctgggagatccgggacaggctgctgaaggatgggcactgtgaccgaagcactgtgccctcaggtttagtgagttcgattagccgcgtgctcagaatcaagttcgggaagaaagaggaggaggatgaagcggacaagaaggaggacgacggcgaaaagaaggccaaacacagcatcgacggcatcctgggcgacaaagggaaccggctggacgagggctcggatgtggagtcggaacctgacctcccactgaagcgcaagcagcgacgcagtcggaccacattcacggccgagcagctggaggagctggagaaggcctttgagaggacccactacccagacatatacacccgcgaggagctggcgcagaggaccaagctgacagaggcgcgtgtgcaggtctggttcagtaaccgccgcgcccgttggcgtaagcaggcaggagccaaccagctggcggcgttcaaccaccttctgccaggaggcttcccacccaccggcatgcccacgctgcccccctaccagctgccggactccacctaccccaccaccaccatctcccaagatgggggcagcactgtgcaccggcctcagcccctgccaccgtccaccatgcaccagggcgggctggctgcagcggctgcagccgccgacaccagctctgcctacggagcccgccacagcttctccagctactctgacagcttcatgaatccggcggcgccctccaaccacatgaacccggtcagcaacggcctgtctcctcaggtgatgagcatcttgggcaaccccagtgcggtgcccccgcagccacaggctgacttctccatctccccgctgcatggcggcctggactcggccacctccatctcagccagctgcagccagcgggccgactccatcaagccaggagacagcctgcccacctcccaggcctactgcccacccacctacagcaccaccggctacagcgtggaccccgtggccggctatcagtacggccagtacggccagagtgagtgcctggtgccctgggcgtcccccgtccccattccttctcccacccccagggcctcctgcttgtttatggagagctacaaggtggtgtcagggtggggaatgtccatttcacagatggaaaaattgaagtccagccagatggaacagttcacctaaaatgacactgagttgggcaaaacccaggacatctcctggctaagcctctgcttccgtactatggctccaacagaaataaaatacacaacacaaatatca

SEQ ID NO: 21439 - DNA, 1700 bp, Homo sapiens
  source 1..1700: mol_type = unassigned DNA
aagagatcgcagcaggggtgaagggagcggacgggaagcgatttttgccgactttggattcgtccccggcgtgcgcaagaatggcggcccttcccggcacggtaccgagaatgatgcggccggctccggggcagaactacccccgcacgggattccctttggaagtgtccaccccgcttggccaaggccgggtcaatcagctgggaggggtcttcatcaatgggcgacccctgcctaaccacatccgccacaagatagtggagatggcccaccatggcatccggccctgtgtcatctcccgacagctgcgtgtctcccacggctgcgtctccaagattctttgccgctaccaggagaccgggtccatccggcctggggccatcggcggcagcaagcccagacaggtggcgactccggatgtagagaaaaagattgaggagtacaagagggaaaacccaggcatgttcagctgggagatccgggacaggctgctgaaggatgggcactgtgaccgaagcactgtgccctcagtgagttcgattagccgcgtgctcagaatcaagttcgggaagaaagaggaggaggatgaagcggacaagaaggaggacgacggcgaaaagaaggccaaacacagcatcgacggcatcctgggcgacaaagggaaccggctggacgagggctcggatgtggagtcggaacctgacctcccactgaagcgcaagcagcgacgcagtcggaccacattcacggccgagcagctggaggagctggagaaggcctttgagaggacccactacccagacatatacacccgcgaggagctggcgcagaggaccaagctgacagaggcgcgtgtgcaggtctggttcagtaaccgccgcgcccgttggcgtaagcaggcaggagccaaccagctggcggcgttcaaccaccttctgccaggaggcttcccacccaccggcatgcccacgctgcccccctaccagctgccggactccacctaccccaccaccaccatctcccaagatgggggcagcactgtgcaccggcctcagcccctgccaccgtccaccatgcaccagggcgggctggctgcagcggctgcagccgccgacaccagctctgcctacggagcccgccacagcttctccagctactctgacagcttcatgaatccggcggcgccctccaaccacatgaacccggtcagcaacggcctgtctcctcaggtgatgagcatcttgggcaaccccagtgcggtgcccccgcagccacaggctgacttctccatctccccgctgcatggcggcctggactcggccacctccatctcagccagctgcagccagcgggccgactccatcaagccaggagacagcctgcccacctcccaggcctactgcccacccacctacagcaccaccggctacagcgtggaccccgtggccggctatcagtacggccagtacggccagagtgagtgcctggtgccctgggcgtcccccgtccccattccttctcccacccccagggcctcctgcttgtttatggagagctacaaggtggtgtcagggtggggaatgtccatttcacagatggaaaaattgaagtccagccagatggaacagttcacctaaaatgacactgagttgggcaaaacccaggacatctcctggctaagcctctgcttccgtactatg

SEQ ID NO: 21440 - DNA, 5538 bp, Homo sapiens
  source 1..5538: mol_type = unassigned DNA
agaaagagatcgcagcaggggtgaagggagcggacgggaagcgatttttgccgactttggattcgtccccggcgtgcgcaagaatggcggcccttcccggcacggtaccgagaatgatgcggccggctccggggcagaactacccccgcacgggattccctttggaagtgtccaccccgcttggccaaggccgggtcaatcagctgggaggggtcttcatcaatgggcgacccctgcctaaccacatccgccacaagatagtggagatggcccaccatggcatccggccctgtgtcatctcccgacagctgcgtgtctcccacggctgcgtctccaagattctttgccgctaccaggagaccgggtccatccggcctggggccatcggcggcagcaagcccagacaggtggcgactccggatgtagagaaaaagattgaggagtacaagagggaaaacccaggcatgttcagctgggagatccgggacaggctgctgaaggatgggcactgtgaccgaagcactgtgccctcaggtttagtgagttcgattagccgcgtgctcagaatcaagttcgggaagaaagaggaggaggatgaagcggacaagaaggaggacgacggcgaaaagaaggccaaacacagcatcgacggcatcctgggcgacaaagggaaccggctggacgagggctcggatgtggagtcggaacctgacctcccactgaagcgcaagcagcgacgcagtcggaccacattcacggccgagcagctggaggagctggagaaggcctttgagaggacccactacccagacatatacacccgcgaggagctggcgcagaggaccaagctgacagaggcgcgtgtgcaggtctggttcagtaaccgccgcgcccgttggcgtaagcaggcaggagccaaccagctggcggcgttcaaccaccttctgccaggaggcttcccacccaccggcatgcccacgctgcccccctaccagctgccggactccacctaccccaccaccaccatctcccaagatgggggcagcactgtgcaccggcctcagcccctgccaccgtccaccatgcaccagggcgggctggctgcagcggctgcagccgccgacaccagctctgcctacggagcccgccacagcttctccagctactctgacagcttcatgaatccggcggcgccctccaaccacatgaacccggtcagcaacggcctgtctcctcaggtgatgagcatcttgggcaaccccagtgcggtgcccccgcagccacaggctgacttctccatctccccgctgcatggcggcctggactcggccacctccatctcagccagctgcagccagcgggccgactccatcaagccaggagacagcctgcccacctcccaggcctactgcccacccacctacagcaccaccggctacagcgtggaccccgtggccggctatcagtacggccagtacggccagactgctgttgattatctggccaaaaatgtgagcctctccacccagcgtcgcatgaagctcggggagcactctgctgtgctgggactcctgcctgtggaaactggccaggcctactagggcccctggggcgacttgccccagcccaattcccagcccaaccctaactgacccctgagcttcccagccttgccgcctcacccccctgttgtcctaggaggccaggaaaggagcccacctgcttctcatcaccagccccctggaggtagacagccagcttgtcactcacctgtggttagggatccagagtgatgcccttggagtctgctccccactttccccaaggagggtttctggtcagcctgaggtcctcccctgtcaaatcccatggtggcctctgtgccatctcaggcatggagattggggcccaccttgaacaccttgggtgtccagaggaggatggtgcctgagaggaggtcctacagccctttggacccaactccagtgggggccctagctagaagtggaggtgaagctttcagggctgctctcagctggatgtactgggagccagccctgcaaggagggtctctggctcagtgtcagaaccacagccctttcctcctctagacattgggactccagcaaagaggggaccctggccctggggtcttcccaggggagtcagcaggggggcagtctcacccccacccaggaatttgaaggacttcagaaccctccccagacacctctactgggtgcatggggaaatctagcacaggcagggagactggggagaccaggaagaggcttaaccagagggtaggggcacatgggggtggggcttgtcagccgtgggcccgcccaggatacaaggacccaactcaggcttctggaagcagagggctcttatcctgaagcccaagttcccagcatgtccactccatctggggcctggggagcccacagaacttttcagtttccttcattagctgaatcagatgagatggggaggggataaagtcttgaggatacatgagtggaggagcaggaagtgggctcagaaggcactttcataaccagatccctctgtttgtgggagggcaagcctttgttgcccaaggcttcagctctctgcctgcaagtccacaccccagggagttgagattttgcccaaagccttccgcagaggcccgagcccatccttaccatgccccatcctctaggaagaggtctccatcttccccaaacccctttcagtttgtggggatgcagagagctaccctcagagctttggaggagggttgtagactgggcagggatggtttgccccacagacaagatgatcccccctggcatgttgttaggggcaaattgctgtcctgctcagagtggcatctttcaatgttgcctccatcttggccaagaggtccctgcctcctgatccggcacagctgagctgaggcagatgtgaccagttttcaagctaccagccctgggcagaggaagatgtcaacaattccagagcagagggaagaggcaccttccttgaccacaccagtggcctcctgaagttccatgcttttaagagctgggaccttgggaggatgattcaaaccctcaattcctcctccctgggaactttttaccacctttacctatttatcaaaatcatattcatctttaccatcactgtcactgtaatctacattccatcacctttatcaggtgctgctgagtacaaagcacttgggatgggagacacagcactgaattcacaaacattggaccaaactgtttgtccccatctgggttcatgaggccacctctttgctcaatccatgcctcttgccctcagtcaacaagacattcctagagggaaagggctgctgctctgggagtcaacctgagttcctccctcctgggaagctgggttggcaagattctaggacactcacctgcatggacatcacctctgtgacaaatgcttacctgtttctcatcttcagacttggcgatatcaagcctgttctggaccatgaccaggctggctcatatctctggtttagagaaacctatgaataactggggacaaacagactctttggtagcagcagacacatgtgatccatcaagatcaaccaaggttgcaactggagcgtccactgccagagacctttggctcttcaagctcgggacaaaaaagaagactctgttgtcccttggtaacccagtccctgcttttgtagctatcacagcagaaagcaactcttcctgaagaccaaacactcgtcatccacattccttgaatggccaatccttccatctggaggcctggctcagaaagtatctgagtatcctgacaccctctgtgactcaggagcagggatctcaggcagctgatatcaaaaccacccagccccatccccaggaggcgacattccaatgctaggaccaatcccagatatctggtcccgatggtgaaatggaacaaagacctgcttgggaataaaccaaatgatttctcatgacgttgaacataagttctcccaagccatcatcttggtagaaaatgggacttattccttgacaggccccacccccttcagaaagaggcccttgaccctgataggttctctctaaaacccgtatattaacgcatctggccaacttgggttataaaattcagccttgtgttggcaactcgaaacatcaccagagaggtgatgttgaatgagagacacaaggcctccatctctttggggctgaccacagcctgagaaagaaggtctgggttccagtggccaggccgtcccagaaacaacccccatccatccctgtaaatagagtctgtagcaaaataagagctgcttcctccaacttatcacaagtcgccgttggtcctctctaaggagggctctcttctgagttcattgtacaatagttggaaacgtggtgatgtgctgttcgtttatagaaagctgactttttataaatatatatatatactaaaaaaggaaagaaatcccccacagtgtgtgtcgtgctagtgccagagaccatctgtagggatatatcttcatattgtgtgtttcaaattatgcattccaggctctagtgggttctttcaatcttgttcctttatttttttcatttggtatttctctcttgctatataaagaaaaaaagaagtgatgtgtaagaaccaagctatgcttttatacttccattttatacttgatttagctttgttgttcttttgccagaggaacatcaaagggcagagcaaacagagaactagggggataagagagaagaaaagaagaatggagagagaggtttgcccagaaggaaaacgaagagccagattgaaatctgactctggcttgagaacaggacgggtcccagagtttgaccactgccagaatccagtgtttcaagatggagttggtgaagcatccaagattttggatcctgggcctcagtgacactccatcacccaactaaaaagatgttctctgggacctctctcaggctgatgttcttctcatcaagctcccgaatgtgtctcgcactattggacactttttgggggtacacaggtcttctctcctcccctcctgcagaggcaccaaaaccaagaccaaatgggggttctctagccgccaacttgaaacgctctgagacttctgtgtatttgatgcttcttcaagtcagctctgacgtggccaattccctgacctgggaaatatttacatagtactctagatcattccttcttcctagtaactgcaactttgttgcttctgtgtttgactcacagccactttcccccatgcggaagtgagtgggtgtacgtgagggtgtgagtggggtgtgtgcgtgggcgtgtgggcgtgaggtgtgtgtttaaatataatcacaccataatttattcagctatatggagtagtagactagaaagagaaactggtatttgctttaactacctgctgcttgtaagcgcttcctctgtaactcaggcgtaactgttatacattaaaagaaattaaaagca

SEQ ID NO: 21441 - DNA, 4514 bp, Homo sapiens
  source 1..4514: mol_type = unassigned DNA
agcccacgttgctgcttagattgaaatgcagaactcaagcctctttcatcggggcacagacttccttttacttcttccttttgccctctcgcctcctcctcctgggaagaagcggaggcgccggcggtcggccgggatagcaacaggccgggccactgaggcggtgcggaaagtttctgtctgggagtgcggaactggggccgggttggtgtactgctcggagcaatggagccagccttcggggaggtgaaccagctgggaggagtgttcgtgaacgggaggccgctgcccaacgccatccggcttcgcatcgtggaactggcccaactgggcatccgaccgtgtgacatcagccgccagctacgggtctcgcacggctgcgtcagcaagatcctggcgcgatacaacgagacgggctcgatcttgccaggagccatcgggggcagcaagccccgggtcactacccccaccgtggtgaaacacatccggacctacaagcagagagaccccggcatcttcgcctgggagatccgggaccgcctgctggcggacggcgtgtgcgacaagtacaatgtgccctccgtgagctccatcagccgcattctgcgcaacaagatcggcaacttggcccagcagggtcattacgactcatacaagcagcaccagccgacgccgcagccagcgctgccctacaaccacatctactcgtaccccagccctatcacggcggcggccgccaaggtgcccacgccacccggggtgcctgccatccccggttcggtggccatgccgcgcacctggccctcctcgcactccgtcaccgacatcctgggcatccgctccatcaccgaccaagtgagcgacagctccccctaccacagccccaaggtggaggagtggagcagcctgggccgcaacaacttccccgccgccgccccgcacgcggtgaacgggttggagaagggagccctggagcaggaagccaagtacggtcaggcaccaaatggtctcccagctgtgggcagttttgtgtcagcatccagcatggctccttaccctaccccagcccaagtgtcgccttacatgacctacagtgctgctccttctggttatgttgctggacatgggtggcaacatgctgggggcacctcattgtctccccacaactgtgacattccggcatcgctggcgttcaagggaatgcaggcagccagagaaggtagtcattctgtcacggcttccgcgctctgatgggaaattccgtctccagcagcttcacccgggtctccctgtctcagcacctcctcccccaattcccaggtctcacatcccacccctcctgccctccaacccttctgccttgaaagctggctgtacggactcacatcctttgtgctaatgacacttacatatttcttgccataacttttctcttgcagaaaaactgacatgactttaggatttaaaaacaagagcaacaataagcattgaatgagacatttgtgttgcccacatactgtcttaacataacaaagaaacctacacccctcaaagggtttaaggaactttacaaactagtctttggtaaaaccacatgtgtatatttattctaaatcaacctgaacttttgaaatgtgcaattgttgagattttgcaaaatcaataaaggaaaatacttatagaaaaaattatgctacaccctctaatcaaatatggtaaccaagtaagctttaattcatcattaggaaacaaatcaataagtgacttgtttgagtgatcctttgtttaagacatgacctattttgttgaaaaatatatgtagaacccaagcaatatctgaatctagctctccctggtgttttgacttggttccaaatacaataatgtttatattttctattagtttgtaaatacggactctggatggtgcatttgtgtcttcattccataagatattcccctcccctcagccccaccccctctctatttttttctttcttttttgcaaaggtgactttctggcaacgtctttgtctctgtttggtggtgggctgctcgggctcctggacctggacttgcccccaaattttgtgtatgcagtgaaggcttcaacatctcatgaaggacactttatttctacagcagaggacacgaaaaacagataaaacaagccagtctcccattttgtacctaatcaaacaacacacatgctaagcatataaagacaagagggtggaaaatatctgaacaagaaggctctaaaggaagtcacttagaaacttaagtttaatgtgaaatgttttgcaaagatgcttaaaatgaactttgtgttaagaaaaccactgtgaaactaaattgtcctattattgttggcttacctgtgtgttcagcaatctcagccccaaataatgttgtaatttaaagaaaatggaaaattctgctctaatgaatgtaacaatggcttgctgtgaagtttacattgttgtacagaagcatgtttcgcatgtaggtaaactggtggtggtactagaaatacaatgttatttaattttaacaaattccctttattcatttctgaaattacaggacacagtttaactcataaacctttctagaccaatttatttttcactttaatgttaataacagttgtggagtatatgtgtgtgtgagcatgtgagtatgtgttgtattttaaaacaattgattttctggggcaaaattctacagtttttaatcccttctgtttaggaagttcttcctgtttggcaatataggcttaaaaatatgtttttaggacattggtacaattcagctgttggaaaattaatatattgagggttttttggtactaattctgtgcaataactaaaagagcacctcactggatatggatgttgaagatggattccctaggtgattttaatttcttccggtctgtgctgtgcacagtctacatggcaatgcggttccaccacatcggtttcgtggcttcgtttaaaactcagatggctagattagttaggttttcaaatcactaggatgtaaacagtaagcagatttctgacacacaaattatgttagagtgactgcttttttcagacagcagatatcttatagagagctttgaactgcatttatttctaaagcaaccgaaattcagtgctacaaatagaggattataacttcaggagaagaataagcagaaggagcagatgaactctcagggccatagtcttcctttgatcttgtaaaacttccattgacatctggagttcccagtctggtgagaaaatagactataaactgaatggaacaaagatccaatccaatattttggtggagacttctttaaaaccataccatacagggactctcctgtcatctgaaaaactgatgtaaggtacagaactattctttatcaaatgtttttaggtggctgttagggggctttaaaaaatattacttgcttgtgtggaaatgcaaataatgttattttctttatctaaattaagaaatctcttgttattgtgctatttataatttttttctggttcttgtattttaaaaaatctaatattaatggtattgaagtttccttttctccctctaggtcttaacagtgaattcacatggagtaatttttaaaagatatcagatacaatttgctattcaaagaaaattatgatttaaagccactttttaaaatacgagaaggaaaataggatggattaaagggttaacttttaaagattattattggttaatgttgacatatttcctctatctcatagatggtaaaagtgttgcttttaaactggcaaatgcactcttcagaaatccttttctatctgatccacatggagaggttaaaggttcaatttcatgacctctatgcaggcagcgctctcattggatgtaagaatattacctgcaaggatagaatgcagttgtgcaacagagacacattcttatttcttttttttcacaattttgttttgtttttaatgacccttttattgaatattggactgaaatataaattttaaaaaacacgttggaaaggatgtacaacagaaggctatgtatgtatatacagtatgtcaaaagccttttatttttatacttcaaatgctctaaattaataaaaagtaataattaccatgttatcttttactttttattttcaaaatgctttagtgaaatagccccgtagtagaaatagcccacggtagtaacttaggacaggtgtcatatggactttcagttattcttgttgactttactgaatcagcatcatctctggatgcagatataaaatcaagtttggttacatcaagaccaaggagatatttttgttgatacatgttagtatagtaatccttagaaatgctaagtgtatttctttttcagaacatttccccttcatcatacatattttaatactgcagacagctgacttcccacctgaagttgtcgtttaaaactaataacctgaaaatgcagttctgttc

SEQ ID NO: 21442 - DNA, 3102 bp, Homo sapiens
  source 1..3102: mol_type = unassigned DNA
ccctcccctgctctcgcaaggagaaagcgggcgacgagcgctcgcagcccgtggggctgatcccacctcccgcagggctccggtcgtgtcgctgtcggaccgcagaacgccgggacgcatttccgagctcgggcccgacccaacccgctgccattctagctacctagtggagccgcggagagactcttgaaccgtgaggctccttgatgagaaggtggagaggctgccgggctattctccgagcatcttccggccgagctctgctcctctccgtgcgcttgcggcttctccttgggctagcgcgtccgcagtccctccaagtccaggccgcagtcacccaggtggggagctagcctgaaagagacagcggaaggagtttcctggactgcgctgtcgctcaccgacccgcaccaatcaccatgcagcttgccctcggacccgccccttttagggcgtgtccccagtgagtgatagacggagccgccctgccctgctcagcccagcccacgttgctgcttagattgaaatgcagaactcaagcctctttcatcggggcacagacttccttttacttcttccttttgccctctcgcctcctcctcctgggaagaagcggaggcgccggcggtcggccgggatagcaacaggccgggccactgaggcggtgcggaaagtttctgtctgggagtgcggaactggggccgggttggtgtactgctcggagcaatggagccagccttcggggaggtgaaccagctgggaggagtgttcgtgaacgggaggccgctgcccaacgccatccggcttcgcatcgtggaactggcccaactgggcatccgaccgtgtgacatcagccgccagctacgggtctcgcacggctgcgtcagcaagatcctggcgcgatacaacgagacgggctcgatcttgccaggagccatcgggggcagcaagccccgggtcactacccccaccgtggtgaaacacatccggacctacaagcagagagaccccggcatcttcgcctgggagatccgggaccgcctgctggcggacggcgtgtgcgacaagtacaatgtgccctccgtgagctccatcagccgcattctgcgcaacaagatcggcaacttggcccagcagggtcattacgactcatacaagcagcaccagccgacgccgcagccagcgctgccctacaaccacatctactcgtaccccagccctatcacggcggcggccgccaaggtgcccacgccacccggggtgcctgccatccccggttcggtggccatgccgcgcacctggccctcctcgcactccgtcaccgacatcctgggcatccgctccatcaccgaccaagtgagcgacagctccccctaccacagccccaaggtggaggagtggagcagcctgggccgcaacaacttccccgccgccgccccgcacgcggtgaacgggttggagaagggagccctggagcaggaagccaagtacggtcaggcaccaaatggtctcccagctgtgggcagttttgtgtcagcatccagcatggctccttaccctaccccagcccaagtgtcgccttacatgacctacagtgctgctccttctggttatgttgctggacatgggtggcaacatgctgggggcacctcattgtctccccacaactgtgacattccggcatcgctggcgttcaagggaatgcaggcagccagagaaggtagtcattctgtcacggcttccgcgctctgatgggaaattccgtctccagcagcttcacccgggtctccctgtctcagcacctcctcccccaattcccaggtctcacatcccacccctcctgccctccaacccttctgccttgaaagctggctgtacggactcacatcctttgtgctaatgacacttacatatttcttgccataacttttctcttgcagaaaaactgacatgactttaggatttaaaaacaagagcaacaataagcattgaatgagacatttgtgttgcccacatactgtcttaacataacaaagaaacctacacccctcaaagggtttaaggaactttacaaactagtctttggtaaaaccacatgtgtatatttattctaaatcaacctgaacttttgaaatgtgcaattgttgagattttgcaaaatcaataaaggaaaatacttatagaaaaaattatgctacaccctctaatcaaatatggtaaccaagtaagctttaattcatcattaggaaacaaatcaataagtgacttgtttgagtgatcctttgtttaagacatgacctattttgttgaaaaatatatgtagaacccaagcaatatctgaatctagctctccctggtgttttgacttggttccaaatacaataatgtttatattttctattagtttgtaaatacggactctggatggtgcatttgtgtcttcattccataagatattcccctcccctcagccccaccccctctctatttttttctttcttttttgcaaaggtgactttctggcaacgtctttgtctctgtttggtggtgggctgctcgggctcctggacctggacttgcccccaaattttgtgtatgcagtgaaggcttcaacatctcatgaaggacactttatttctacagcagaggacacgaaaaacagataaaacaagccagtctcccattttgtacctaatcaaacaacacacatgctaagcatataaagacaagagggtggaaaatatctgaacaagaaggctctaaaggaagtcacttagaaacttaagtttaatgtgaaatgttttgcaaagatgcttaaaatgaactttgtgttaagaaaaccactgtgaaactaaattgtcctattattgttggcttacctgtgtgttcagcaatctcagccccaaataatgttgtaatttaaagaaaatggaaaattctgctctaatgaatgtaacaatggcttgctgtgaagtttacattgttgtacagaagcatgtttcgcatgtaggtaaactggtggtggtactagaaatacaatgttatttaattttaacaaattccctttattcatttctgaaattacaggacacagtttaactc

SEQ ID NO: 21443 - DNA, 987 bp, Homo sapiens
  source 1..987: mol_type = unassigned DNA
agtgcaggcacccttagtgagcgacagctccccctaccacagccccaaggtggaggagtggagcagcctgggccgcaacaacttccccgccgccgccccgcacgcggtgaacgggttggagaagggagccctggagcaggaagccaagtacggtcagatccaaaactttttcttgcttatgatatcgaggttgaaattctaggtgaagcacatctctatttgtggctaaatctactttattataaagccaaggtagaagatagtttgctatagagagcacccttgcacagttctttcaggggaaagaattctcatgcctttcatggaagatccacatgagaaaggagttgatggattgaagtcttatttatggaatctttaggcaccaaatggtctcccagctgtgggcagttttgtgtcagcatccagcatggctccttaccctaccccagcccaagtgtcgccttacatgacctacagtgctgctccttctggttatgttgctggacatgggtggcaacatgctgggggcacctcattgtctccccacaactgtgacattccggcatcgctggcgttcaagggaatgcaggcagccagagaaggtagtcattctgtcacggcttccgcgctctgatgggaaattccgtctccagcagcttcacccgggtctccctgtctcagcacctcctcccccaattcccaggtctcacatcccacccctcctgccctccaacccttctgccttgaaagctggctgtacggactcacatcctttgtgctaatgacacttacatatttcttgccataacttttctcttgcagaaaaactgacatgactttaggatttaaaaacaagagcaacaataagcattgaatgagacatttgtgttgcccacatactgtcttaacataacaaagaaacctacacccctcaaagggtttaaggaactttacaaactagtctttggtaaaaccacatgtgta

SEQ ID NO: 21444 - DNA, 1313 bp, Homo sapiens
  source 1..1313: mol_type = unassigned DNA
aataggggaaaataagccagatggataaaggaagtgctggtcaccctggaggtgcactggtttggggaaggctcctggcccccacagccctcttcggagcctgagcccggctctcctcactcacctcaacccccaggcggcccctccacagggcccctctcctgcctggacggctctgctggtctccccgtcccctggagaagaacaaggccatgggtcggcccctgctgctgcccctactgcccttgctgctgccgccagcatttctgcagcctagtggctccacaggatctggtccaagctacctttatggggtcactcaaccaaaacacctctcagcctccatgggtggctctgtggaaatccccttctccttctattacccctgggagttagccacagctcccgacgtgagaatatcctggagacggggccacttccacaggcagtccttctacagcacaaggccgccttccattcacaaggattatgtgaaccggctctttctgaactggacagagggtcagaagagcggcttcctcaggatctccaacctgcagaagcaggaccagtctgtgtatttctgccgagttgagctggacacacggagctcagggaggcagcagtggcagtccatcgaggggaccaaactctccatcacccaggctgtcacgaccaccacccagaggcccagcagcatgactaccacctggaggctcagtagcacaaccaccacaaccggcctcagggtcacacagggcaaacgacgctcagactcttggcacataagtctggagactgctgtgggggtggcagtggctgtcactgtgctcggaatcatgattttgggactgatctgcctcctcaggtggaggagaaggaaaggtcagcagcggactaaagccacaaccccagccagggaacccttccaaaacacagaggagccatatgagaatatcaggaatgaaggacaaaatacagatcccaagctaaatcccaaggatgacggcatcgtctatgcttcccttgccctctccagctccacctcacccagagcacctcccagccaccgtcccctcaagagcccccagaacgagaccctgtactctgtcttaaaggcctaaccaatggacagccctctcaagactgaatggtgaggccaggtacagtggcgcacacctgtaatcccagctactctgaagcctgaggcagaatcaagtgagcccaggagttcagggccagctttgataatggagcgagatgccatctctagttaaaaatatatattaacaataaagtaacaaatttaaaaa

SEQ ID NO: 21445 - DNA, 1011 bp, Homo sapiens
  source 1..1011: mol_type = unassigned DNA
acagccctcttcggagcctgagcccggctctcctcactcacctcaacccccaggcggcccctccacagggcccctctcctgcctggacggctctgctggtctccccgtcccctggagaagaacaaggccatgggtcggcccctgctgctgcccctactgcccttgctgctgccgccagcatttctgcagcctagtggctccacaggatctggtccaagctacctttatggggtcactcaaccaaaacacctctcagcctccatgggtggctctgtggaaatccccttctccttctattacccctgggagttagccacagctcccgacgtgagaatatcctggagacggggccacttccacaggcagtccttctacagcacaaggccgccttccattcacaaggattatgtgaaccggctctttctgaactggacagagggtcagaagagcggcttcctcaggatctccaacctgcagaagcaggaccagtctgtgtatttctgccgagttgagctggacacacggagctcagggaggcagcagtggcagtccatcgaggggaccaaactctccatcacccagggtcagcagcggactaaagccacaaccccagccagggaacccttccaaaacacagaggagccatatgagaatatcaggaatgaaggacaaaatacagatcccaagctaaatcccaaggatgacggcatcgtctatgcttcccttgccctctccagctccacctcacccagagcacctcccagccaccgtcccctcaagagcccccagaacgagaccctgtactctgtcttaaaggcctaaccaatggacagccctctcaagactgaatggtgaggccaggtacagtggcgcacacctgtaatcccagctactctgaagcctgaggcagaatcaagtgagcccaggagttcagggccagctttgataatggagcgagatgccatctctagttaaaaatatatattaacaataaagtaacaaatttaaaaa

SEQ ID NO: 21446 - DNA, 909 bp, Homo sapiens
  source 1..909: mol_type = unassigned DNA
acagccctcttcggagcctgagcccggctctcctcactcacctcaacccccaggcggcccctccacagggcccctctcctgcctggacggctctgctggtctccccgtcccctggagaagaacaaggccatgggtcggcccctgctgctgcccctactgcccttgctgctgccgccagcatttctgcagcctagtggctccacaggatctggtccaagctacctttatggggtcactcaaccaaaacacctctcagcctccatgggtggctctgtggaaatccccttctccttctattacccctgggagttagccacagctcccgacgtgagaatatcctggagacggggccacttccacaggcagtccttctacagcacaaggccgccttccattcacaaggattatgtgaaccggctctttctgaactggacagagggtcagaagagcggcttcctcaggatctccaacctgcagaagcaggaccagtctgtgtatttctgccgagttgagctggacacacggagctcagggaggcagcagtggcagtccatcgaggggaccaaactctccatcacccaggggaacccttccaaaacacagaggagccatatgagaatatcaggaatgaaggacaaaatacagatcccaagctaaatcccaaggatgacggcatcgtctatgcttcccttgccctctccagctccacctcacccagagcacctcccagccaccgtcccctcaagagcccccagaacgagaccctgtactctgtcttaaaggcctaaccaatggacagccctctcaagactgaatggtgaggccaggtacagtggcgcacacctgtaatcccagctactctgaagcctgaggcagaatcaagtgagcccaggagttcagggccagctt

SEQ ID NO: 21447 - DNA, 653 bp, Homo sapiens
  source 1..653: mol_type = unassigned DNA
gctgggtccctgaatcaccgactggaggagagttacctacaagagccttcatccaggagcatccacactgcaatgatataggaatgaggcggcccctccacagggcccctctcctgcctggacggctctgctggtctccccgtcccctggagaagaacaaggccatgggtcggcccctgctgctgcccctactgcccttgctgctgccgccagcatttctgcagcctagtggctccacaggatctggtccaagctacctttatggggtcactcaaccaaaacacctctcagcctccatgggtggctctgtggaaatccccttctccttctattacccctgggagttagccacagctcccgacgtgagaatatcctggagacggggccacttccacaggcagtccttctacagcacaaggccgccttccattcacaaggattatgtgaaccggctctttctgaactggacagagggtcagaagagcggcttcctcaggatctccaacctgcagaagcaggaccagtctgtgtatttctgccgagttgagctggacacacggagctcagggaggcagcagtggcagtccatcgaggggaccaaactctccatcacccagggtcagcagcggactaaagccacaaccccagccagg

SEQ ID NO: 21448 - DNA, 3634 bp, Homo sapiens
  source 1..3634: mol_type = unassigned DNA
agaagggaggtagtcgccctccgtcgtggcctggcgtggattccgagcgttggtgtctggcggtttccgaccgttggtgtctggcacgcgccaccccgatgtaccaggtaaagccctatcacggggtcggcgcccctctccgtgtggagcccacctgcatgtactggctccccaacatgcacggcaggagcggcggcccagcactcggcactggccacttgcagacaagaagacaagaaaatgatttgaggacagcttcaatcgcggtgtgaagaagaaagcaacaaaacgaccactgaaaacaatgccggtggcaaaacatccaaagaaagggtcccaagtggtacatcgtcatagctggaaacagtcagagccaccagccaatgatcttttcaatgctgcgaaagctgccaaaagtgacatgcagtgtggccatgaggtctgccggaagtgacttgttggtgttatctcctgagttaaaatgtgaagggatttttttttttcagattactgagagtcttcagttactagaggcggatttccctgactgaagaccatgttgcaggcccacagctgcctacagaaccgtcccaaaatatggcaaagaaacctattctgagcgatagggtctcaccatgttgcccaggctggtcttgaactcctggactcatcctaaagtgctggcctctcattccctgtctgtgcacacctcacggcaagggccagcctgtttcctcccggtcacctccaaatcttgctgcttttaattcaactcagaggcctagccagggttgagttctcacccacctgtgccgccctgccttgttacctggaagcacagccttggggactgagcaggccctcactgtcactttaagaagggaatcagccactttgtgctcaccacctctggggaaggtgtgagaggagagaaggaagtggctgtttggctgctgacaacatgaagacttcctgcgatgagaacagaggcacaggtgccggccctgcagcccccagaacccggactggagggggccatggggcgccggaccctggccctgccctgggtgctgctgaccctgcgtgtcactgcagggaccccggaggtgtgagtacaagttcggatggaggccaccgagctctcgtccttcaccatccgttgtgggttcctggagtctggctccatctccctggtgactgcccgctgggaaacccagagcagcatctctctcatcctggaaggctctggggccagcagcccctgcgccaacaccaccttctgctgcaagtttgcgtccttccctgagggctcctgggaggcctgtgggagcctcccgcccagctcagacccagggctctctgtcccgccgactcctgcccccattctgcgggcagacctggccgggatcttgggggtctcaggagtccttctctttgactgtggctacctccttcatctgctgtgccgacagaagcaccgccctgcccctaggctccagccatcccacaccagctcctaggcactgagagcacgagcatgggcacccagccaggcctcccaggctgctctccacgtcccttatgccactatcaacaccagctgctgcccagctactttggacacagctcacccccgacagggggccgtcctggtgggcatcactccccacccacaccgcacactggccccagggccctgctgcctgggcctccacatccatccctgcacatggcagctttgtctctgttgagaatggactctacgcttaggctgggcagaggcctccctgcactggtcctggcctcactcttttccctgacccttggggcccagggccatggagggacccttaggagttcaatgagagagaccatgaggccactgggctttccccttcccaggcctcctgggtgccacccccttacgttattcttgggcctctaataagtgtcccacaggtgcctggccaggcccacctgctgcagatgtggtctgtgtgtgtgcatgtgtgggtgtgtgtgggcacaggtgtgagtgtgtgagcaacagtaccccattccagtcgtttcctgctgtgactaagtcagcaacacagttcctctgacatgggccttggctgtgcttctttgggggtgaagagattggggaggaagtctccacccctgggaggcagaagccaggcatagcgcgctggctaggactccagtaccgtgaagggaggcagtgagagcagacatctgtgcctcattcctgatctcaaggggaaagcaagaacaagggaggcttcctcaggatctcgaacctgcggaaggaggaccagtctgtgtacttctgccaagtccagctggacatacagatcagggaggctgtcgtggcagtccatcaaggggacccacctcaccatcacccaggccctcaggcagcccctccacagggcccctctcctgcctggacagctctgctggtctccccgtcccctggagaagaacaaggccatgggtcggcccctgctgctgcccctgctgctcctgctgcagccgccagcatttctgcagcctggtggctccacaggatctggtccaagctacctttatggggtcactcaaccaaaacacctctcagcctccatgggtggctctgtggaaatccccttctccttctattacccctgggagttagccatagttcccaacgtgagaatatcctggagacggggccacttccacgggcagtccttctacagcacaaggccgccttccattcacaaggattatgtgaaccggctctttctgaactggacagagggtcaggagagcggcttcctcaggatctcaaacctgcggaaggaggaccagtctgtgtatttctgccgagtcgagctggacacccggagatcagggaggcagcagttgcagtccatcaaggggaccaaactcaccatcacccaggctgtcacaaccaccaccacctggaggcccagcagcacaaccaccatagccggcctcagggtcacagaaagcaaagggcactcagaatcatggcacctaagtctggacactgccatcagggttgcattggctgtcgctgtgctcaaaactgtcattttgggactgctgtgcctcctcctcctgtggtggaggagaaggaaaggtagcagggcgccaagcagtgacttctgaccaacagagtgtggggagaagggatgtgtattagccccggaggacgtgatgtgagacccgcttgtgagtcctccacactcgttccccattggcaagatacatggagagcaccctgaggacctttaaaaggcaaagccgcaaggcagaaggaggctgggtccctgaatcaccgactggaggagagttacctacaagagccttcatccaggagcatccacactgcaatgatataggaatgaggtctgaactccactgaattaaaccactggcatttgggggctgtttattatagcagtgcaaagagttcctttatcctccccaaggatggaaaaatacaatttattttgcttaccatacaccccttttctcctcgtccacattttccaatctgtatggtggctgtcttctatggcagaaggttttggggaataaatagcgtgaaatgctgctgaca

SEQ ID NO: 21449 - DNA, 1373 bp, Homo sapiens
  source 1..1373: mol_type = unassigned DNA
gatgccaccttactctggagaggatgggcagagcctcctatggagggagccctgtgggtcaccaaagctccagtgaccacccccgggcaaagacctgcagatcccctgttagagacgggcccaggactttgtgcggggtgcccactgttgctctgagccttcacttcctcagggaggcttcctcaggatctcgaacctgcggaaggaggaccagtctgtgtacttctgccaagtccagctggacatacagatcagccctcaggcagcccctccacagggcccctctcctgcctggacagctctgctggtctccccgtcccctggagaagaacaaggccatgggtcggcccctgctgctgcccctgctgctcctgctgcagccgccagcatttctgcagcctggtggctccacaggatctggtccaagctacctttatggggtcactcaaccaaaacacctctcagcctccatgggtggctctgtggaaatccccttctccttctattacccctgggagttagccatagttcccaacgtgagaatatcctggagacggggccacttccacgggcagtccttctacagcacaaggccgccttccattcacaaggattatgtgaaccggctctttctgaactggacagagggtcaggagagcggcttcctcaggatctcaaacctgcggaaggaggaccagtctgtgtatttctgccgagtcgagctggacacccggagatcagggaggcagcagttgcagtccatcaaggggaccaaactcaccatcacccaggctgtcacaaccaccaccacctggaggcccagcagcacaaccaccatagccggcctcagggtcacagaaagcaaagggcactcagaatcatggcacctaagtctggacactgccatcagggttgcattggctgtcgctgtgctcaaaactgtcattttgggactgctgtgcctcctcctcctgtggtggaggagaaggaaaggtagcagggcgccaagcagtgacttctgaccaacagagtgtggggagaagggatgtgtattagccccggaggacgtgatgtgagacccgcttgtgagtcctccacactcgttccccattggcaagatacatggagagcaccctgaggacctttaaaaggcaaagccgcaaggcagaaggaggctgggtccctgaatcaccgactggaggagagttacctacaagagccttcatccaggagcatccacactgcaatgatataggaatgaggtctgaactccactgaattaaaccactggcatttgggggctgtttattatagcagtgcaaagagttcctttatcctccccaaggatggaaaaatacaatttattttgctta

SEQ ID NO: 21450 - DNA, 1506 bp, Homo sapiens
  source 1..1506: mol_type = unassigned DNA
tgaagacttcctgcgatgagaacagaggcacaggtgccggccctgcagcccccagaacccggactggagggggccatggggcgccggaccctggccctgccctgggtgctgctgaccctgcgtgtcactgcagggaccccggaggtgtgagtacaagttcggatggaggccaccgagctctcgtccttcaccatccgttgtgggttcctggagtctggctccatctccctggtgactgcccgctgggaaacccagagcagcatctctctcatcctggaaggctctggggccagcagcccctgcgccaacaccaccttctgctgcaagtttgcgtccttccctgagggctcctgggaggcctgtgggagcctcccgcccagctcagacccagggctctctgtcccgccgactcctgcccccattctgcgggcagacctggccgggatcttgggggtctcaggagtccttctctttgactgtggctacctccttcatctgctgtgccgacagaagcaccgccctgcccctaggctccagccatcccacaccagctcctaggcactgagagcacgagcatgggcacccagccaggcctcccaggctgctctccacgtcccttatgccactatcaacaccagctgctgcccagctactttggacacagctcacccccgacagggggccgtcctgtcgtttcctgctgtgactaagtcagcaacacagttcctctgacatgggccttggctgtgcttctttgggggtgaagagattggggaggaagtctccacccctgggaggcagaagccaggcatagcgcgctggctaggactccagtaccgtgaagggaggcagtgagagcagacatctgtgcctcattcctgatctcaaggggaaagcaagaacaagggaggcttcctcaggatctcgaacctgcggaaggaggaccagtctgtgtacttctgccaagtccagctggacatacagatcagggaggctgtcgtggcagtccatcaaggggacccacctcaccatcacccaggccctcaggcagcccctccacagggcccctctcctgcctggacagctctgctggtctccccgtcccctggagaagaacaaggccatgggtcggcccctgctgctgcccctgctgctcctgctgcagccgccagcatttctgcagcctggtggctccacaggatctggtccaagctacctttatggggtcactcaaccaaaacacctctcagcctccatgggtggctctgtggaaatccccttctccttctattacccctgggagttagccatagttcccaacgtgagaatatcctggagacggggccacttccacgggcagtccttctacagcacaaggccgccttccattcacaaggattatgtgaaccggctctttctgaactggacagagggtcaggagagcggcttcctcaggatctcaaacctgcggaaggaggaccagtctgtgtatttctgccgagtcga

SEQ ID NO: 21451 - DNA, 2885 bp, Homo sapiens
  source 1..2885: mol_type = unassigned DNA
ccaggcctagccagggttgagttctcacccacctgtgccgccctgccttgttacctggaagcacagccttggggactgagcaggccctcactgtcactttaagaagggaatcagccactttgtgctcaccacctctggggaaggtgtgagaggagagaaggaagtggctgtttggctgctgacaacatgaagacttcctgcgatgagaacagaggcacaggtgccggccctgcagcccccagaacccggactggagggggccatggggcgccggaccctggccctgccctgggtgctgctgaccctgcgtgtcactgcagggaccccggaggtgtgagtacaagttcggatggaggccaccgagctctcgtccttcaccatccgttgtgggttcctggagtctggctccatctccctggtgactgtgagcagggggggccccgatggtgctggggggaccacgctggctgtgttgcacccggaacttggcatccagcaatgggcccctgctcgccaggcccgctgggaaacccagagcagcatctctctcatcctggaaggctctggggccagcagcccctgcgccaacaccaccttctgctgcaagtttgcgtccttccctgagggctcctgggaggcctgtgggagcctcccgcccagctcagacccaggtggggccggggtgaggggtccaggagggcagggaggggctcgggaactggccatccatctgattcttgcctctgtgcccagggctctctgtcccgccgactcctgcccccattctgcgggcagacctggccgggatcttgggggtctcaggagtccttctctttgactgtggctacctccttcatctgctgtgccgacagaagcaccgccctgcccctaggctccagccatcccacaccagctcctaggcactgagagcacgagcatgggcacccagccaggcctcccaggctgctctccacgtcccttatgccactatcaacaccagctgctgcccagctactttggacacagctcacccccgacagggggccgtcctggtgggcatcactccccacccacaccgcacactggccccagggccctgctgcctgggcctccacatccatccctgcacatggcagctttgtctctgttgagaatggactctacgcttaggctgggcagaggcctccctgcactggtcctggcctcactcttttccctgacccttggggcccagggccatggagggacccttaggagttcaatgagagagaccatgaggccactgggctttccccttcccaggcctcctgggtgccacccccttacgttattcttgggcctctaataagtgtcccacaggtgcctggccaggcccacctgctgcagatgtggtctgtgtgtgtgcatgtgtgggtgtgtgtgggcacaggtgtgagtgtgtgagcaacagtaccccattccagtcgtttcctgctgtgactaagtcagcaacacagttcctctgacatgggccttggctgtgcttctttgggggtgaagagattggggaggaagtctccacccctgggaggcagaagccaggcatagcgcgctggctaggactccagtaccgtgaagggaggcagtgagagcagacatctgtgcctcattcctgatctcaaggggaaagcaagaacaagggaggcttcctcaggatctcgaacctgcggaaggaggaccagtctgtgtacttctgccaagtccagctggacatacagatcagccctcaggcagcccctccacagggcccctctcctgcctggacagctctgctggtctccccgtcccctggagaagaacaaggccatgggtcggcccctgctgctgcccctgctgctcctgctgcagccgccagcatttctgcagcctggtggctccacaggatctggtccaagctacctttatggggtcactcaaccaaaacacctctcagcctccatgggtggctctgtggaaatccccttctccttctattacccctgggagttagccatagttcccaacgtgagaatatcctggagacggggccacttccacgggcagtccttctacagcacaaggccgccttccattcacaaggattatgtgaaccggctctttctgaactggacagagggtcaggagagcggcttcctcaggatctcaaacctgcggaaggaggaccagtctgtgtatttctgccgagtcgagctggacacccggagatcagggaggcagcagttgcagtccatcaaggggaccaaactcaccatcacccaggctgtcacaaccaccaccacctggaggcccagcagcacaaccaccatagccggcctcagggtcacagaaagcaaagggcactcagaatcatggcacctaagtctggacactgccatcagggttgcattggctgtcgctgtgctcaaaactgtcattttgggactgctgtgcctcctcctcctgtggtggaggagaaggaaaggtagcagggcgccaagcagtgacttctgaccaacagagtgtggggagaagggatgtgtattagccccggaggacgtgatgtgagacccgcttgtgagtcctccacactcgttccccattggcaagatacatggagagcaccctgaggacctttaaaaggcaaagccgcaaggcagaaggaggctgggtccctgaatcaccgactggaggagagttacctacaagagccttcatccaggagcatccacactgcaatgatataggaatgaggtctgaactccactgaattaaaccactggcatttgggggctgtttattatagcagtgcaaagagttcctttatcctccccaaggatggaaaaatacaatttattttgcttaccata

SEQ ID NO: 21452 - DNA, 1599 bp, Homo sapiens
  source 1..1599: mol_type = unassigned DNA
tgaagacttcctgcgatgagaacagaggcacaggtgccggccctgcagcccccagaacccggactggagggggccatggggcgccggaccctggccctgccctgggtgctgctgaccctgcgtgtcactgcagggaccccggaggtgtgagtacaagttcggatggaggccaccgagctctcgtccttcaccatccgttgtgggttcctggagtctggctccatctccctggtgactgtgagcagggggggccccgatggtgctggggggaccacgctggctgtgttgcacccggaacttggcatccagcaatgggcccctgctcgccaggcccgctgggaaacccagagcagcatctctctcatcctggaaggctctggggccagcagcccctgcgccaacaccaccttctgctgcaagtttgcgtccttccctgagggctcctgggaggcctgtgggagcctcccgcccagctcagacccagggctctctgtcccgccgactcctgcccccattctgcgggcagacctggccgggatcttgggggtctcaggagtccttctctttgactgtggctacctccttcatctgctgtgccgacagaagcaccgccctgcccctaggctccagccatcccacaccagctcctaggcactgagagcacgagcatgggcacccagccaggcctcccaggctgctctccacgtcccttatgccactatcaacaccagctgctgcccagctactttggacacagctcacccccgacagggggccgtcctgtcgtttcctgctgtgactaagtcagcaacacagttcctctgacatgggccttggctgtgcttctttgggggtgaagagattggggaggaagtctccacccctgggaggcagaagccaggcatagcgcgctggctaggactccagtaccgtgaagggaggcagtgagagcagacatctgtgcctcattcctgatctcaaggggaaagcaagaacaagggaggcttcctcaggatctcgaacctgcggaaggaggaccagtctgtgtacttctgccaagtccagctggacatacagatcagggaggctgtcgtggcagtccatcaaggggacccacctcaccatcacccaggccctcaggcagcccctccacagggcccctctcctgcctggacagctctgctggtctccccgtcccctggagaagaacaaggccatgggtcggcccctgctgctgcccctgctgctcctgctgcagccgccagcatttctgcagcctggtggctccacaggatctggtccaagctacctttatggggtcactcaaccaaaacacctctcagcctccatgggtggctctgtggaaatccccttctccttctattacccctgggagttagccatagttcccaacgtgagaatatcctggagacggggccacttccacgggcagtccttctacagcacaaggccgccttccattcacaaggattatgtgaaccggctctttctgaactggacagagggtcaggagagcggcttcctcaggatctcaaacctgcggaaggaggaccagtctgtgtatttctgccgagtcga

SEQ ID NO: 21453 - DNA, 772 bp, Homo sapiens
  source 1..772: mol_type = unassigned DNA
ctcctgggtgccacccccttacgttattcttgggcctctaataagtgtcccacaggtgcctggccaggcccacctgctgcagatgtggtctgtgtgtgtgcatgtgtgggtgtgtgtgggcacaggtgtgagtgtgtgagcaacagtaccccattccagtcgtttcctgctgtgactaagtcagcaacacagttcctctgacatgggccttggctgtgcttctttgggggtgaagagattggggaggaagtctccacccctgggaggcagaagccaggcatagcgcgctggctaggactccagtaccgtgaagggaggcagtgagagcagacatctgtgcctcattcctgatctcaaggggaaagcaagaacaagggaggcttcctcaggatctcgaacctgcggaaggaggaccagtctgtgtacttctgccaagtccagctggacatacagatcagggaggctgtcgtggcagtccatcaaggggacccacctcaccatcacccaggccctcaggcagcccctccacagggcccctctcctgcctggacagctctgctggtctccccgtcccctggagaagaacaaggccatgggtcggcccctgctgctgcccctgctgctcctgctgcagccgccagcatttctgcagcctggattatgtgaaccggctctttctgaactggacagagggtcaggagagcggcttcctcaggatctcaaacctgcggaaggaggaccagtctgtgtatttctgccgagtcgagctgga

SEQ ID NO: 21454 - DNA, 603 bp, Homo sapiens
  source 1..603: mol_type = unassigned DNA
gcttgggctgggggctgagcgcctgtgacctccactggcttcctccttctcctctctgaggactgaatctggggtgcagcagagcacagactcaggcccgcctttcctctccctgaaagagcctgcgctggccttggacagagaaagggatgagaaccctcaggcagcccctccacagggcccctctcctgcctggacagctctgctggtctccccgtcccctggagaagaacaaggccatgggtcggcccctgctgctgcccctgctgctcctgctgcagccgccagcatttctgcagcctggtggctccacaggatctggtccaagctacctttatggggtcactcaaccaaaacacctctcagcctccatgggtggctctgtggaaatccccttctccttctattacccctgggagttagccatagttcccaacgtgagaatatcctggagacggggccacttccacgggcagtccttctacagcacaaggccgccttccattcacaaggattatgtgaaccggctctttctgaactggacagagggtcaggagagcggcttcctcaggatctcaaacctgcggaaggaggaccagtctg

SEQ ID NO: 21455 - DNA, 1364 bp, Homo sapiens
  source 1..1364: mol_type = unassigned DNA
tgaagacttcctgcgatgagaacagaggcacaggtgccggccctgcagcccccagaacccggactggagggggccatggggcgccggaccctggccctgccctgggtgctgctgaccctgcgtgtcactgcagggaccccggaggtgtgagtacaagttcggatggaggccaccgagctctcgtccttcaccatccgttgtgggttcctggagtctggctccatctccctggtgactgtgagcagggggggccccgatggtgctggggggaccacgctggctgtgttgcacccggaacttggcatccagcaatgggcccctgctcgccaggcccgctgggaaacccagagcagcatctctctcatcctggaaggctctggggccagcagcccctgcgccaacaccaccttctgctgcaagtttgcgtccttccctgagggctcctgggaggcctgtgggagcctcccgcccagctcagacccagggctctctgtcccgccgactcctgcccccattctgcgggcagacctggccgggatcttgggggtctcaggagtccttctctttgactgtggctacctccttcatctgctgtgccgacagaagcaccggcatagcgcgctggctaggactccagtaccgtgaagggaggcagtgagagcagacatctgtgcctcattcctgatctcaaggggaaagcaagaacaagggaggcttcctcaggatctcgaacctgcggaaggaggaccagtctgtgtacttctgccaagtccagctggacatacagatcagggaggctgtcgtggcagtccatcaaggggacccacctcaccatcacccagggtgagtccagctgccctggcaccaaggaaccttcctggttcagccataggctcagccctcaggcagcccctccacagggcccctctcctgcctggacagctctgctggtctccccgtcccctggagaagaacaaggccatgggtcggcccctgctgctgcccctgctgctcctgctgcagccgccagcatttctgcagcctggtggctccacaggatctggtccaagctacctttatggggtcactcaaccaaaacacctctcagcctccatgggtggctctgtggaaatccccttctccttctattacccctgggagttagccatagttcccaacgtgagaatatcctggagacggggccacttccacgggcagtccttctacagcacaaggccgccttccattcacaaggattatgtgaaccggctctttctgaactggacagagggtcaggagagcggcttcctcaggatctcaaacctgcggaaggaggaccagtctgtgtatttctgccgagtcga

SEQ ID NO: 21456 - DNA, 1414 bp, Homo sapiens
  source 1..1414: mol_type = unassigned DNA
gcttctttgggggtgaagagattggggaggaagtctccacccctgggaggcagaagccaggcatagcgcgctggctaggactccagtaccgtgaagggaggcagtgagagcagacatctgtgcctcattcctgatctcaaggggaaagcaagaacaagggaggcttcctcaggatctcgaacctgcggaaggaggaccagtctgtgtacttctgccaagtccagctggacatacagatcagggaggctgtcgtggcagtccatcaaggggacccacctcaccatcacccaggccctcaggcagcccctccacagggcccctctcctgcctggacagctctgctggtctccccgtcccctggagaagaacaaggccatgggtcggcccctgctgctgcccctgctgctcctgctgcagccgccagcatttctgcagcctggtggctccacaggatctggtccaagctacctttatggggtcactcaaccaaaacacctctcagcctccatgggtggctctgtggaaatccccttctccttctattacccctgggagttagccatagttcccaacgtgagaatatcctggagacggggccacttccacgggcagtccttctacagcacaaggccgccttccattcacaaggattatgtgaaccggctctttctgaactggacagagggtcaggagagcggcttcctcaggatctcaaacctgcggaaggaggaccagtctgtgtatttctgccgagtcgagctggacacccggagatcagggaggcagcagttgcagtccatcaaggggaccaaactcaccatcacccaggctgtcacaaccaccaccacctggaggcccagcagcacaaccaccatagccggcctcagggtcacagaaagcaaagggcactcagaatcatggcacctaagtctggacactgccatcagggttgcattggctgtcgctgtgctcaaaactgtcattttgggactgctgtgcctcctcctcctgtggtggaggagaaggaaaggtagcagggcgccaagcagtgacttctgaccaacagagtgtggggagaagggatgtgtattagccccggaggacgtgatgtgagacccgcttgtgagtcctccacactcgttccccattggcaagatacatggagagcaccctgaggacctttaaaaggcaaagccgcaaggcagaaggaggctgggtccctgaatcaccgactggaggagagttacctacaagagccttcatccaggagcatccacactgcaatgatataggaatgaggtctgaactccactgaattaaaccactggcatttgggggctgtttattatagcagtgcaaagagttcctttatcctccccaaggatggaaaaatacaatttattttgcttaccat

SEQ ID NO: 21457 - DNA, 2661 bp, Homo sapiens
  source 1..2661: mol_type = unassigned DNA
gcgcccctctccgtgtggagcccacctgcatgtactggctccccaacatgcacggcaggagcggcggcccagcactcggcactggccacttgcagacaagaagacaagaaaatgatttgaggacagcttcaatcgcggtgtgaagaagaaagcaacaaaacgaccactgaaaacaatgccggtggcaaaacatccaaagaaagggtcccaagtggtacatcgtcatagctggaaacagtcagagccaccagccaatgatcttttcaatgctgcgaaagctgccaaaagtgacatgcagtgtggccatgaggtctgccggaagtgacttgttggtgttatctcctgagttaaaatgtgaagggatttttttttttcagattactgagagtcttcagttactagatccagacacggggactgcagagaaaggctgtgtgcatccgctgtctactccactgtctcctctgcagaggcggatttccctgactgaagaccatgttgcaggcccacagctgcctacagaaccgtcccaaaatatggcaaagaaacctattctgagcgatagggtctcaccatgttgcccaggctggtcttgaactcctggactcatcctaaagtgctggcctctcattccctgtctgtgcacacctcacggcaagggccagcctgtttcctcccggtcacctccaaatcttgctgcttttaattcaactcagagaagggaatcagccactttgtgctcaccacctctggggaaggtgtgagaggagagaaggaagtggctgtttggctgctgacaacatgaagacttcctgcgatgagaacagaggcacaggtgccggccctgcagcccccagaacccggactggagggggccatggggcgccggaccctggccctgccctgggtgctgctgaccctgcgtgtcactgcagggaccccggaggtgtgagtacaagttcggatggaggccaccgagctctcgtccttcaccatccgttgtgggttcctggagtctggctccatctccctggtgactgtgagcagggggggccccgatggtgctggggggaccacgctggctgtgttgcacccggaacttggcatccagcaatgggcccctgctcgccaggcccgctgggaaacccagagcagcatctctctcatcctggaaggctctggggccagcagcccctgcgccaacaccaccttctgctgcaagtttgcgtccttccctgagggctcctgggaggcctgtgggagcctcccgcccagctcagacccagggctctctgtcccgccgactcctgcccccattctgcgggcagacctggccgggatcttgggggtctcaggagtccttctctttgactgtggctacctccttcatctgctgtgccgacagaagcaccgccctgcccctaggctccagccatcccacaccagctcctaggcactgagagcacgagcatgggcacccagccaggcctcccaggctgctctccacgtcccttatgccactatcaacaccagctgctgcccagctactttggacacagctcacccccgacagggggccgtcctggcatagcgcgctggctaggactccagtaccgtgaagggaggcagtgagagcagacatctgtgcctcattcctgatctcaaggggaaagcaagaacaagggaggcttcctcaggatctcgaacctgcggaaggaggaccagtctgtgtacttctgccaagtccagctggacatacagatcagggaggctgtcgtggcagtccatcaaggggacccacctcaccatcacccaggccctcaggcagcccctccacagggcccctctcctgcctggacagctctgctggtctccccgtcccctggagaagaacaaggccatgggtcggcccctgctgctgcccctgctgctcctgctgcagccgccagcatttctgcagcctggattatgtgaaccggctctttctgaactggacagagggtcaggagagcggcttcctcaggatctcaaacctgcggaaggaggaccagtctgtgtatttctgccgagtcgagctggacacccggagatcagggaggcagcagttgcagtccatcaaggggaccaaactcaccatcacccaggctgtcacaaccaccaccacctggaggcccagcagcacaaccaccatagccggcctcagggtcacagaaagcaaagggcactcagaatcatggcacctaagtctggacactgccatcagggttgcattggctgtcgctgtgctcaaaactgtcattttgggactgctgtgcctcctcctcctgtggtggaggagaaggaaaggtagcagggcgccaagcagtgacttctgaccaacagagtgtggggagaagggatgtgtattagccccggaggacgtgatgtgagacccgcttgtgagtcctccacactcgttccccattggcaagatacatggagagcaccctgaggacctttaaaaggcaaagccgcaaggcagaaggaggctgggtccctgaatcaccgactggaggagagttacctacaagagccttcatccaggagcatccacactgcaatgatataggaatgaggtctgaactccactgaattaaaccactggcatttgggggctgttta

SEQ ID NO: 21458 - DNA, 2314 bp, Homo sapiens
  source 1..2314: mol_type = unassigned DNA
cacctctggggaaggtgtgagaggagagaaggaagtggctgtttggctgctgacaacatgaagacttcctgcgatgagaacagaggcacaggtgccggccctgcagcccccagaacccggactggagggggccatggggcgccggaccctggccctgccctgggtgctgctgaccctgcgtgtcactgcagggaccccggaggtgtgagtacaagttcggatggaggccaccgagctctcgtccttcaccatccgttgtgggttcctggagtctggctccatctccctggtgactgtgagcagggggggccccgatggtgctggggggaccacgctggctgtgttgcacccggaacttggcatccagcaatgggcccctgctcgccaggcccgctgggaaacccagagcagcatctctctcatcctggaaggctctggggccagcagcccctgcgccaacaccaccttctgctgcaagtttgcgtccttccctgagggctcctgggaggcctgtgggagcctcccgcccagctcagacccaggtggggccggggtgaggggtccaggagggcagggaggggctcgggaactggccatccatctgattcttgcctctgtgcccagggctctctgtcccgccgactcctgcccccattctgcgggcagacctggccgggatcttgggggtctcaggagtccttctctttgactgtggctacctccttcatctgctgtgccgacagaagcaccgccctgcccctaggctccagccatcccacaccagctcctaggcactgagagcacgagcatgggcatagcgcgctggctaggactccagtaccgtgaagggaggcagtgagagcagacatctgtgcctcattcctgatctcaaggggaaagcaagaacaagacctgtgaagggaaggagggtggatcggcctgactggccctgggaagcacagaggagcctactgggaccagggaagagactgacaagagaagggaggcctgtccctgcctgcttctgtctcaagaagattgttatcacttcctctggtgaaatcctgccttcctgtccccacggcccctcagctgatgccaccttactctggagaggatgggcagagcctcctatggagggagccctgtgggtcaccaaagctccagtgaccacccccgggcaaagacctgcagatcccctgttagagacgggcccaggactttgtgcggggtgcccactgttgctctgagccttcacttcctcagggaggcttcctcaggatctcgaacctgcggaaggaggaccagtctgtgtacttctgccaagtccagctggacatacagatcagggaggctgtcgtggcagtccatcaaggggacccacctcaccatcacccaggccctcaggcagcccctccacagggcccctctcctgcctggacagctctgctggtctccccgtcccctggagaagaacaaggccatgggtcggcccctgctgctgcccctgctgctcctgctgcagccgccagcatttctgcagcctggattatgtgaaccggctctttctgaactggacagagggtcaggagagcggcttcctcaggatctcaaacctgcggaaggaggaccagtctgtgtatttctgccgagtcgagctggacacccggagatcagggaggcagcagttgcagtccatcaaggggaccaaactcaccatcacccaggctgtcacaaccaccaccacctggaggcccagcagcacaaccaccatagccggcctcagggtcacagaaagcaaagggcactcagaatcatggcacctaagtctggacactgccatcagggttgcattggctgtcgctgtgctcaaaactgtcattttgggactgctgtgcctcctcctcctgtggtggaggagaaggaaaggtagcagggcgccaagcagtgacttctgaccaacagagtgtggggagaagggatgtgtattagccccggaggacgtgatgtgagacccgcttgtgagtcctccacactcgttccccattggcaagatacatggagagcaccctgaggacctttaaaaggcaaagccgcaaggcagaaggaggctgggtccctgaatcaccgactggaggagagttacctacaagagccttcatccaggagcatccacactgcaatgatataggaatgaggtctgaactccactgaattaaaccactggcatttgggggctgtttattatagcagtgcaaagagttcctttatcctccccaaggatggaaaaatacaatttattttgcttaccata

SEQ ID NO: 21459 - DNA, 2099 bp, Homo sapiens
  source 1..2099: mol_type = unassigned DNA
tgagttctcacccacctgtgccgccctgccttgttacctggaagcacagccttggggactgagcaggccctcactgtcactttaagaagggaatcagccactttgtgctcaccacctctggggaaggtgtgagaggagagaaggaagtggctgtttggctgctgacaacatgaagacttcctgcgatgagaacagaggcacaggtgccggccctgcagcccccagaacccggactggagggggccatggggcgccggaccctggccctgccctgggtgctgctgaccctgcgtgtcactgcagggaccccggaggtgtgagtacaagttcggatggaggccaccgagctctcgtccttcaccatccgttgtgggttcctggagtctggctccatctccctggtgactgtgagcagggggggccccgatggtgctggggggaccacgctggctgtgttgcacccggaacttggcatccagcaatgggcccctgctcgccaggcccgctgggaaacccagagcagcatctctctcatcctggaaggctctggggccagcagcccctgcgccaacaccaccttctgctgcaagtttgcgtccttccctgagggctcctgggaggcctgtgggagcctcccgcccagctcagacccagggctctctgtcccgccgactcctgcccccattctgcgggcagacctggccgggatcttgggggtctcaggagtccttctctttgactgtggctacctccttcatctgctgtgccgacagaagcaccgccctgcccctaggctccagccatcccacaccagctcctaggcactgagagcacgagcatggggaggcttcctcaggatctcgaacctgcggaaggaggaccagtctgtgtacttctgccaagtccagctggacatacagatcagggaggctgtcgtggcagtccatcaaggggacccacctcaccatcacccaggccctcaggcagcccctccacagggcccctctcctgcctggacagctctgctggtctccccgtcccctggagaagaacaaggccatgggtcggcccctgctgctgcccctgctgctcctgctgcagccgccagcatttctgcagcctggtggctccacaggatctggtccaagctacctttatggggtcactcaaccaaaacacctctcagcctccatgggtggctctgtggaaatccccttctccttctattacccctgggagttagccatagttcccaacgtgagaatatcctggagacggggccacttccacgggcagtccttctacagcacaaggccgccttccattcacaaggattatgtgaaccggctctttctgaactggacagagggtcaggagagcggcttcctcaggatctcaaacctgcggaaggaggaccagtctgtgtatttctgccgagtcgagctggacacccggagatcagggaggcagcagttgcagtccatcaaggggaccaaactcaccatcacccaggctgtcacaaccaccaccacctggaggcccagcagcacaaccaccatagccggcctcagggtcacagaaagcaaagggcactcagaatcatggcacctaagtctggacactgccatcagggttgcattggctgtcgctgtgctcaaaactgtcattttgggactgctgtgcctcctcctcctgtggtggaggagaaggaaaggtagcagggcgccaagcagtgacttctgaccaacagagtgtggggagaagggatgtgtattagccccggaggacgtgatgtgagacccgcttgtgagtcctccacactcgttccccattggcaagatacatggagagcaccctgaggacctttaaaaggcaaagccgcaaggcagaaggaggctgggtccctgaatcaccgactggaggagagttacctacaagagccttcatccaggagcatccacactgcaatgatataggaatgaggtctgaactccactgaattaaaccactggcatttgggggctgtttattatagcagtgcaaagagttcctttatcctccccaaggatggaaaaatacaatttattttgcttaccata

SEQ ID NO: 21460 - DNA, 902 bp, Homo sapiens
  source 1..902: mol_type = unassigned DNA
ctgcgggcagacctggccgggatcttgggggtctcaggagtccttctctttgactgtggctacctccttcatctgctgtgccgacagaagcaccgccctgcccctaggctccagccatcccacaccagctcctaggcactgagagcacgagcatggtcgtttcctgctgtgactaagtcagcaacacagttcctctgacatgggccttggctgtgcttctttgggggtgaagagattggggaggaagtctccacccctgggaggcagaagccaggcatagcgcgctggctaggactccagtaccgtgaagggaggcagtgagagcagacatctgtgcctcattcctgatctcaaggggaaagcaagaacaagacctgtgaagggaaggagggtggatcggcctgactggccctgggaagcacagaggagcctactgggaccagggaagagactgacaagagaagggaggcctgtccctgcctgcttctgtctcaagaagattgttatcacttcctctggtgaaatcctgccttcctgtccccacggcccctcagctgatgccaccttactctggagaggatgggcagagcctcctatggagggagccctgtgggtcaccaaagctccagtgaccacccccgggcaaagacctgcagatcccctgttagagacgggcccaggactttgtgcggggtgcccactgttgctctgagccttcacttcctcagggaggcttcctcaggatctcgaacctgcggaaggaggaccagtctgtgtacttctgccaagtccagctggacatacagatcagggaggctgtcgtggcagtccatcaaggggacccacctcaccatcacccaggccctcaggcagcccctccacagggcccctctcctgcctgg

SEQ ID NO: 21461 - DNA, 2074 bp, Homo sapiens
  source 1..2074: mol_type = unassigned DNA
gctcaccacctctggggaaggtgtgagaggagagaaggaagtggctgtttggctgctgacaacatgaagacttcctgcgatgagaacagaggcacaggtgccggccctgcagcccccagaacccggactggagggggccatggggcgccggaccctggccctgccctgggtgctgctgaccctgcgtgtcactgcagggaccccggaggtgtgagtacaagttcggatggaggccaccgagctctcgtccttcaccatccgttgtgggttcctggagtctggctccatctccctggtgactgtgagcagggggggccccgatggtgctggggggaccacgctggctgtgttgcacccggaacttggcatccagcaatgggcccctgctcgccaggcccgctgggaaacccagagcagcatctctctcatcctggaaggctctggggccagcagcccctgcgccaacaccaccttctgctgcaagtttgcgtccttccctgagggctcctgggaggcctgtgggagcctcccgcccagctcagacccagggctctctgtcccgccgactcctgcccccattctgcgggcagacctggccgggatcttgggggtctcaggagtccttctctttgactgtggctacctccttcatctgctgtgccgacagaagcaccgccctgcccctaggctccagccatcccacaccagctcctaggcactgagagcacgagcatgggcacccagccaggcctcccaggctgctctccacgtcccttatgccactatcaacaccagctgctgcccagctactttggacacagctcacccccgacagggggccgtcctggtgggcatcactccccacccacaccgcacactggccccagggccctgctgcctgggcctccacatccatccctgcacatggcagctttgtctctgttgagaatggactctacgcttaggctgggcagaggcctccctgcactggtcctggcctcactcttttccctgacccttggggcccagggccatggagggacccttaggagttcaatgagagagaccatgaggccactgggctttccccttcccaggcctcctgggtgccacccccttacgttattcttgggcctctaataagtgtcccacaggtgcctggccaggcccacctgctgcagatgtggtctgtgtgtgtgcatgtgtgggtgtgtgtgggcacaggtgtgagtgtgtgagcaacagtaccccattccagtcgtttcctgctgtgactaagtcagcaacacagttcctctgacatgggccttggctgtgcttctttgggggtgaagagattggggaggaagtctccacccctgggaggcagaagccaggcatagcgcgctggctaggactccagtaccgtgaagggaggcagtgagagcagacatctgtgcctcattcctgatctcaaggggaaagcaagaacaagggaggcttcctcaggatctcgaacctgcggaaggaggaccagtctgtgtacttctgccaagtccagctggacatacagatcagggaggctgtcgtggcagtccatcaaggggacccacctcaccatcacccaggccctcaggcagcccctccacagggcccctctcctgcctggacagctctgctggtctccccgtcccctggagaagaacaaggccatgggtcggcccctgctgctgcccctgctgctcctgctgcagccgccagcatttctgcagcctggtggctccacaggatctggtccaagctacctttatggggtcactcaaccaaaacacctctcagcctccatgggtggctctgtggaaatccccttctccttctattacccctgggagttagccatagttcccaacgtgagaatatcctggagacggggccacttccacgggcagtccttctacagcacaaggccgccttccattcacaaggattatgtgaaccggctctttctgaactggacagagggtcaggagagcggcttcctcaggatctcaaacctgcggaaggaggaccagtctgtgtatttctgccgagtcga

SEQ ID NO: 21462 - DNA, 4284 bp, Homo sapiens
  source 1..4284: mol_type = unassigned DNA
tttttaatattgtattttactgtggattatctctttggaccgcgccggacttggcctcaggaaatcaaccaatgctgcggaaggcggctggtgcacaacgctctgctctacagaagggggtcccccaccctcttttccaattttttttttttggccttcctctccttccctccctcttcctccctctctctctctctctctccactacccccctctttcttccccactcggctcctctcccccctcgcgcccacagcgtttggtgttgattcgagcgggaagaggggggtgggtgggatcggtgggggagaccatgacctccagctacgggcacgttctggagcggcaaccggcgctgggcggccgcttggacagcccgggcaacctcgacaccctgcaggcgaaaaagaacttctccgtcagtcacctgctagacctggaggaagccggggacatggtggcggcacaggcggatgagaacgtgggcgaggctggccggagcctgctggagtcgccgggactcaccagcggcagcgacaccccgcagcaggacaatgaccagctgaactcagaagaaaaaaagaagagaaagcagcgaaggaataggacaaccttcaatagcagccagctgcaggctttggagcgtgtctttgagcggacacactatcctgatgcttttgtgcgagaagaccttgcccgccgggtgaacctcaccgaggcgagagtgcaggtgtggtttcagaaccgaagagccaagttccgcaggaatgagagagccatgctagccaataaaaacgcttccctcctcaaatcctactcaggagacgtgactgctgtggagcagcccatcgtacctcgtcctgctccgagacccaccgattatctctcctgggggacagcgtctccgtacagcgccatggctacttattctgccacatgtgccaacaatagccctgcacagggcatcaacatggccaacagcattgccaacctgagactgaaggccaaggaatatagtttacagaggaaccaggtgccaacagtcaactgaggaaaaaaaataattaaacaggcctaagaagaaatcaaaaaccataagacacctatcctgctctgttatttcttcatctgctggggggaaaaagtaaattacaaacaaacaaacaaagcagaactaaaatattgggaccatggcagagaaaagcaggagaggagcaaaatgaaaattagttaacaaatgttcctcctccctctgggataccaccaccacttgtttctgtgtgtgtttattttgtttttctttcattcatgctttgcttaatgtactccaggcttcttcagataggttcagcccacccacccccatgattgtatgaagttttaaaaaaaactacagcagccaaagaaactatatatatatatatatatatatatatccagaatgattgcctctactgtcctcattgacttgtttgaaccttagtgccttaccctgtcctcttcccagttctctttatagaagctctaggagctttcgaaaagccaaagtctttctgaagaatctgtgctggacagacataattccctttctcattgtctccatctttgttggtcatggtaaggtttttccatcagcctctgaaaaaatagttgtgcacaacatctgctcactggactgtctgatccaatgtaattggctgcgtctggctaattctaagcactaaagtctacatctaagctatagatttaagcttgaagctacagattatatcactatcaccaccacccctcaccctatgcaatcaatcaatcaatcatcttaagttaaagatatttgttgtctttgaatgatttgctgtcacagactatttggtagaagaaatatttttcacctgagagaggaagagaaatttctctagtaacacaaagagtgagttctaaaaggcatgcccacatctctttcgtgccttaaggatagtgagatgcacacttatatatatactgtatatatttatatatttatatatatatttcatatatatatataatattgcaagcttaagtttgcaatttcccaaacaatacaaaaagcaaattacacaccctcaccactgttcttatctctatagtgatgaaacattaattagggatcttgctgcttttctttttctacacgaagttttcattaaagccacagaataattgatagggcagctgtttgagaacaggtcccattttcacattagggctttaaatgaattagaaactatttgaggctataaaaatgtccttgagtttggagcctgagctctggtgaaatgctgatacatctgatctatcatgggaattgcagttagagagagtaaggaataccatttagtcatctatccgttcttcacttagcaggaatatgaaagaaaggcacatgtttaagaggaatacctaaaggtttttctaaattccaacatttaaaaggcaattgtgggctatttttattttttaatattttgaaataaagtttagtgtctagggctgggagccaggactgatcttccatttctttttctttgttcccagccatgcttttgtaacttgccaggtggacttgaccaactacattaccatgctgtgcctcagtttacccatttgtaaaatgggattaataatacttacctacctcacaggggtgttgtgaggctctattcatttgctcctttattctttcctgtattctctgtatgtccagcactttgtagccatgggaggaaagggactataaaagtgtacaatgttaatggaatgatacggtacctgaaagccttgttttctagtaagaaaatgctaccttgctgtacatacttataaccttgtatttggaaatgagaaataggtttatattttcagatctctcaaaaatcacatcatttgaccaaagaataatttaagacacatagaacagatttttttaatttatattttcatcctgaccagcttagttctaataatttttagttgtgagtgattaaaaaactttggatcaattttggtcaaacatgccaactttgtagtctgagtgacaggcaaggatttttgggtttaagatgcacttttagcacacatttgtatttcccttggcatatcagattgagctaatggtgatgttatttcaatctaacagccaccaatctgaaattgtatttcaaatgttgattctgtagttctttaaataataatgaagctcatcttatacattttgctttcaccaattgattccttcttcttttagcccactattaaaacatttcttactgaatggttcatgtaggcttgctgaacagcacgcattacttgcttcctgaagagttcccccattcatccatttgtcccattagttgctgtggattatcaagttttgaaggaactgtacatcccaacagactgaaacattctaagtgaaatgagtataatccaagtaactggtgaactttggaggtttggagcttgaagagaatggctaagaagatttgaattatagggagggaacagaaatcatacatgaaaaggttttactgagaaggggaaaaccttagatagagggacatgtgaaacaaaatcatttgaaattttgattcagacatccatttccagtggcaaacagcaaagcctgaacccataaacccaaatgataggtgaagttgggtggttttatccaatgtctcaagcaagcaatgtctgggaatatcatagagtaacaagtgctggtcagccaaagaaacattcactgctggtgaaccaataccataagcatgtattatctaagcacttgatcaagaaatatacatgttgtacaagctctcaattttgttcatttattatcaaatttttaaaatacaagtttggtatgtgatttggaaaagatgccttctggatcttaagccagttgtcagtggaggtcctcagggctgcaaatgtcaagacataaccctgttcctcaccatcatgataccagatacaggtgaatacataggaactatctgcctgtgtcctcaatctcccttcaaacaagatgctgatttgtagggtacttggcaggttaaattaaaccagaagaggtgacttaataaaaaagggaatgacatttagggtataaagatctcataagaaatgtaatatgtaaattatatcttgctttatgttgtaaaatatacattgtttgcgctagaatagaaatgatttcttttcaataaaaagaaagaaggactctaccatgtcttttgttatata

SEQ ID NO: 21463 - DNA, 2217 bp, Homo sapiens
  source 1..2217: mol_type = unassigned DNA
gatgttggcaaagggggttttcttaatcagactgttttttggtcccagggaaaggaggaagaaggagattgtgatggagaaagggggtctgtgaaacgtcaggcacagcacaaaggctttgccacgtaattacaggctcctattaagtcgagatctgccctcccaggggtctccaattttcttgtattccctacaaagcctcctctgcatgccagtttgtgccttttgaagtgccagagagcttcttgatccaactgagaaggaaaaaggagcccagcaagaagagggggagagagagaaggggaaaggggggaacccaccagcaccctccgtcggactcttgaagccttttttttttaattcttaatttttttttttactctttacaaaaagtaaagtgagaatcctgctctctaatacatctgcaagacatcaccctctcctcctgaaactttagtcactcctgagaatccacaggagtgcagagaggggggaacacgttttcttgaagatgttttaaagctggaacaagccttcttctgttggtgcttgaactcttgcctgggaataacttttttaacctttaaaaaaaccattcactttgattcttctctcccaccccttcttctctcttcttctgtttgcctaactcccccgccctgctggcctccgctttcctctctcccccttgttattatttttagtctgtgcgtgtggacacttttggagagttggaagggatttttttctcctgacttgaacatagggtgactttttaatattgtattttactgtggattatctctttggaccgcgccggacttggcctcaggaaatcaaccaatgctgcggaaggcggctggtgcacaacgctctgctctacagaagggggtcccccaccctcttttccaattttttttttttggccttcctctccttccctccctcttcctccctctctctctctctctctccactacccccctctttcttccccactcggctcctctcccccctcgcgcccacagcgtttggtgttgattcgagcgggaagaggggggtgggtgggatcggtgggggagaccatgacctccagctacgggcacgttctggagcggcaaccggcgctgggcggccgcttggacagcccgggcaacctcgacaccctgcaggcgaaaaagaacttctccgtcagtcacctgctagacctggaggaagccggggacatggtggcggcacaggcggatgagaacgtgggcgaggctggccggagcctgctggagtcgccgggactcaccagcggcagcgacaccccgcagcaggacaatgaccagctgaactcagaagaaaaaaagaagagaaagcagcgaaggaataggacaaccttcaatagcagccagctgcaggctttggagcgtgtctttgagcggacacactatcctgatgcttttgtgcgagaagaccttgcccgccgggtgaacctcaccgaggcgagagtgcaggtgtggtttcagaaccgaagagccaagttccgcaggaatgagagagccatgctagccaataaaaacgcttccctcctcaaatcctactcaggagacgtgactgctgtggagcagcccatcgtacctcgtcctgctccgagacccaccgattatctctcctgggggacagcgtctccgtacagatcctcgtccctcccaagatgttgtttacacgaggggcttcataacggattctaacggaagacactgaaaagcgccatggctacttattctgccacatgtgccaacaatagccctgcacagggcatcaacatggccaacagcattgccaacctgagactgaaggccaaggaatatagtttacagaggaaccaggtgccaacagtcaactgaggaaaaaaaataattaaacaggcctaagaagaaatcaaaaaccataagacacctatcctgctctgttatttcttcatctgctggggggaaaaagtaaattacaaacaaacaaacaaagcagaactaaaatattgggaccatggcagagaaaagcaggagaggagcaaaatgaaaattagttaacaaatgttcctcctccctctgggataccaccaccacttgtttctgtgtgtgtttattttgtttttctttcattcatgctttgcttaatgtactccaggcttcttcagataggttcagcccacccacccccatgattgta

SEQ ID NO: 21464 - DNA, 1233 bp, Homo sapiens
  source 1..1233: mol_type = unassigned DNA
cgcagcgcgtgcaccagcggctccggagcgagcggccgtggctgagaaggggagggcggaaagtttgtttccccgacgtcagcgccgggcgggccgcgaggctaggaggcggcgggagctgggcagagcgcggggcggccggggctctcgctccgacccgcgcccgcgacccttcctgggacccgagcccgagacccccgccggcccccccggggccgctcgcgggcatggacagcgcggccgccgccttcgccctggacaagccggcgctgggcccggggccgccgccgcctccacccgcgctggggcccggcgactgcgcccaggcgcgcaagaacttctcggtgagccacctcctggacctggaagaggtggcggcggccgggcggctggcggcgcgccccggggccagggccgaggcgcgggagggcgcagcacgggagccgtccgggggcagcagcggcagcgaggcggcgccgcaggatggtgagtgtcccagcccggggcgcggtagcgccgccaagcggaagaagaagcagcggcggaaccgcaccacgttcaacagcagccaactgcaggcgctggagcgcgtgttcgagcgcacgcactaccccgacgcctttgtgcgcgaggagcttgcccggcgcgtcaacctcagcgaggcgcgcgttcaggtctggtttcagaaccgccgcgccaagttccgcaggaatgaaagggccatgctggccagccgctctgcctcgctgctcaagtcctacagccaggaggccgccatcgagcagcccgtggctccccggcccaccgccctgagtccagattatctctcctggacagcctcgtccccctacagcacagtgccaccctacagccctgggagctcaggccccgcaaccccaggggtcaacatggccaacagcatcgccagcctccgtctcaaggccaaggagttcagcctgcaccacagccaggtgcctacggtgaactgaagtccagtcccaccaggacccagacgcctccctgggtggacagcaatagaaaagggggcagacgcccaggaagtgaccttctcctggatgagctctcctggcccgtctgtccagcctggactcccgagcccacgaggctgttgaggcccctgcagccgggcccagctcttctgtccttggccaccagagactgcagcccacaacccttggaggggttgggccggaaggtggaagagcctgccaa

SEQ ID NO: 21465 - DNA, 1699 bp, Homo sapiens
  source 1..1699: mol_type = unassigned DNA
acttgcgttgcacccgggctgagtgcggccgcgacggggcgggcggactctcgggcgctcagagctggcctcgggtcctcggagcctggcgctcgaacctcccttccgacctccacccggaccccgaccccgacccggcctggcccggcccccgcccccgccccccgggccgatggactactcctacctcaattcgtacgactcgtgcgtggcggccatggaggcgtccgcctacggcgactttggcgcctgcagccagcccggcggcttccaatacagccccctgcggcccgctttccccgcggcagggccgccctgccccgcgctcggctcctccaactgcgcacttggcgccctacgcgaccaccagcccgcgccctactcggcagtgccctacaagttcttcccagagccatccggcctgcacgagaagcgcaagcagcggcgcatccgcaccacgttcaccagcgcgcagctcaaggagctggagcgcgttttcgctgagacccactaccccgacatttacacgcgtgaggagctggcgctcaagatcgacctcactgaggctcgcgtgcaggtctggttccagaaccgccgggccaagttccgcaaacaggagcgcgcggccagcgccaagggcgcggcgggcgcggcgggcgccaaaaagggcgaggcgcgctgctcctccgaggacgacgattccaaggagtccacgtgcagccccacgcccgatagcaccgcctcgctgccgccgccgcctgcgcccggcctggccagcccgcgcctgagccccagcccgctgcccgtcgcactgggctccgggccgggacctgggccggggccacagccgctcaagggcgcactgtgggccggtgtggcgggcggtgggggcggcgggcctggcgcgggagcggccgaactacttaaggcttggcagccggcggagtccggccccgggcccttctccggggttctgtcctcctttcaccggaagcccggccccgccctgaagaccaatctcttctagctgccggcctctggaggctccgagcctgcccccagagacgtccctgcccctccaggacctgacagcccctcccatcctggccacccgcctggaagtccccatccgtctccactccctactgtctcacccctcggtgtgtcctccccaactttggagaccaagtcagggccactctcgtcctcacccaccctctaccagcagagcggagttctttataccgggacctcctccaggagaaccccggagctccttctagcttggccttctttggatgcggtatcacatgaggcctgtccctaacagtgccctcaaagtgaaggtcctcaaggaggatcggcacagcccccttccctggctctgcagcggctgggtcaccccttacgctggtgatcaggaaagcccgctgccccacccctcgggcccacccgtacagaggctggtggtcgccgggataattaatgaccaccgccaattcatccctcacgtgtctcctctcttccctagcccgtctggcacagagggtggacctgttagaggagtggaggggctgcctggggaatgggacagagggattctctttccctaatttttttggttgtcctttttctttgaaaaacttgtaatttattgaagttttactcaatccaaataaaacttaatttattgaagaca

SEQ ID NO: 21466 - DNA, 3030 bp, Homo sapiens
  source 1..3030: mol_type = unassigned DNA
ttaaattctaattagagatgcaggaatcaatgatagggaggttggacagctcagttccccagtgccagcccaatagacggatgagttattgtcatgtaaaaagcgccagcaataagaccaaccgctttgctattgtccaagtggaaagagccaagtttattatgaggactatatgctctagagacctcagacaaggcatctcataggaggctttttcataaaactaggctctgctggtagtaaggaggccagtttggaggcaggcgttgagctgtgcacatctccccactccagccaccttctccatatccatcttttatttcatttttccacttggctgagccatccagaaccttttcaatgtataaaatggaatattcttacctcaattcctctgcctacgagtcctgtatggctgggatggacacctcgagcctggcttcagcctatgctgacttcagttcctgcagccaggccagtggcttccagtataacccgataaggaccacttttggggccacgtccggctgcccttccctcacgccgggatcctgcagcctgggcaccctcagggaccaccagagcagtccgtacgccgcagttccttacaaactcttcacggaccacggcggcctcaacgagaagcgcaagcagcggcgcatccgcaccactttcaccagtgcccagctcaaagagctggaaagggtcttcgcggagactcactaccccgacatctacactcgggaggagctggccctgaagatcgacctcacagaggcgcgagtccaggtgtggttccagaaccgccgcgccaagtttcgcaagcaggagcgcgcagcggcagccgcagcggccgcggccaagaacggctcctcgggcaaaaagtctgactcttccagggacgacgagagcaaagaggccaagagcactgacccggacagcactgggggcccaggtcccaatcccaaccccacccccagctgcggggcgaatggaggcggcggcggcgggcccagcccggctggagctccgggggcggcggggcccgggggcccgggaggcgaacccggcaagggcggcgcagcagcagcggcggcggccgcggcagcggcggcggcggcagcggcagcggcggcagctggaggcctggctgcggctgggggccctggacaaggctgggctcccggccccggccccatcacctccatcccggattcgcttgggggtcccttcgccagcgtcctatcttcgctccaaagacccaacggtgccaaagccgccttagtgaagagcagtatgttctgatctggaatcctgcggcggcggcggcggcggcgacagcgggcgagccagggcccgggcgggcgagtgggcgagcgggtaggcccaaggctattgtcgtcgctgctgccatggctttttcattgagggcctaaagtaatcgcgctaagaataaagggaaaacggcgtcgccctcatttcaaccccactcctacccccttcctcaacccccaaacaaaacaaacaaacttccctggcttcgcacctgcctggggcctcgcagcggggccagggctccgcctgctgatcgggggttgtgagcagcgcggcctggacgcggggcactctcagggggctgtgtctgcgtgtcagtttgtgtctgtctcggggaatgtgtgtctgtggcccaagcaggtgacaggaagagatggggggcctcaaccaacttagtgacttgtttagaaaaaaaagacaaaaaagtaaaaataaaaacaaaaaagttggaaggcagaaaccattaaaaaacaaaaagccaacaacccagaaaggtttaaaaaacataaggaaaaaaaagacaaattaaaggaggggctaggggagaagctgcagctggagctgaaggctcgatcttgtgaacccctaaatccgctccctcctaacagcacggattctcttggggctcttcttcagggaagagtagggacgccgttccagccccccttcctatcgtgtccttgggttcgggtcactgcggcgacgacttgctcagactgtcccggcggccggagtgactttctcgcacccccttgcctgtcccacctcgctgaacaccatcccgccattagcgcatcggaaccccacacagttgcaactcccaaccccgaatctttgcagccgttcggccctgaaagatgccctatccatgagatgccttttcatctgcaaactctgcaaaatgtgtctcatgtttcgcaactctttttttccccctcgctcccgcctaccccgtcggcattttcttcttccaccagcttttactgaactttttggcactgctttggattggggtcaattgcagtccacgtaactggctgcagagaaatctaccgagcaaggaaaaggcacacacacacgtttgcaggggtgtctcggtttgcatttctgttggaatgatccgaactggactcacatcctgtatggtggatggactgtatattgagggttccattcttcgcgcagtttagacatctctgttttgattctttgttgttgtttttattttaaaaggcacaaactctagatattagttgaatgttgaggctttaactttttcggtgtctttctacaactgtgttctgtgactcaattgtatcgtgttaatatcagtgcagactgtctcctctacgtgaccgtataatgtttttctcttcttgtagtctctatggcgtgtctttatggtgtaataaggttctcacgggttcaatcttttgtgtttagagaggccacggttcagacaatggtatatatttttgttatcaggtgcatgtctgtctgatttctttttttttcctgttggactatgtttgtgaacataattgtcataagttatgtttcagatttttgaatttatttatatgtgttataatgaatgcttctatttaaaagggaaatatttctacatgtgcatatagttttccaagagtgtaccattaacttgattgttgataataaaaacaaaaagcaagtcta

SEQ ID NO: 21467 - DNA, 3216 bp, Homo sapiens
  source 1..3216: mol_type = unassigned DNA
cccaggcccaccccacccagcacccctggcgcagggactgctggaacctggctgtgcgcgctgtcgctttaagacagactctgccggcgccgtccggagccttagaaaccggccccggatcgcgagccggagccggagccggagccggggccggccgggctgctgaggcccgagcggcaggagcgcagcgcggagcgctgagccaggcgcccagtcgcgagaagctgccgccgcctctgcccgcccggcgccgcagccccgggcggtccatggggcgggcacggcgtcgctgcaggcgccggcagccctggagggcagccgcttaggcgctgcgctcttgtccccgcaggtcgcagccagggcggcggggcgcgcccagccccggcccctggagcgcccgccgcggtccccacctccatggacgccttcaaggggggcatgagcctggagcggctgccggaggggctccggccgccgccgccgccaccccatgacatggggcccgccttccacctggcccggcccgccgacccccgcgagccgctcgagaactccgccagcgagtcgtctgacacggagctgccagagaaggagcgcggcggggaacccaaggggcccgaggacagtggtgcgggaggcacgggctgcggcggcgcagacgacccagccaagaagaagaagcagcggcggcaacgtacgcacttcacaagccagcagttgcaagagctagaggccacgttccagaggaaccgctaccccgacatgagcatgagggaggagatcgccgtgtggaccaacctcaccgagccgcgcgtgcgggtctggttcaagaaccggcgagccaagtggcgtaagcgcgagcgtaaccagcagctggacctgtgcaagggtggctacgtgccgcagttcagcggcctagtgcagccctacgaggacgtgtacgccgccggctactcctacaacaactgggccgccaagagcctggcgccagcgccgctctccaccaagagcttcaccttcttcaactccatgagcccgctgtcgtcgcagtccatgttctcagcacccagctccatctcctccatgaccatgccgtccagcatgggcccaggcgccgtgcctggcatgcccaactcgggcctcaacaacatcaacaacctcaccggctcctcgctcaactcggccatgtcgccgggcgcttgcccgtacggcactcccgcctcgccctacagcgtctaccgggacacgtgcaactcgagcctagccagcctgcggctcaagtccaaacagcactcgtcgtttggctacggcggcctgcagggcccggcctcgggcctcaacgcgtgccagtacaacagctgaccgccccgccgcaccacgcgggccggcggccggagcggggaagggcgcgggcgcgggcgcggaggacgcacgcggggccccggctcgcaagccccagctcaccgcgccgcggacctcacacctgcgcagccccctcctcccacttcccactccgggttggttttgtgtttgcttttccggaccccactctgccctccaaaaagacaaaaaaaaaaaaaaaaaaaaaaaagcaaaaagacgtcggagaaaagtgccgcgaaaaaatggatgagttgcaatttctctcgggatggcgcgggtggtgtgtgtgttcccacgggccccggaggcccactccgcggagggcacgcggcgcggtaggcgagcgccgaggcccagcggccgggggaggacgacctcgtatcccgcgtccccgccgcgctggatccggactgagtggccgggcctgcggactggatgtgcggggcctggacttgcctaggatttcccgaccccgtacaaaccaagttgccctctccgagctaggcccggccgagagcgccttagctcgagtcggatccgtgttggggcgggcgttgggtttggggggacggtgcccccagcccaggatcgggcactcagtggagccgcacacggccccggcgcgcctggtagagcctcgctggccccgcgccccggagccctatattaaggccacggagcgacagcgggcagtgcgggcctggcgggaggtgggggaggtccatctcagaacaccccagccttgagcttagctgcaggcccaggccctctgctctgctcccgggctaggaggtggccctctgtctgggcgaacagccccctcctcaccgcccgccgtgcaagagtcgagccggcagagcaaggggcgcggccccagggccctgcgcccactttgcacacccgctctccggcccgcgcccctgtttacagcgtccctgtgtatgttggactgactgtaataaatctgtctatatcgacttgtccatgtacgtctattaaaaccatagtccgagcgtgctaagcactgctgagccccgactgcttcattgggctgaggagggaggcggatagaaagggaactgtgggtagaaagggaaccgggccccttgggtaggagcagagcgccgaggcagcccccgccgaggtctgcctaccccgcttccccaccaccattcttgacctgctcagcctggctcccatgagggcaccgtcctgcgttgcgagcctgtccggtgcgcacccgctaagctgtgcctctcggcgttgtccgcgggacgccttagcgagaaccccctccctccgcggctgcgggactctacgggtttcttcccaggccgggtctgcggtgaccctcgaggccccagggtgctatggggcccttgcctgccaggagcgttcgggcaggggctgctgagagcctctttatgcctggggttgccttttcttctgtgggcccagcaacagcccctcttctctcctcggagccagggccaggctattccaggaggactgagggggctggatctatcagagtatagcgagggcctcccgctgcctttctccctaatgcccgcaacgtgccgagagcccaccgaggggcgtgcggctgtgcaggagaaagtgtccgtcacacaggactcacttctcacttccaatccatcccaacttgtggggactgctggccgcctccgccctcccctggcttttggaaactactgaacaagaccagcctgtaaactgcctgtaaaattctgcttcccttaagtaagtcatttctaatggcaaaacaaaatgtttgcagctgcagtgggggaggaaggaggggttgatatt

SEQ ID NO: 21468 - DNA, 666 bp, Homo sapiens
  source 1..666: mol_type = unassigned DNA
ccgctgggagctgccggaacgggccccgggctctgcccccgccccggcgctggctcgaaggcgcccgctcggtgcgatcctgttcggcaaacattcactcatcctgggctgttctcgccagggctggggacttcgaggcggccgagacgggagttgattctaggcgaaacaagtcatttgaggcctgaggtgtgcacgagccgcccgggactcgcaggccagatgcgtttcttttgtgaggccgagggagaactcggtcgcagccagggcggcggggcgcgcccagccccggcccctggagcgcccgccgcggtccccacctccatggacgccttcaaggggggcatgagcctggagcggctgccggaggggctccggccgccgccgccgccaccccatgacatggggcccgccttccacctggcccggcccgccgacccccgcgagccgctcgagaactccgccagcgagtcgtctgacacggagctgccagagaaggagcgcggcggggaacccaaggggcccgaggacagtggtgcgggaggcacgggctgcggcggcgcagacgacccagccaagaagaagaagcagcggcggcaacgtacgcacttcacaagccagcagttgcaagagctagaggccacgttccagaggaaccgctacccc

SEQ ID NO: 21469 - DNA, 1305 bp, Homo sapiens
  source 1..1305: mol_type = unassigned DNA
ctggggacttcgaggcggccgagacgggagttgattctaggcgaaacaagtcatttgaggcctgaggtcgcagccagggcggcggggcgcgcccagccccggcccctggagcgcccgccgcggtccccacctccatggacgccttcaaggggggcatgagcctggagcggctgccggaggggctccggccgccgccgccgccaccccatgacatggggcccgccttccacctggcccggcccgccgacccccgcgagccgctcgagaactccgccagcgagtcgtctgacacggagctgccagagaaggagcgcggcggggaacccaaggggcccgaggacagtggtgcgggaggcacgggctgcggcggcgcagacgacccagccaagaagaagaagcagcggcggcaacgtacgcacttcacaagccagcagttgcaagagctagaggccacgttccagaggaaccgctaccccgacatgagcatgagggaggagatcgccgtgtggaccaacctcaccgagccgcgcgtgcgggtctggttcaagaaccggcgagccaagtggcgtaagcgcgagcgtaaccagcagctggacctgtgcaagggtggctacgtgccgcagttcagcggcctagtgcagccctacgaggacgtgtacgccgccggctactcctacaacaactgggccgccaagagcctggcgccagcgccgctctccaccaagagcttcaccttcttcaactccatgagcccgctgtcgtcgcagtccatgttctcagcacccagctccatctcctccatgaccatgccgtccagcatgggcccaggcgccgtgcctggcatgcccaactcgggcctcaacaacatcaacaacctcaccggctcctcgctcaactcggccatgtcgccgggcgcttgcccgtacggcactcccgcctcgccctacagcgtctaccgggacacgtgcaactcgagcctagccagcctgcggctcaagtccaaacagcactcgtcgtttggctacggcggcctgcagggcccggcctcgggcctcaacgcgtgccagtacaacagctgaccgccccgccgcaccacgcgggccggcggccggagcggggaagggcgcgggcgcgggcgcggaggacgcacgcggggccccggctcgcaagccccagctcaccgcgccgcggacctcacacctgcgcagccccctcctcccacttcccactccgggttggttttgtgtttgcttttccggaccccactctgccctccaaaaagacaaaaaaaaaaaaaaaaaaaaa

SEQ ID NO: 21470 - DNA, 587 bp, Homo sapiens
  source 1..587: mol_type = unassigned DNA
agttcccgggagaagaggctggagaaggaggggcaggcggcccctcgacgaggacaccgctgggagctgccggaacgggccccgggctctgcccccgccccggcgctggctcgaaggcgcccgctcggtcgcagccagggcggcggggcgcgcccagccccggcccctggagcgcccgccgcggtccccacctccatggacgccttcaaggggggcatgagcctggagcggctgccggaggggctccggccgccgccgccgccaccccatgacatggggcccgccttccacctggcccggcccgccgacccccgcgagccgctcgagaactccgccagcgagtcgtctgacacggagctgccagagaaggagcgcggcggggaacccaaggggcccgaggacagtggtgcgggaggcacgggctgcggcggcgcagacgacccagccaagaagaagaagcagcggcggcaacgtacgcacttcacaagccagcagttgcaagagctagaggccacgttccagaggaaccgctaccccgacatgagcatgagggaggagatcgccgtgtggaccaacctcaccgagcc

SEQ ID NO: 21471 - DNA, 2320 bp, Homo sapiens
  source 1..2320: mol_type = unassigned DNA
aagatgttaggccaacagggaagcgcggagccgcagatctggtccgtcgctcgcctgggtgcctggagctgagctgcggcaaggcccggctcctgttcgaccgcccgaggggtgtgcgtgtgcgcgttgcggagggtgcgctcagagggccgcgtcgtggctgcagcggctgctgccgccgcaggggatctaatatcacctacctgtccctgtcactcttgacacttctctgtcagggctgccgcgtggggggggggcgggcagagcgcggtcggcgttagctttccttattggaggggttcttgggggagggagggagagaagaagggggtctttgcccactcttgtttcgctttggagcttggaagcctgctccctaaagacgctctgagtggtgcccttctgcccacatcccatgtcttcgtttgcccgctgactttccgtctccggactttttcgcttgagccttccggaggagacgggggcagcttggcttgagaactcggcgggggttgcgtcccctggctctccccgcagcggggaaactccgcgcctagagcgcgacccggagcgggcagcggcggctacgggggctcggcggggcagtagccaaggactagtagagcgtcgcgctccctcgtccatgaactgcatgaaaggcccgcttcacttggagcaccgagcagcggggaccaagctgtcggccgtctcctcatcttcctgtcaccatccccagccgttagccatggcttcggttctggctcccggtcagccccggtcgctggactcctccaagcacaggctggaggtgcacaccatctccgacacctccagcccggaggccgcagagaaagataaaagccagcaggggaagaatgaggacgtgggcgccgaggacccgtctaagaagaagcggcaaaggcggcagcggactcactttaccagccagcagctccaggagctggaggccactttccagaggaaccgctacccggacatgtccacacgcgaagaaatcgctgtgtggaccaaccttacggaagcccgagtccgggtttggttcaagaatcgtcgggccaaatggagaaagagggagcgcaaccagcaggccgagctatgcaagaatggcttcgggccgcagttcaatgggctcatgcagccctacgacgacatgtacccaggctattcctacaacaactgggccgccaagggccttacatccgcctccctatccaccaagagcttccccttcttcaactctatgaacgtcaaccccctgtcatcacagagcatgttttccccacccaactctatctcgtccatgagcatgtcgtccagcatggtgccctcagcagtgacaggcgtcccgggctccagtctcaacagcctgaataacttgaacaacctgagtagcccgtcgctgaattccgcggtgccgacgcctgcctgtccttacgcgccgccgactcctccgtatgtttatagggacacgtgtaactcgagcctggccagcctgagactgaaagcaaagcagcactccagcttcggctacgccagcgtgcagaacccggcctccaacctgagtgcttgccagtatgcagtggaccggcccgtgtgagccgcacccacagcgccgggatcctaggaccttgccggatggggcaactccgcccttgaaagactgggaattatgctagaaggtcgtgggcactaaagaaagggagagaaagagaagctatatagagaaaaggaaaccactgaatcaaagagagagctcctttgatttcaaagggatgtcctcagtgtctgacatctttcactacaagtatttctaacagttgcaaggacacatacacaaacaaatgtttgactggatatgacattttaacattactataagcttgttattttttaagtttagcattgttaacatttaaatgactgaaaggatgtatatatatcgaaatgtcaaattaattttataaaagcagttgttagtaatatcacaacagtgtttttaaaggttaggctttaaaataaagcatgttatacagaagcgattaggatttttcgcttgcgagcaagggagtgtatatactaaatgccacactgtatgtttctaacatattattattattataaaaaatgtgtgaatatcagttttagaatagtttctctggtggatgcaatgatgtttctgaaactgctatgtacaacctaccctgtgtataacatttcgtacaatattattgttttacttttcagcaaatatgaaacaaatgtgttttatttcatgggagtaaaatatactgcatacaaa

SEQ ID NO: 21472 - DNA, 3359 bp, Homo sapiens
  source 1..3359: mol_type = unassigned DNA
tcagagggatcaatatacaggccctaccacggaaaggcggggaaaaggttcgaatagaaaactgctgcagaagggaagccactgagaggagcaaatgtggacttgagggaaactctctcccccacccccacttctatcccgtgcaatttaataccatcctcgccaggaaccttaacctcgtcattttaaaaaatgagatatccgtgacccagggtgaacttgttgaatgtaggtacagcagaggaaattctagactctatgagcgtctgagccttgtccagtgcaaacccttcgtgaacactgggtcagtgcgtggccgtgcccacctgtgcgccgacactctcagcatgcctggtccacccgccttgacctcgggcgcggtgtcccagctaagctgggcccagcgtcccggccttccccagctgacaagcctagctcgttcgctcccggctgtggccctcccaccctctcccactagctcactccattcttctagatttctcttcactcatcctctcccatccccaccgcgcccacctccactcccgccctctaccggtctctcactttcctccctccgcagtccctctttgctgtgacctctttcctcaactctgcaggcctgaaagaaggtcacacacgcacgctcacacccacactccacacgcctcgtcccaaacaaccccatgaacattgtcctttgttccgtctcttgggccactttccctgtcgcttcctcccagcccgtcctgatttgctccccaaaagtacgtttctgtctccccgctgccctggcgctccccctttgatttattagggctgccgggttggcgcagattgctttttcttctcttccatcccatcctcccttctggtcctcctttccacagtgggagtccgtgctcctgctcctcggttggctcctaagtgccccgccaggtcccctctcctttcgctctcccggctccggctcccgactcttcggcccgctggcatctgcttccctcccctgcctcgtttctcgtcgcccctgctcgctccccccggcgctcgcccgggcgctgtgctcgctcctggatcgccagccgcgcagccgggctcggccggccgcccgcgcgccactgtgcagtggagtttggtggaatctctgctgacgtcacgtcactccccacacggagtaggagcagagggaagagagagggatgagagggagggagaggagagagagtgcgagaccgagcgagaaagctggagaggagcagaaagaaactgccagtggcggctagatttcggaggccccagtgcacccgtggactccttcggaacttggcaccctcaggagccctgcagtcctctcaggcccggctttcgggcgcttgccgtgcagccggaggctcggctcgctggaaatcgccccgggaagcagtgggacgcggagacagcagctctctcccggtagccgaatcactaaatctggagccgccaaactgctacttctgggcccacgggcccacaaggatcgaatcggcagagtccccgcccgcgttctcgctagcgggtgggggaaccgcctggccgtccccaccctggatccccacgccacagcgccgggcagcccctcctgtaggcagcgaccttggccagaggctccccagggcccagctcccttcaggagaggccgagacgcagggaaacgataacggggaatggagaccaactgccgcaaactggtgtcggcgtgtgtgcaattaggcgtgcagccggcggccgttgaatgtctcttctccaaagactccgaaatcaaaaaggtcgagttcacggactctcctgagagccgaaaagaggcagccagcagcaagttcttcccgcggcagcatcctggcgccaatgagaaagataaaagccagcaggggaagaatgaggacgtgggcgccgaggacccgtctaagaagaagcggcaaaggcggcagcggactcactttaccagccagcagctccaggagctggaggccactttccagaggaaccgctacccggacatgtccacacgcgaagaaatcgctgtgtggaccaaccttacggaagcccgagtccgggtttggttcaagaatcgtcgggccaaatggagaaagagggagcgcaaccagcaggccgagctatgcaagaatggcttcgggccgcagttcaatgggctcatgcagccctacgacgacatgtacccaggctattcctacaacaactgggccgccaagggccttacatccgcctccctatccaccaagagcttccccttcttcaactctatgaacgtcaaccccctgtcatcacagagcatgttttccccacccaactctatctcgtccatgagcatgtcgtccagcatggtgccctcagcagtgacaggcgtcccgggctccagtctcaacagcctgaataacttgaacaacctgagtagcccgtcgctgaattccgcggtgccgacgcctgcctgtccttacgcgccgccgactcctccgtatgtttatagggacacgtgtaactcgagcctggccagcctgagactgaaagcaaagcagcactccagcttcggctacgccagcgtgcagaacccggcctccaacctgagtgcttgccagtatgcagtggaccggcccgtgtgagccgcacccacagcgccgggatcctaggaccttgccggatggggcaactccgcccttgaaagactgggaattatgctagaaggtcgtgggcactaaagaaagggagagaaagagaagctatatagagaaaaggaaaccactgaatcaaagagagagctcctttgatttcaaagggatgtcctcagtgtctgacatctttcactacaagtatttctaacagttgcaaggacacatacacaaacaaatgtttgactggatatgacattttaacattactataagcttgttattttttaagtttagcattgttaacatttaaatgactgaaaggatgtatatatatcgaaatgtcaaattaattttataaaagcagttgttagtaatatcacaacagtgtttttaaaggttaggctttaaaataaagcatgttatacagaagcgattaggatttttcgcttgcgagcaagggagtgtatatactaaatgccacactgtatgtttctaacatattattattattataaaaaatgtgtgaatatcagttttagaatagtttctctggtggatgcaatgatgtttctgaaactgctatgtacaacctaccctgtgtataacatttcgtacaatattattgttttacttttcagcaaatatgaaacaaatgtgttttatttcatgggagtaaaatatactgcatac

SEQ ID NO: 21473 - DNA, 2100 bp, Homo sapiens
  source 1..2100: mol_type = unassigned DNA
tgggagtccgtgctcctgctcctcggttggctcctaagtgccccgccaggtcccctctcctttcgctctcccggctccggctcccgactcttcggcccgctggcatctgcttccctcccctgcctcgtttctcgtcgcccctgctcgctccccccggcgctcgcccgggcgctgtgctcgctcctggatcgccagccgcgcagccgggctcggccggccgcccgcgcgccactgtgcagtggagtttggtggaatctctgctgacgtcacgtcactccccacacggagtaggagcagagggaagagagagggatgagagggagggagaggagagagagtgcgagaccgagcgagaaagctggagaggagcagaaagaaactgccagtggcggctagatttcggaggccccagtgcacccgtggactccttcggaacttggcaccctcaggagccctgcagtcctctcaggcccggctttcgggcgcttgccgtgcagccggaggctcggctcgctggaaatcgccccgggaagcagtgggacgcggagacagcagctctctcccggtagccgataacggggaatggagaccaactgccgcaaactggtgtcggcgtgtgtgcaattagagaaagataaaagccagcaggggaagaatgaggacgtgggcgccgaggacccgtctaagaagaagcggcaaaggcggcagcggactcactttaccagccagcagctccaggagctggaggccactttccagaggaaccgctacccggacatgtccacacgcgaagaaatcgctgtgtggaccaaccttacggaagcccgagtccgggtttggttcaagaatcgtcgggccaaatggagaaagagggagcgcaaccagcaggccgagctatgcaagaatggcttcgggccgcagttcaatgggctcatgcagccctacgacgacatgtacccaggctattcctacaacaactgggccgccaagggccttacatccgcctccctatccaccaagagcttccccttcttcaactctatgaacgtcaaccccctgtcatcacagagcatgttttccccacccaactctatctcgtccatgagcatgtcgtccagcatggtgccctcagcagtgacaggcgtcccgggctccagtctcaacagcctgaataacttgaacaacctgagtagcccgtcgctgaattccgcggtgccgacgcctgcctgtccttacgcgccgccgactcctccgtatgtttatagggacacgtgtaactcgagcctggccagcctgagactgaaagcaaagcagcactccagcttcggctacgccagcgtgcagaacccggcctccaacctgagtgcttgccagtatgcagtggaccggcccgtgtgagccgcacccacagcgccgggatcctaggaccttgccggatggggcaactccgcccttgaaagactgggaattatgctagaaggtcgtgggcactaaagaaagggagagaaagagaagctatatagagaaaaggaaaccactgaatcaaagagagagctcctttgatttcaaagggatgtcctcagtgtctgacatctttcactacaagtatttctaacagttgcaaggacacatacacaaacaaatgtttgactggatatgacattttaacattactataagcttgttattttttaagtttagcattgttaacatttaaatgactgaaaggatgtatatatatcgaaatgtcaaattaattttataaaagcagttgttagtaatatcacaacagtgtttttaaaggttaggctttaaaataaagcatgttatacagaagcgattaggatttttcgcttgcgagcaagggagtgtatatactaaatgccacactgtatgtttctaacatattattattattataaaaaatgtgtgaatatcagttttagaatagtttctctggtggatgcaatgatgtttctgaaactgctatgtacaacctaccctgtgtataacatttcgtacaatattattgttttacttttcagcaaatatgaaacaaatgtgttttatttcatgggagtaaaatatactgcatacaaa

SEQ ID NO: 21474 - DNA, 1906 bp, Homo sapiens
  source 1..1906: mol_type = unassigned DNA
agagagtgcgagaccgagcgagaaagctggagaggagcagaaagaaactgccagtggcggctagatttcggaggccccagtgcacccgtggactccttcggaacttggcaccctcaggagccctgcagtcctctcaggcccggctttcgggcgcttgccgtgcagccggaggctcggctcgctggaaatcgccccgggaagcagtgggacgcggagacagcagctctctcccggtagccgataacggggaatggagaccaactgccgcaaactggtgtcggcgtgtgtgcaattaggcgtgcagccggcggccgttgaatgtctcttctccaaagactccgaaatcaaaaaggtcgagttcacggactctcctgagagccgaaaagaggcagccagcagcaagttcttcccgcggcagcatcctggcgccaatgagaaagataaaagccagcaggggaagaatgaggacgtgggcgccgaggacccgtctaagaagaagcggcaaaggcggcagcggactcactttaccagccagcagctccaggagctggaggccactttccagaggaaccgctacccggacatgtccacacgcgaagaaatcgctgtgtggaccaaccttacggaagcccgagtccgggtttggttcaagaatcgtcgggccaaatggagaaagagggagcgcaaccagcaggccgagctatgcaagaatggcttcgggccgcagttcaatgggctcatgcagccctacgacgacatgtacccaggctattcctacaacaactgggccgccaagggccttacatccgcctccctatccaccaagagcttccccttcttcaactctatgaacgtcaaccccctgtcatcacagagcatgttttccccacccaactctatctcgtccatgagcatgtcgtccagcatggtgccctcagcagtgacaggcgtcccgggctccagtctcaacagcctgaataacttgaacaacctgagtagcccgtcgctgaattccgcggtgccgacgcctgcctgtccttacgcgccgccgactcctccgtatgtttatagggacacgtgtaactcgagcctggccagcctgagactgaaagcaaagcagcactccagcttcggctacgccagcgtgcagaacccggcctccaacctgagtgcttgccagtatgcagtggaccggcccgtgtgagccgcacccacagcgccgggatcctaggaccttgccggatggggcaactccgcccttgaaagactgggaattatgctagaaggtcgtgggcactaaagaaagggagagaaagagaagctatatagagaaaaggaaaccactgaatcaaagagagagctcctttgatttcaaagggatgtcctcagtgtctgacatctttcactacaagtatttctaacagttgcaaggacacatacacaaacaaatgtttgactggatatgacattttaacattactataagcttgttattttttaagtttagcattgttaacatttaaatgactgaaaggatgtatatatatcgaaatgtcaaattaattttataaaagcagttgttagtaatatcacaacagtgtttttaaaggttaggctttaaaataaagcatgttatacagaagcgattaggatttttcgcttgcgagcaagggagtgtatatactaaatgccacactgtatgtttctaacatattattattattataaaaaatgtgtgaatatcagttttagaatagtttctctggtggatgcaatgatgtttctgaaactgctatgtacaacctaccctgtgtataacatttcgtacaatattattgttttacttttcagcaaatatgaaacaaatgtgttttatttcatgggagtaaaatatactgcatacaaa

SEQ ID NO: 21475 - DNA, 1085 bp, Homo sapiens
  source 1..1085: mol_type = unassigned DNA
gcagtctgtgtaagttttcatatctctgagtgtgtgcacacagtggagagggtggagcctgccatcctcaaatctgaaaagattgagagatttcagagggcccagatgtgccaaaggtcagagggatcaatatacaggccctaccacggaaaggcggggaaaaggttcgaatagaaaactgctgcagaagggaagccactgagagataacggggaatggagaccaactgccgcaaactggtgtcggcgtgtgtgcaattaggcgtgcagccggcggccgttgaatgtctcttctccaaagactccgaaatcaaaaaggtcgagttcacggactctcctgagagccgaaaagaggcagccagcagcaagttcttcccgcggcagcatcctggcgccaatgagaaagataaaagccagcaggggaagaatgaggacgtgggcgccgaggacccgtctaagaagaagcggcaaaggcggcagcggactcactttaccagccagcagctccaggagctggaggccactttccagaggaaccgctacccggacatgtccacacgcgaagaaatcgctgtgtggaccaaccttacggaagcccgagtccgggtttggttcaagaatcgtcgggccaaatggagaaagagggagcgcaaccagcaggccgagctatgcaagaatggcttcgggccgcagttcaatgggctcatgcagccctacgacgacatgtacccaggctattcctacaacaactgggccgccaagggccttacatccgcctccctatccaccaagagcttccccttcttcaactctatgaacgtcaaccccctgtcatcacagagcatgttttccccacccaactctatctcgtccatgagcatgtcgtccagcatggtgccctcagcagtgacaggcgtcccgggctccagtctcaacagcctgaataacttgaacaacctgagtagcccgtcgctgaattccgcggtgccgacgcctgcctgtccttacgcgccgccgactcctccgtatgtttatagggacacgtgtaactcgagcctggccagcctgagactgaaagcaaagcag

SEQ ID NO: 21476 - DNA, 463 bp, Homo sapiens
  source 1..463: mol_type = unassigned DNA
gtgccaaaggtcagagggatcaatatacaggccctaccacggaaaggcggggaaaaggttcgaatagaaaactgctgcagaagggaagccactgagagataacggggaatggagaccaactgccgcaaactggtgtcggcgtgtgtgcaattagagaaagataaaagccagcaggggaagaatgaggacgtgggcgccgaggacccgtctaagaagaagcggcaaaggcggcagcggactcactttaccagccagcagctccaggagctggaggccactttccagaggaaccgctacccggacatgtccacacgcgaagaaatcgctgtgtggaccaaccttacggaagcccgagtccgggtttggttcaagaatcgtcgggccaaatggagaaagagggagcgcaaccagcaggccgagctatgcaagaatggcttcgggccgcagttcaatgggctcatgc

SEQ ID NO: 21477 - DNA, 1391 bp, Homo sapiens
  source 1..1391: mol_type = unassigned DNA
ggagcgcccgagcggagaggcggcccgggagcaggggggcggcccccactccggccgggtgcccggcccctggcccctgcctgccctctagatcgccgccgcagccgccgctactgggagtctgcctgttgcaggacgcactagccctccctccatggagttcggcctgctcagcgaggcagaggcccggagccctgccctgtcgctgtcagacgctggcactccgcacccccagctcccagagcacggctgcaagggccaggagcacagcgactcagaaaaggcctcggcttcgctgcccggcggctccccagaggacggttcgctgaaaaagaagcagcggcggcagcgcacgcacttcaccagccagcagctacaggagctagaggcgaccttccagaggaaccgctaccccgacatgagcacgcgcgaggagatcgccgtgtggaccaacctcaccgaggcccgcgtgcgggtgtggttcaagaaccggcgcgccaaatggcggaagcgcgagcgcagccagcaggccgagctatgcaaaggcagcttcgcggcgccgctcggggggctggtgccgccctacgaggaggtgtaccccggctactcgtacggcaactggccgcccaaggctcttgccccgccgctcgccgccaagacctttccattcgccttcaactcggtcaacgtggggcctctggcttcgcagcccgtcttctcgccacccagctccatcgccgcctccatggtgccctccgccgcggctgccccgggcaccgtgccagggcctggggccctgcagggcctgggcgggggcccccccgggctggctccggccgccgtgtcctccggggccgtgtcctgcccttatgcctcggccgccgccgccgccgcggctgccgcctcttccccctacgtctatcgggacccgtgtaactcgagcctggccagcctgcggctcaaagccaaacagcacgcctccttcagctaccccgctgtgcacgggccgcccccggcagccaaccttagtccgtgccagtacgccgtggaaaggcccgtatgagcggccccgcccgtagatcatccccgagggcgggggcaacgattcacagcctccgcggactggggtcattttgactggcttgctcccgccccagggtctgaaaggggtgtttgggcagctggggggcaccggctcaggagagggccttcccctcccagccctgaggggtggactaggccctacacacagaccgcgcccctgggactaaagccaggaacagggaccagctccccgggggccaactcacccttggcccatcccgccttctccaggcttcccctccctcgttttcaaagataaatgaaataaacgtgcgcggactgtcgaa

SEQ ID NO: 21478 - DNA, 1187 bp, Homo sapiens
  source 1..1187: mol_type = unassigned DNA
tccatggagttcggcctgctcagcgaggcagaggcccggagccctgccctgtcgctgtcagacgctggcactccgcacccccagctcccagagcacggctgcaagggccaggagcacagcgactcagaaaaggcctcggcttcgctgcccggcggctccccagaggacggttcgctgaaaaagaagcagcggcggcagcgcacgcacttcaccagccagcagctacaggagctagaggcgaccttccagaggaaccgctaccccgacatgagcacgcgcgaggagatcgccgtgtggaccaacctcaccgaggcccgcgtgcgggtgtggttcaagaaccggcgcgccaaatggcggaagcgcgagcgcagccagcaggccgagctatgcaaaggcagcttcgcggcgccgctcggggggctggtgccgccctacgaggaggtgtaccccggctactcgtacggcaactggccgcccaaggctcttgccccgccgctcgccgccaagacctttccattcgccttcaactcggtcaacgtggggcctctggcttcgcagcccgtcttctcgccacccagctccatcgccgcctccatggtgccctccgccgcggctgccccgggcaccgtgccagggcctggggccctgcagggcctgggcgggggcccccccgggctggctccggccgccgtgtcctccggggccgtgtcctgcccttatgcctcggccgccgccgccgccgcggctgccgcctcttccccctacgtctatcgggacccgtgtaactcgagcctggccagcctgcggctcaaagccaaacagcacgcctccttcagctaccccgctgtgcacgggccgcccccggcagccaaccttagtccgtgccagtacgccgtggaaaggcccgtatgagcggccccgcccgtagatcatccccgagggcgggggcccagggtctgaaaggggtgtttgggcagctggggggcaccggctcaggagagggccttcccctcccagccctgaggggtggactaggccctacacacagaccgcgcccctgggactaaagccaggaacagggaccagctccccgggggccaactcacccttggcccatcccgccttctccaggcttcccctccctcgttttcaaagataaatgaaataaacgtgcgcggactgtcgaa

SEQ ID NO: 21479 - DNA, 1800 bp, Homo sapiens
  source 1..1800: mol_type = unassigned DNA
gctggcaccttcctgagatatgcctgcttgcccccgatttttttctccttgcagtgagaacctcctcatgtggcatctttacttattctcttcttggaaaatccatgtgacctccccgcgcttaaagtgtttccacgttacaggcgacttaaaggcagccctggagcctgacgtataattcgagcgccgatgcagaaaggagtcaggtgtttttttttttttttttttggtttccggttctgtcacctccaggctgagccgggctggcggaagaggcacgtgcgctgctgaatggagctggtcgctggttgctacgagcaggtcctctttgggttcgctgtacacccggagcccgaggcttgcggcgaccacgagcaatggactcttgtggctgacttcactcaccatgctcacactgcctccttgtcagcagtagctgtaaatagtcgttttgtggtcactgggagcaaagatgaaacaattcacatttatgacatgaaaaagaagattgagcatggggctctagtgcatcacagtggtacaataacttgcctgaaattctatggcaacaggcatttaatcagtggagcggaagatggactcatctgtatctgggatgcaaagaaatgggaatgcctgaagtcaattaaagctcacaaaggacaggtgaccttcctttctattcacccatctggcaagttggccctgtcggttggtacagataaaactttaagaacgtggaatcttgtagaaggaagatcagcattcataaaaaatataaaacaaaatgctcacatagtagaatggtccccaagaggagagcagtatgtagttatcatacagaataaaatagacatctatcagcttgacactgcatccattagtggcaccatcacaaatgaaaagagaatttcctctgttaaatttctttcagagtctgtccttgcagtggctggagatgaagaagttataaggttttttgactgtgattcactagtgtgcctctgcgaatttaaagctcatgaaaacagggtaaaggacatgttcagttttgaaattccagagcatcatgttattgtttcagcatcgagtgatggtttcatcaaaatgtggaagcttaagcaggataagaaagttcccccatctttactctgtgaaataaacactaatgccaggctgacgtgtcttggagtgtggctagacaaagtggcagacatgaaagaaagccttcctccagctgcagagccttctcctgtaagtaaagaacagtccaaaattggcaaaaaggagcctggtgacacagtgcacaaagaagaaaagcggtcaaaacctaacacaaagaaacgcggtttaacaggtgacagtaagaaagcaacaaaagaaagtggcctgatatcaaccaagaagaggaaaatggtagaaatgttggaaaagaagaggaaaaagaagaaaataaaaacaatgcagtgaatcacagatgtctcctgaaagaactcttttagatgaaatcattctactcaaatgtaccttaattttttttttttccctgagtaaaagcaagaaatttcttcctttggaaaaaatatatatattaaaaaaccacttttagatggttttttttaaaaaaaaaaaaaaaactggtaaaattacttttggcagacagtgttttatgaattatgtatcatgttgatatataatatgttaatgtgtcatgtaatttttactttgtacaaagcaaataaagatctttctcaaaatatactgtaaaataatataaaatattgaacacattctttatca

SEQ ID NO: 21480 - DNA, 3637 bp, Homo sapiens
  source 1..3637: mol_type = unassigned DNA
gccacaacctccattctcccagaaaagaagaaatgctcatctgaaattcatcacctctctggagtcttcaaactgaccaagcattgaaaagaacacagtttcagaaaacagtttccagtgcctctggccttcctactgaaagcagacacagagtgcatgaagaccgttcaaatatgtcagggacctcctcccatgagtccttctatgactccctctcagacatgcaggaagaaagcaagaatactgacttcttcccgggcctttctgctttcctcagccaggaagagataaacaagagtcttgacctggcccggagagccatagccgactccgaaacagaagattttgactcggaaaaggagatctcgcagattttcagtacttctcctgcaagcctctgtgaacatccttcccataaggagaccaaattgggtgaacacgcctcgaggagacctcaggataacaggtcaacacctgtccagcctctggcagagaaacaaactaagagtatctcttcacctgtttcaaagaggaaacctgccatgtcacccctgctcaccaggcccagctacatccggagcctccgaaaggctgaaaagcgtggtgcaaaaactcccagcacaaacgtaaagcccaaaacgccacatcaaagaaagggtggcccccagagccagctgtgtgacaaggcagctaatttaattgaggagctaacatccatatttaaagccgcaaagccaagaaacagaagcccaaatggggagtcctcgtcaccagacagtgggtacctgtctcctaaaaatcagccgtcagccctgctgagtgcctcagccagccagagccctatggaagaccaaggggagatggaaagagaggtcaagtcccctggggccaggcattgctaccaggacaaccaggacttggcagtgccacacaaccgcaagtctcacccacagccccacagcgccctccacttcccagctgcacctcgattcatccaaaagctgaggagccaagaagtagcagaagggagccgagtttatctggagtgtagagtcactggaaaccccactcctcgagtcagatggttctgtgaagggaaagaactgcacaacactcctgatattcaaatccactgtgagggaggggacctccataccctgatcatagcagaggcctttgaggacgacacaggtcgctacacctgtttggctacgaatcccagcggctcagacacaacatctgctgaggtgttcattgaaggtgccagttcaacagattctgacagtgaaagtttagctttcaaatcaagagctggagctatgccacaagctcaaaagaaaacaacttctgtttccttgacaataggatcatcatctccaaagacaggggtgaccacagctgtgattcaaccactgtctgtccctgtgcaacaggttcacagtccaacttcatatctctgccgacctgatggaaccactactgcctactttcctcctgtttttacaaaggaactgcaaaacacagccgtggcggaaggccaggtggtggttctggagtgccgggtccgtggggcaccccctctgcaggtccagtggtttcggcaagggagtgaaatccaagactctccagatttccgaattctacagaaaaaacctagatctacagctgaacctgaggagatttgcaccctagttatcgctgagactttccctgaagatgcagggatctttacatgttcagcaagaaatgattatggatcagcaaccagcactgcccagctggttgtcacctcagccaacactgaaaactgtagttacgagtcaatgggagaatccaacaatgaccacttccaacactttccacctccccctccaatcttggagacaagttccttggagttggcttcaaagaaaccatctgagatccagcaggtgaacaaccctgagttaggcctgagcagggcagcccttcaaatgcaattcaatgctgctgagagggaaacgaacggagtccatcccagccgtggagtaaatggactgattaacggcaaagctaacagtaataaatctcttccaacaccagctgtcctgctttcacccactaaggagccaccacctctgcttgccaaaccaaaactaggatttccaaagaaggccagtagaactgctagaatagcctccgatgaggaaattcaaggcacaaaggatgctgttattcaagacctggaacgaaaacttcgcttcaaggaggacctcctgaacaatggccagccgaggttaacatacgaagaaagaatggctcgtcgactgctaggtgctgacagtgcaactgtctttaatattcaggagccagaagaggaaacagctaatcaggacattggttctcctcatgcttctgtagggagtcctctggatggtcaaaaggaatacaaagtctccagctgtgaacagagactcatcagtgaaatagagtacaggctagaaaggtctcctgtggatgaatcaggtgatgaagttcagtatggagatgtgcctgtggaaaatggaatggcaccattctttgagatgaagctgaaacattacaagatctttgagggaatgccagtaactttcacatgtagagtggctggaaatccaaagccaaagatctattggtttaaagatgggaagcagatctctccaaagagtgatcactacaccattcaaagagatctcgatgggacctgctccctccataccacagcctccaccctagatgatgatgggaattatacaattatggctgcaaaccctcagggccgcatcagttgtactggacggctaatggtacaggctgtcaaccaaagaggtcgaagtccccggtctccctcaggccatcctcatgtcagaaggcctcgttctagatcaagggacagtggagacgaaaatgaaccaattcaggagcgattcttcagacctcacttcttgcaggctcctggagatctgactgttcaagaaggaaaactctgcagaatggactgcaaagtcagtgggttaccaaccccagatctaagctggcaactagatggaaagcccgtacgccctgacagtgctcacaagatgctggtgcgtgagaacggggtgcactctctgatcatagagccagtcacgtcacgtgatgccggcatctacacatgtatagctaccaaccgagcaggacagaactcattcagcctggagcttgtggttgctgctaaagaagcacacaaaccccctgtgtttattgagaagctccaaaacacaggagttgctgatgggtacccagtgcggctggaatgtcgtgtattgggagtgccaccacctcagatattttggaagaaagaaaatgaatcactcactcacagcactgaccgagtgagcatgcaccaggacaaccacggctacatctgcctgctcattcagggagccacaaaagaagatgctgggtggtatactgtgtcagccaagaatgaagcagggattgtgtcctgtactgccaggctggacgtttacatttctcgacattaatagtgaaccacaccaggagaacaaatacccaacccagtggcatcagcagtcacagagcaccaagccaaaaaaagtacggccctcagccagtc

SEQ ID NO: 21481 - DNA, 4379 bp, Homo sapiens
  source 1..4379: mol_type = unassigned DNA
cctgagtcacccggcgggcgaggtataaagcccgatacctgccccgcgcccggtccgcggagcccgctgcagctcccgctcgctccggacgcggaatcgggcagcagcgggaggcggcccggagagccgagggaccctctgaagctccagcaactccagaaccaaatccgactggagcaggaggccggcgctcggcagcctccgccagccccgcgcagcgcgccgccctcgccccccttcccgccgccgcccgccttccccgagctcgcggcctgcacgccgcccgcgtccccggagcccatgagcgcgctggcctcccgctccgcccccgccatgcagtcctccggctccttcaactacgcgcgccccaagcagttcatcgccgcgcagaacctcgggcccgcgtcgggccacggcacgccggcctccagccccagctcgtccagcctcccgtcgcccatgtccccgacgccgaggcagttcggccgcgcccccgtgccgcccttcgcgcagcccttcggcgctgagcccgaggccccgtggggctcctcctcgccgtcgcccccgcccccgccacccccggtcttcagccccacggctgccttcccggtgcccgacgtgttcccactgccgccgccaccaccgccgctcccgagcccgggacaggcgtcccactgctcgtcgcctgccacccgcttcggccacagccagacgcccgcggccttcctcagcgctctgctgccctcgcagccgccgccggcggccgtcaacgccctggggctgcccaagggtgtcacccccgcaggatttccaaagaaggccagtagaactgctagaatagcctccgatgaggaaattcaaggcacaaaggatgctgttattcaagacctggaacgaaaacttcgcttcaaggaggacctcctgaacaatggccagccgaggttaacatacgaagaaagaatggctcgtcgactgctaggtgctgacagtgcaactgtctttaatattcaggagccagaagaggaaacagctaatcaggaatacaaagtctccagctgtgaacagagactcatcagtgaaatagagtacaggctagaaaggtctcctgtggatgaatcaggtgatgaagttcagtatggagatgtgcctgtggaaaatggaatggcaccattctttgagatgaagctgaaacattacaagatctttgagggaatgccagtaactttcacatgtagagtggctggaaatccaaagccaaagatctattggtttaaagatgggaagcagatctctccaaagagtgatcactacaccattcaaagagatctcgatgggacctgctccctccataccacagcctccaccctagatgatgatgggaattatacaattatggctgcaaaccctcagggccgcatcagttgtactggacggctaatggtacaggctgtcaaccaaagaggtcgaagtccccggtctccctcaggccatcctcatgtcagaaggcctcgttctagatcaagggacagtggagacgaaaatgaaccaattcaggagcgattcttcagacctcacttcttgcaggctcctggagatctgactgttcaagaaggaaaactctgcagaatggactgcaaagtcagtgggttaccaaccccagatctaagctggcaactagatggaaagcccgtacgccctgacagtgctcacaagatgctggtgcgtgagaacggggtgcactctctgatcatagagccagtcacgtcacgtgatgccggcatctacacatgtatagctaccaaccgagcaggacagaactcattcagcctggagcttgtggttgctgctaaagaagcacacaaaccccctgtgtttattgagaagctccaaaacacaggagttgctgatgggtacccagtgcggctggaatgtcgtgtattgggagtgccaccacctcagatattttggaagaaagaaaatgaatcactcactcacagcactgaccgagtgagcatgcaccaggacaaccacggctacatctgcctgctcattcagggagccacaaaagaagatgctgggtggtatactgtgtcagccaagaatgaagcagggattgtgtcctgtactgccaggctggacgtttacacccagtggcatcagcagtcacagagcaccaagccaaaaaaagtacggccctcagccagtcgctatgcagcactttcggaccagggactagacatcaaagcagcgttccaacctgaggccaacccatctcacctgacactgaatactgccttggtagaaagtgaggacctgtaatccagcattcttgttaaagctgaaacactgaaacagccattgccttgaccaacatattcctttgtcacattatgtaaaaggcagaaacatacctttgactataagaaattaaaaaaaaaacaccaaaataatatttttcttacttgatataccaaacttagtttaagtagataatgctaatacaaatatacacattgcacagaaaatacacatttactgtccaatttaaaactttggaattgctgtgattaaagtgatcaaaatgccaaaatactaaaggaaatcaattgttcacaggtaactacaatttgtattatctacaagtgcctttaaacacaagatataggtgctgtgtagcctgatagtgtgaaatgtttaatgagggagttgtaccacaaacagtactacaatgattctgaagcacagtgtattcagacagatacagtgaaccaagtgcaatatgtaaggatgaaagaagaagagatgacaaagaaatccaagtaaatgccttgtctttgcaaatgtttttatattaaatcataaggaaggaactacttgccttaaatgttaatatcaaaagagttttctaacaaggttaataccttagttcttaacattttttttctttatgtgtagtgttttcatgctaccttggtaggaaacttatttacaaaccatattaaaaggctaatttaaatataaataatataaagtgctctgaataaagcagaaatatattacagttcattccacagaaagcatccaaaccacccaaatgaccaaggcatatatagtatttggaggaatcaggggtttggaaggagtagggaggagaatgaaggaaaatgcaaccagcatgattatagtgtgttcatttagataaaagtagaaggcacaggagaggtagcaaaggccaggcttttctttggttttcttcaaacataggtgaaaaaaacactgccattcacaagtcaaggaacccagggccagctggaagtgtggagcacacatgctgtggagcacacatgctgtggagattgcagtgtgtctgaggtttgtgtagtagtggaagattttaggtatgtagagcaagttgaaaatggattgagactgcatggtggcataaatgagaaattgcctgtagcatctagtctacttgaaggaagtggagacataaggagagacaaaaacaggtttgtgccataaagtattttttcaaagacaccaagatgtggtaaatgaaaattattagttcacttccctgctgccatgaaactttgccttaagaaggtgctggattccaaggtttgtaaaggcatctcggtaaagactgctttttgaatgcatatgattttgcatcagctagactgagttgattctgaccagacttgatggttttaagtcggaaccgataaattttaaaaaggagaaaaaataatttgacctagtagtataaaacatgaggctttaatggtactttgctatgaaaagaaaacactgtattccttatgcaaaacacatgtatctttcattatttataagtggcctctcttagctcagttactcaattcatacgtagtattttttaaaataattttatatctgtgtaccaccccatatatttcatattactgtttcacatgtacagctttctacttctttgtaagaacaccaaccaaccaaggtttaagtgattaataggcttgagcaccgggtggcagatgttctatgcagtgtggttcaagtttctttgaccgcacttatatgcattgctaatatggaatttaagataccatacacagtctctcatggacctatctctattgtagaattatgacttatgtcttacttgccaaatttttctgaatgtgacctttttttgctgatttgctgggtttgggattaactagcattattttgccacctttatattgtatttataaaaaaaaaagtactatcaatcaatcatactactttggattgttgtgctggtgtaatgtggatttaacatcaataaatatttgacaaataatagttgcagttttgtgaagcaaaataaa

SEQ ID NO: 21482 - DNA, 2958 bp, Homo sapiens
  source 1..2958: mol_type = unassigned DNA
attcgcgcgctggagaccggcggcctctcaccgagcctgagtcgtggccgctgcgccgccaggaggcttcccgggagccggcggggcccaggacctctcgagcgcagcaggcaaggggccggccttttggcagcgcggctgccagttaattttctccgttgcattctgcaaacgagatcgcattcagagcccagaagttgcaagctgggaataagcgagatctgaaagacccccaagaggagcttgtttgggagtgggggcagacggcgttttgcgcccaactgatggttctgtgaagggaaagaactgcacaacactcctgatattcaaatccactgtgagggaggggacctccataccctgatcatagcagaggcctttgaggacgacacaggtcgctacacctgtttggctacgaatcccagcggctcagacacaacatctgctgaggtgttcattgaaggtgccagttcaacagattctgacagtgaaagtttagctttcaaatcaagagctggagctatgccacaagctcaaaagaaaacaacttctgtttccttgacaataggatcatcatctccaaagacaggggtgaccacagctgtgattcaaccactgtctgtccctgtgcaacaggttcacagtccaacttcatatctctgccgacctgatggaaccactactgcctactttcctcctgtttttacaaaggaactgcaaaacacagccgtggcggaaggccaggtggtggttctggagtgccgggtccgtggggcaccccctctgcaggtccagtggtttcggcaagggagtgaaatccaagactctccagatttccgaattctacagaaaaaacctagatctacagctgaacctgaggagatttgcaccctagttatcgctgagactttccctgaagatgcagggatctttacatgttcagcaagaaatgattatggatcagcaaccagcactgcccagctggttgtcacctcagccaacactgaaaactgtagttacgagtcaatgggagaatccaacaatgaccacttccaacactttccacctccccctccaatcttggagacaagttccttggagttggcttcaaagaaaccatctgagatccagcaggtgaacaaccctgagttaggcctgagcagggcagcccttcaaatgcaattcaatgctgctgagagggaaacgaacggagtccatcccagccgtggagtaaatggactgattaacggcaaagctaacagtaataaatctcttccaacaccagctgtcctgctttcacccactaaggagccaccacctctgcttgccaaaccaaaactaggatttccaaagaaggccagtagaactgctagaatagcctccgatgaggaaattcaaggcacaaaggatgctgttattcaagacctggaacgaaaacttcgcttcaaggaggacctcctgaacaatggccagccgaggttaacatacgaagaaagaatggctcgtcgactgctaggtgctgacagtgcaactgtctttaatattcaggagccagaagaggaaacagctaatcaggaatacaaagtctccagctgtgaacagagactcatcagtgaaatagagtacaggctagaaaggtctcctgtggatgaatcaggtgatgaagttcagtatggagatgtgcctgtggaaaatggaatggcaccattctttgagatgaagctgaaacattacaagatctttgagggaatgccagtaactttcacatgtagagtggctggaaatccaaagccaaagatctattggtttaaagatgggaagcagatctctccaaagagtgatcactacaccattcaaagagatctcgatgggacctgctccctccataccacagcctccaccctagatgatgatgggaattatacaattatggctgcaaaccctcagggccgcatcagttgtactggacggctaatggtacaggctgtcaaccaaagaggtcgaagtccccggtctccctcaggccatcctcatgtcagaaggcctcgttctagatcaagggacagtggagacgaaaatgaaccaattcaggagcgattcttcagacctcacttcttgcaggctcctggagatctgactgttcaagaaggaaaactctgcagaatggactgcaaagtcagtgggttaccaaccccagatctaagctggcaactagatggaaagcccgtacgccctgacagtgctcacaagatgctggtgcgtgagaacggggtgcactctctgatcatagagccagtcacgtcacgtgatgccggcatctacacatgtatagctaccaaccgagcaggacagaactcattcagcctggagcttgtggttgctgctaaagaagcacacaaaccccctgtgtttattgagaagctccaaaacacaggagttgctgatgggtacccagtgcggctggaatgtcgtgtattgggagtgccaccacctcagatattttggaagaaagaaaatgaatcactcactcacagcactgaccgagtgagcatgcaccaggacaaccacggctacatctgcctgctcattcagggagccacaaaagaagatgctgggtggtatactgtgtcagccaagaatgaagcagggattgtgtcctgtactgccaggctggacgtttacacccagtggcatcagcagtcacagagcaccaagccaaaaaaagtacggccctcagccagtcgctatgcagcactttcggaccagggactagacatcaaagcagcgttccaacctgaggccaacccatctcacctgacactgaatactgccttggtagaaagtgaggacctgtaatccagcattcttgttaaagctgaaacactgaaacagccattgccttgaccaacatattcctttgtcacattatgtaaaaggcagaaacatacctttgactat

SEQ ID NO: 21483 - DNA, 5809 bp, Homo sapiens
  source 1..5809: mol_type = unassigned DNA
gtgaccacggaccaggcagtctctaatgaataggcaaggccacaacctccattctcccagaaaagaagaaatgctcatctgaaattcatcacctctctggagtcttcaaactgaccaagcattgaaaagaacacagtttcagaaaacagtttccagtgcctctggccttcctactgaaagcagacacagagtgcatgaagaccgttcaaatatgtcagggacctcctcccatgagtccttctatgactccctctcagacatgcaggaagaaagcaagaatactgacttcttcccgggcctttctgctttcctcagccaggaagagataaacaagagtcttgacctggcccggagagccatagccgactccgaaacagaagattttgactcggaaaaggagatctcgcagattttcagtacttctcctgcaagcctctgtgaacatccttcccataaggagaccaaattgggtgaacacgcctcgaggagacctcaggataacaggtcaacacctgtccagcctctggcagagaaacaaactaagagtatctcttcacctgtttcaaagaggaaacctgccatgtcacccctgctcaccaggcccagctacatccggagcctccgaaaggctgaaaagcgtggtgcaaaaactcccagcacaaacgtaaagcccaaaacgccacatcaaagaaagggtggcccccagagccagctgtgtgacaaggcagctaatttaattgaggagctaacatccatatttaaagccgcaaagccaagaaacagaagcccaaatggggagtcctcgtcaccagacagtgggtacctgtctcctaaaaatcagccgtcagccctgctgagtgcctcagccagccagagccctatggaagaccaaggggagatggaaagagaggtcaagtcccctggggccaggcattgctaccaggacaaccaggacttggcagtgccacacaaccgcaagtctcacccacagccccacagcgccctccacttcccagctgcacctcgattcatccaaaagctgaggagccaagaagtagcagaagggagccgagtttatctggagtgtagagtcactggaaaccccactcctcgagtcagatggttctgtgaagggaaagaactgcacaacactcctgatattcaaatccactgtgagggaggggacctccataccctgatcatagcagaggcctttgaggacgacacaggtcgctacacctgtttggctacgaatcccagcggctcagacacaacatctgctgaggtgttcattgaaggtgccagttcaacagattctgacagtgaaagtttagctttcaaatcaagagctggagctatgccacaagctcaaaagaaaacaacttctgtttccttgacaataggatcatcatctccaaagacaggggtgaccacagctgtgattcaaccactgtctgtccctgtgcaacaggttcacagtccaacttcatatctctgccgacctgatggaaccactactgcctactttcctcctgtttttacaaaggaactgcaaaacacagccgtggcggaaggccaggtggtggttctggagtgccgggtccgtggggcaccccctctgcaggtccagtggtttcggcaagggagtgaaatccaagactctccagatttccgaattctacagaaaaaacctagatctacagctgaacctgaggagatttgcaccctagttatcgctgagactttccctgaagatgcagggatctttacatgttcagcaagaaatgattatggatcagcaaccagcactgcccagctggttgtcacctcagccaacactgaaaactgtagttacgagtcaatgggagaatccaacaatgaccacttccaacactttccacctccccctccaatcttggagacaagttccttggagttggcttcaaagaaaccatctgagatccagcaggtgaacaaccctgagttaggcctgagcagggcagcccttcaaatgcaattcaatgctgctgagagggaaacgaacggagtccatcccagccgtggagtaaatggactgattaacggcaaagctaacagtaataaatctcttccaacaccagctgtcctgctttcacccactaaggagccaccacctctgcttgccaaaccaaaactaggatttccaaagaaggccagtagaactgctagaatagcctccgatgaggaaattcaaggcacaaaggatgctgttattcaagacctggaacgaaaacttcgcttcaaggaggacctcctgaacaatggccagccgaggttaacatacgaagaaagaatggctcgtcgactgctaggtgctgacagtgcaactgtctttaatattcaggagccagaagaggaaacagctaatcaggaatacaaagtctccagctgtgaacagagactcatcagtgaaatagagtacaggctagaaaggtctcctgtggatgaatcaggtgatgaagttcagtatggagatgtgcctgtggaaaatggaatggcaccattctttgagatgaagctgaaacattacaagatctttgagggaatgccagtaactttcacatgtagagtggctggaaatccaaagccaaagatctattggtttaaagatgggaagcagatctctccaaagagtgatcactacaccattcaaagagatctcgatgggacctgctccctccataccacagcctccaccctagatgatgatgggaattatacaattatggctgcaaaccctcagggccgcatcagttgtactggacggctaatggtacaggctgtcaaccaaagaggtcgaagtccccggtctccctcaggccatcctcatgtcagaaggcctcgttctagatcaagggacagtggagacgaaaatgaaccaattcaggagcgattcttcagacctcacttcttgcaggctcctggagatctgactgttcaagaaggaaaactctgcagaatggactgcaaagtcagtgggttaccaaccccagatctaagctggcaactagatggaaagcccgtacgccctgacagtgctcacaagatgctggtgcgtgagaacggggtgcactctctgatcatagagccagtcacgtcacgtgatgccggcatctacacatgtatagctaccaaccgagcaggacagaactcattcagcctggagcttgtggttgctgctaaagaagcacacaaaccccctgtgtttattgagaagctccaaaacacaggagttgctgatgggtacccagtgcggctggaatgtcgtgtattgggagtgccaccacctcagatattttggaagaaagaaaatgaatcactcactcacagcactgaccgagtgagcatgcaccaggacaaccacggctacatctgcctgctcattcagggagccacaaaagaagatgctgggtggtatactgtgtcagccaagaatgaagcagggattgtgtcctgtactgccaggctggacgtttacatttctcgacattaatagtgaaccacaccaggagaacaaatacccaacccagtggcatcagcagtcacagagcaccaagccaaaaaaagtacggccctcagccagtcgctatgcagcactttcggaccagggactagacatcaaagcagcgttccaacctgaggccaacccatctcacctgacactgaatactgccttggtagaaagtgaggacctgtaatccagcattcttgttaaagctgaaacactgaaacagccattgccttgaccaacatattcctttgtcacattatgtaaaaggcagaaacatacctttgactataagaaattaaaaaaaaaacaccaaaataatatttttcttacttgatataccaaacttagtttaagtagataatgctaatacaaatatacacattgcacagaaaatacacatttactgtccaatttaaaactttggaattgctgtgattaaagtgatcaaaatgccaaaatactaaaggaaatcaattgttcacaggtaactacaatttgtattatctacaagtgcctttaaacacaagatataggtgctgtgtagcctgatagtgtgaaatgtttaatgagggagttgtaccacaaacagtactacaatgattctgaagcacagtgtattcagacagatacagtgaaccaagtgcaatatgtaaggatgaaagaagaagagatgacaaagaaatccaagtaaatgccttgtctttgcaaatgtttttatattaaatcataaggaaggaactacttgccttaaatgttaatatcaaaagagttttctaacaaggttaataccttagttcttaacattttttttctttatgtgtagtgttttcatgctaccttggtaggaaacttatttacaaaccatattaaaaggctaatttaaatataaataatataaagtgctctgaataaagcagaaatatattacagttcattccacagaaagcatccaaaccacccaaatgaccaaggcatatatagtatttggaggaatcaggggtttggaaggagtagggaggagaatgaaggaaaatgcaaccagcatgattatagtgtgttcatttagataaaagtagaaggcacaggagaggtagcaaaggccaggcttttctttggttttcttcaaacataggtgaaaaaaacactgccattcacaagtcaaggaacccagggccagctggaagtgtggagcacacatgctgtggagcacacatgctgtggagattgcagtgtgtctgaggtttgtgtagtagtggaagattttaggtatgtagagcaagttgaaaatggattgagactgcatggtggcataaatgagaaattgcctgtagcatctagtctacttgaaggaagtggagacataaggagagacaaaaacaggtttgtgccataaagtattttttcaaagacaccaagatgtggtaaatgaaaattattagttcacttccctgctgccatgaaactttgccttaagaaggtgctggattccaaggtttgtaaaggcatctcggtaaagactgctttttgaatgcatatgattttgcatcagctagactgagttgattctgaccagacttgatggttttaagtcggaaccgataaattttaaaaaggagaaaaaataatttgacctagtagtataaaacatgaggctttaatggtactttgctatgaaaagaaaacactgtattccttatgcaaaacacatgtatctttcattatttataagtggcctctcttagctcagttactcaattcatacgtagtattttttaaaataattttatatctgtgtaccaccccatatatttcatattactgtttcacatgtacagctttctacttctttgtaagaacaccaaccaaccaaggtttaagtgattaataggcttgagcaccgggtggcagatgttctatgcagtgtggttcaagtttctttgaccgcacttatatgcattgctaatatggaatttaagataccatacacagtctctcatggacctatctctattgtagaattatgacttatgtcttacttgccaaatttttctgaatgtgacctttttttgctgatttgctgggtttgggattaactagcattattttgccacctttatattgtatttataaaaaaaaaagtactatcaatcaatcatactactttggattgttgtgctggtgtaatgtggatttaacatcaataaatatttgacaaataatagttgcagttttgtgaagcaaaataaatattcagtttta

SEQ ID NO: 21484 - DNA, 2320 bp, Homo sapiens
  source 1..2320: mol_type = unassigned DNA
aagaatactgacttcttcccgggcctttctgctttcctcagccaggaagagataaacaagagtcttgacctggcccggagagccatagccgactccgaaacagaagattttgactcggaaaaggagatctcgcagattttcagtacttctcctgcaagcctctgtgaacatccttcccataaggagaccaaattgggtgaacacgcctcgaggagacctcaggataacaggtcaacacctgtccagcctctggcagagaaacaaactaagagtatctcttcacctgtttcaaagaggaaacctgccatgtcacccctgctcaccaggcccagctacatccggagcctccgaaaggctgaaaagcgtggtgcaaaaactcccagcacaaacgtaaagcccaaaacgccacatcaaagaaagggtggcccccagagccagctgtgtgacaaggcagctaatttaattgaggagctaacatccatatttaaagccgcaaagccaagaaacagaagcccaaatggggagtcctcgtcaccagacagtgggtacctgtctcctaaaaatcagccgtcagccctgctgagtgcctcagccagccagagccctatggaagaccaaggggagatggaaagagaggtcaagtcccctggggccaggcattgctaccaggacaaccaggacttggcagtgccacacaaccgcaagtctcacccacagccccacagcgccctccacttcccagctgcacctcgattcatccaaaagctgaggagccaagaagtagcagaagggagccgagtttatctggagtgtagagtcactggaaaccccactcctcgagtcagatggttctgtgaagggaaagaactgcacaacactcctgatattcaaatccactgtgagggaggggacctccataccctgatcatagcagaggcctttgaggacgacacaggtcgctacacctgtttggctacgaatcccagcggctcagacacaacatctgctgaggtgttcattgaaggtgccagttcaacagattctgacagtgaaagtttagctttcaaatcaagagctggagctatgccacaagctcaaaagaaaacaacttctgtttccttgacaataggatcatcatctccaaagacaggggtgaccacagctgtgattcaaccactgtctgtccctgtgcaacaggttcacagtccaacttcatatctctgccgacctgatggaaccactactgcctactttcctcctgtttttacaaaggaactgcaaaacacagccgtggcggaaggccaggtggtggttctggagtgccgggtccgtggggcaccccctctgcaggtccagtggtttcggcaagggagtgaaatccaagactctccagatttccgaattctacagaaaaaacctagatctacagctgaacctgatgtcttatacgtctttgttcgagtgagatgccaccagatgaaaattcagtattacaacctggctcatctcatttcctcatggctttcttcatttttataatgtcagaaccatacaagctatgatgcttctttctctcaacaaaatgtgagcctcttgtcactgttggatgaacttttctttgagaagaaaagctgaggaacctgtgggacattgtattcaaattttatctagttaaaaaaaaattatctagcaaaaattgctgtgacatttcaatgcatgaggatcactaaaagaacatcctagtgtttattttttatttttctatttttgttctttaattctgtaatttttctaaatgttccacgtgaactatatacaggcatataccttatttatgcatggaagtattcctataaaatcatacacaatgaattctgctcaatcaactttgaaacacacaaaggaagcttgtaggaaaattggtcttactgagaattcctttagaaaatagtctttttacaaagcaagtgtttttttccttcatctaaatttcatgcatgcatttatttaaacataattatagggagcctaccatgtgtgagatgctaagaatatggccatgaacaaaaattgtttctgcactcagaggttatatttcagcgaaccagaaactaacaaactaattacacaataaattatttagcagggtgaggtggcacatagtcccagctacccaggaggctgaggcaggaggattgcttgagcccaggagttcaaggctgcagtgagctatgatcatgccacttcactccagcctgggcaacagtgaaacccctgtttctaaaaaaaagattttaaaaataaaataaaacaaaattgc

SEQ ID NO: 21485 - DNA, 6435 bp, Homo sapiens
  source 1..6435: mol_type = unassigned DNA
gtgaccacggaccaggcagtctctaatgaataggcaaggccacaacctccattctcccagaaaagaagaaatgctcatctgaaattcatcacctctctggagtcttcaaactgaccaagcattgaaaagaacacagtttcagaaaacagtttccagtgcctctggccttcctactgaaagcagacacagagtgcatgaagaccgttcaaatatgtcagggacctcctcccatgagtccttctatgactccctctcagacatgcaggaagaaagcaagaatactgacttcttcccgggcctttctgctttcctcagccaggaagagataaacaagagtcttgacctggcccggagagccatagccgactccgaaacagaagattttgactcggaaaaggagatctcgcagattttcagtacttctcctgcaagcctctgtgaacatccttcccataaggagaccaaattgggtgaacacgcctcgaggagacctcaggataacaggtcaacacctgtccagcctctggcagagaaacaaactaagagtatctcttcacctgtttcaaagaggaaacctgccatgtcacccctgctcaccaggcccagctacatccggagcctccgaaaggctgaaaagcgtggtgcaaaaactcccagcacaaacgtaaagcccaaaacgccacatcaaagaaagggtggcccccagagccagctgtgtgacaaggcagctaatttaattgaggagctaacatccatatttaaagccgcaaagccaagaaacagaagcccaaatggggagtcctcgtcaccagacagtgggtacctgtctcctaaaaatcagccgtcagccctgctgagtgcctcagccagccagagccctatggaagaccaaggggagatggaaagagaggtcaagtcccctggggccaggcattgctaccaggacaaccaggacttggcagtgccacacaaccgcaagtctcacccacagccccacagcgccctccacttcccagctgcacctcgattcatccaaaagctgaggagccaagaagtagcagaagggagccgagtttatctggagtgtagagtcactggaaaccccactcctcgagtcagatggttctgtgaagggaaagaactgcacaacactcctgatattcaaatccactgtgagggaggggacctccataccctgatcatagcagaggcctttgaggacgacacaggtcgctacacctgtttggctacgaatcccagcggctcagacacaacatctgctgaggtgttcattgaaggtgccagttcaacagattctgacagtgaaagtttagctttcaaatcaagagctggagctatgccacaagctcaaaagaaaacaacttctgtttccttgacaataggatcatcatctccaaagacaggggtgaccacagctgtgattcaaccactgtctgtccctgtgcaacaggttcacagtccaacttcatatctctgccgacctgatggaaccactactgcctactttcctcctgtttttacaaaggaactgcaaaacacagccgtggcggaaggccaggtggtggttctggagtgccgggtccgtggggcaccccctctgcaggtccagtggtttcggcaagggagtgaaatccaagactctccagatttccgaattctacagaaaaaacctagatctacagctgaacctgaggagatttgcaccctagttatcgctgagactttccctgaagatgcagggatctttacatgttcagcaagaaatgattatggatcagcaaccagcactgcccagctggttgtcacctcagccaacactgaaaactgtagttacgagtcaatgggagaatccaacaatgaccacttccaacactttccacctccccctccaatcttggagacaagttccttggagttggcttcaaagaaaccatctgagatccagcaggtgaacaaccctgagttaggcctgagcagggcagcccttcaaatgcaattcaatgctgctgagagggaaacgaacggagtccatcccagccgtggagtaaatggactgattaacggcaaagctaacagtaataaatctcttccaacaccagctgtcctgctttcacccactaaggagccaccacctctgcttgccaaaccaaaactggaccctctgaagctccagcaactccagaaccaaatccgactggagcaggaggccggcgctcggcagcctccgccagccccgcgcagcgcgccgccctcgccccccttcccgccgccgcccgccttccccgagctcgcggcctgcacgccgcccgcgtccccggagcccatgagcgcgctggcctcccgctccgcccccgccatgcagtcctccggctccttcaactacgcgcgccccaagcagttcatcgccgcgcagaacctcgggcccgcgtcgggccacggcacgccggcctccagccccagctcgtccagcctcccgtcgcccatgtccccgacgccgaggcagttcggccgcgcccccgtgccgcccttcgcgcagcccttcggcgctgagcccgaggccccgtggggctcctcctcgccgtcgcccccgcccccgccacccccggtcttcagccccacggctgccttcccggtgcccgacgtgttcccactgccgccgccaccaccgccgctcccgagcccgggacaggcgtcccactgctcgtcgcctgccacccgcttcggccacagccagacgcccgcggccttcctcagcgctctgctgccctcgcagccgccgccggcggccgtcaacgccctggggctgcccaagggtgtcacccccgcaggatttccaaagaaggccagtagaactgctagaatagcctccgatgaggaaattcaaggcacaaaggatgctgttattcaagacctggaacgaaaacttcgcttcaaggaggacctcctgaacaatggccagccgaggttaacatacgaagaaagaatggctcgtcgactgctaggtgctgacagtgcaactgtctttaatattcaggagccagaagaggaaacagctaatcaggaatacaaagtctccagctgtgaacagagactcatcagtgaaatagagtacaggctagaaaggtctcctgtggatgaatcaggtgatgaagttcagtatggagatgtgcctgtggaaaatggaatggcaccattctttgagatgaagctgaaacattacaagatctttgagggaatgccagtaactttcacatgtagagtggctggaaatccaaagccaaagatctattggtttaaagatgggaagcagatctctccaaagagtgatcactacaccattcaaagagatctcgatgggacctgctccctccataccacagcctccaccctagatgatgatgggaattatacaattatggctgcaaaccctcagggccgcatcagttgtactggacggctaatggtacaggctgtcaaccaaagaggtcgaagtccccggtctccctcaggccatcctcatgtcagaaggcctcgttctagatcaagggacagtggagacgaaaatgaaccaattcaggagcgattcttcagacctcacttcttgcaggctcctggagatctgactgttcaagaaggaaaactctgcagaatggactgcaaagtcagtgggttaccaaccccagatctaagctggcaactagatggaaagcccgtacgccctgacagtgctcacaagatgctggtgcgtgagaacggggtgcactctctgatcatagagccagtcacgtcacgtgatgccggcatctacacatgtatagctaccaaccgagcaggacagaactcattcagcctggagcttgtggttgctgctaaagaagcacacaaaccccctgtgtttattgagaagctccaaaacacaggagttgctgatgggtacccagtgcggctggaatgtcgtgtattgggagtgccaccacctcagatattttggaagaaagaaaatgaatcactcactcacagcactgaccgagtgagcatgcaccaggacaaccacggctacatctgcctgctcattcagggagccacaaaagaagatgctgggtggtatactgtgtcagccaagaatgaagcagggattgtgtcctgtactgccaggctggacgtttacacccagtggcatcagcagtcacagagcaccaagccaaaaaaagtacggccctcagccagtcgctatgcagcactttcggaccagggactagacatcaaagcagcgttccaacctgaggccaacccatctcacctgacactgaatactgccttggtagaaagtgaggacctgtaatccagcattcttgttaaagctgaaacactgaaacagccattgccttgaccaacatattcctttgtcacattatgtaaaaggcagaaacatacctttgactataagaaattaaaaaaaaaacaccaaaataatatttttcttacttgatataccaaacttagtttaagtagataatgctaatacaaatatacacattgcacagaaaatacacatttactgtccaatttaaaactttggaattgctgtgattaaagtgatcaaaatgccaaaatactaaaggaaatcaattgttcacaggtaactacaatttgtattatctacaagtgcctttaaacacaagatataggtgctgtgtagcctgatagtgtgaaatgtttaatgagggagttgtaccacaaacagtactacaatgattctgaagcacagtgtattcagacagatacagtgaaccaagtgcaatatgtaaggatgaaagaagaagagatgacaaagaaatccaagtaaatgccttgtctttgcaaatgtttttatattaaatcataaggaaggaactacttgccttaaatgttaatatcaaaagagttttctaacaaggttaataccttagttcttaacattttttttctttatgtgtagtgttttcatgctaccttggtaggaaacttatttacaaaccatattaaaaggctaatttaaatataaataatataaagtgctctgaataaagcagaaatatattacagttcattccacagaaagcatccaaaccacccaaatgaccaaggcatatatagtatttggaggaatcaggggtttggaaggagtagggaggagaatgaaggaaaatgcaaccagcatgattatagtgtgttcatttagataaaagtagaaggcacaggagaggtagcaaaggccaggcttttctttggttttcttcaaacataggtgaaaaaaacactgccattcacaagtcaaggaacccagggccagctggaagtgtggagcacacatgctgtggagcacacatgctgtggagattgcagtgtgtctgaggtttgtgtagtagtggaagattttaggtatgtagagcaagttgaaaatggattgagactgcatggtggcataaatgagaaattgcctgtagcatctagtctacttgaaggaagtggagacataaggagagacaaaaacaggtttgtgccataaagtattttttcaaagacaccaagatgtggtaaatgaaaattattagttcacttccctgctgccatgaaactttgccttaagaaggtgctggattccaaggtttgtaaaggcatctcggtaaagactgctttttgaatgcatatgattttgcatcagctagactgagttgattctgaccagacttgatggttttaagtcggaaccgataaattttaaaaaggagaaaaaataatttgacctagtagtataaaacatgaggctttaatggtactttgctatgaaaagaaaacactgtattccttatgcaaaacacatgtatctttcattatttataagtggcctctcttagctcagttactcaattcatacgtagtattttttaaaataattttatatctgtgtaccaccccatatatttcatattactgtttcacatgtacagctttctacttctttgtaagaacaccaaccaaccaaggtttaagtgattaataggcttgagcaccgggtggcagatgttctatgcagtgtggttcaagtttctttgaccgcacttatatgcattgctaatatggaatttaagataccatacacagtctctcatggacctatctctattgtagaattatgacttatgtcttacttgccaaatttttctgaatgtgacctttttttgctgatttgctgggtttgggattaactagcattattttgccacctttatattgtatttataaaaaaaaaagtactatcaatcaatcatactactttggattgttgtgctggtgtaatgtggatttaacatcaataaatatttgacaaataatagttgcagttttgtgaagcaaaataaatattcagtttta

SEQ ID NO: 21486 - DNA, 628 bp, Homo sapiens
  source 1..628: mol_type = unassigned DNA
tggaaagcccgtacgccctgacagtgctcacaagatgctggtgcgtgagaacggggtgcactctctgatcatagagccagtcacgtcacgtgatgccggcatctacacatgtatagctaccaaccgagcaggacagaactcattcagcctggagcttgtggttgctgctaaagaagcacacaaaccccctgtgtttattgagaagctccaaaacacaggagttgctgatgggtacccagtgcggctggaatgtcgtgtattgggagtgccaccacctcagatattttggaagaaagaaaatgaatcactcactcacagcactgaccgagtgagcatgcaccaggacaaccacggctacatctgcctgctcattcagggagccacaaaagaagatgctgggtggtatactgtgtcagccaagaatgaagcagggattgtgtcctgtactgccaggctggacgtttacatttctcgacattaatagtgaaccacaccaggagaacaaatacccaagtatcattcaggaactttgaattattagcaaaatatgcatgttgatttctcttacattggctagttagttgtggcttccttactcaagcatccttaggagttaacagtaggcaaa

SEQ ID NO: 21487 - DNA, 2320 bp, Homo sapiens; identical to SEQ ID NO: 21484
  source 1..2320: mol_type = unassigned DNA

SEQ ID NO: 21488 - DNA, 576 bp, Homo sapiens
  source 1..576: mol_type = unassigned DNA
agaaaagaagaaatgctcatctgaaattcatcacctctctggagtcttcaaactgaccaagcattgaaaagctctcacttcagagtccaagaaggacacatctaatcgctgtctaggccaagtgccaagacttgtgcccagtctccaagcggctgggaaagaaaatacttggagatttcacatcccattacaagtgagttcagtttctcactgagcctcagaatatgaggaattctccaaaatgaagacgtccagatgacagcaacaccaaacgtgaaaccatgataaatgtgtgcaccccctggattactgcacaagccttctcacggaccgccctactgtcagtcttgtcttcctctttccctacctctgtcccggatccagactgcaatcagttatctctcaaaaataacacagtttcagaaaacagtttccagtgcctctggccttcctactgaaagcagacacagagtgcatgaagaccgttcaaatatgtcagggacctcctcccatgagtccttctatgactccctctcagacatgcaggaagaaagcaagaatactgacttcttcccg

SEQ ID NO: 21489 - DNA, 3941 bp, Homo sapiens
  source 1..3941: mol_type = unassigned DNA
acactgcgtccggggccagacgacgatatcagcgcggggtccccacaacgccatggggcagagccaactctcgagcgcgtgatcgaagcccgcagttttttcgcccccgtcacttccgggtgcgacaatctcttctgtccggccagccgctggagtcgttaggtgccgccttgcttctgacgagccacacgtttgcttcttccctgtgttcccagctggagggacatgagtgtccctgggccgtcgtctccggacggggccctgacacggccaccctactgcctggaggccggggagccgacgcctggtttaagtgacacttctccagatgaagggttaatagaggacttgactatagaagacaaagcagtggagcaactggcagaaggattgctttctcattatttgccagatctgcagagatcaaaacaagccctccaggaactcacacagaaccaagttgtattgttagacacactggaacaagagatttcaaaatttaaagaatgtcattctatgttggatattaatgctttgtttgctgaggctaaacactatcatgccaagttggtgaatataagaaaagagatgctgatgcttcatgaaaaaacatcaaagttaaaaaaaagagcacttaaactgcagcagaagaggcaaaaagaagagttggaaagggagcagcaacgagagaaggagtttgaaagagaaaagcagttaactgccagaccagccaaaaggatgtgaaaagttgtgtttgtgtgttttcttctcctgtcccatatttgggttatgatgactcaagtgtagactgaagttgaggtagtgccttatgccattatgtcatatgttgaaatccttattccggtattactgtgtctccatgccttttttccaagtagcagacgtcatgttgcatggtttttgatatttatatgtaagtttttcaaattttgcttaattttaaaatttattattttgatcttgaattatttataaactggaaagtggtttgattattgtgagtcaaaactctaagtggttaaaaattagtatgaattttttagcttcttaatgaatatggatttaaaactctccagttcttattttatgaaatgacttgcctttctggtaatacaatgctgattttttagtaattgccttttcattactttgttaagaagaaatgccagctgtttaatcacacctacccctggaaaagaggtaaaccttttgaacagttgaatttcatcagaagctctatagctttttggtgagaggaagtgatactctttattacaagaaacaaggaattaacaaaaataaggaacttgttgctacctttcttttctgttgaacattaaaaataatttggtttgtggactgggcatggtggcttatggaaaagaggtgagcctttgtgaagaacataatggaaaagtgcatgtacgggaaataacagcactttaggtgtagttcaggtgagcaagatgccagatagtttctactaaccatatactctttctgcttcttagcgtcgttgtcactgcttctgtggcttttgggttcaaagtagattatatatattcctaaagcttggtggaggtagtggagctatcacacactcaaatgagcttgtatatttataatacaatatagtattatagtaacagttatcatacactgagatatagtttctgtgcttgtaaaaaattcttgaagtgaggccgggtgcggtggctcatgcctgtaatcccaacgctttgggacgccgaggcgggtggatcatgaggtcaaaagattgagaccatcctggccaacatggtgaaaccccgtctctactagaaatacaaaaattagctgggtgtgggggcgtgcgcctgtagtcccagctacttgggaggctgaggcaggagaattgcttgaacccaggaggcagaggttgcagtaagccaagatcgtgccactgcactccagccttggtgacagagcaagactccgtctccaaaaaaaagaaaaaaaaatttcttgaagtggaatgatgtacaccaaatacccactttatagataattacagggatggtgaaaaattagtaaatagcttcacaaaagaggcagcgtgatacctttagtgttttctagaatttttttctggatattatatgtaagaatttattgtttgagggaaatacgaggtttcattgtttaaaatcaagagtgtattgtttactgttttacagtattatttaatatccaactggtctccaatctccattacatagggactgtacagagcctgtgaagatgtatgaatggtatcttttataatccacaatacatttctggtaagatggaatcactacctctgatcacatatcaggctaacgatagagaaagcattaggtttaagttgagggctaagaactggtttgtttaaaggtttaaattgttggaaaagagcatttgccttctttaatgaatgatggtctcacaattcagttgactttgacctaatatttaagaatataaatatattttatttgaaaggctgagtgttgccctcaaacacttgctaaaactgcctagggcaggattcattagggcttgcagacaatgtcacctaaattgctgaatgtactcattataatatgatatctgacaaaggtagtacagcgtttctgagtcatttgggaccaactgcagtggttgtttaaaatgctggttcctgcacacaattctctatctactgaagcacatctgttttctttgtttgttttgctttgctttttgtttttaaagtttcccccagtgattccagtgcacctgaaaagttgagaaccacaggcttagtggtacgttggggtttcccacgctaggctgcatagcattataacctgggaacgttaaaaaaaatacagacattcttgattcttagtgtagttatgatgtggatcctacgtattttttaaaaaactctccagataattttgatgtcacgagtcactagtatagactatctatctagtgagttgtattataagcgatgaaatactttaaaagctacccagtaactcttgggattaattttatgaaataaattctgagctgctgcttttgatatagtcagacttaagactgaaccccagtagacaggcaatagatatagaattctggttagctaattgaacttttgtgacctgtttaaaaacaaatcaaatttattgaacaaatgacaaggcacaaatactttcagaattgtatttcagttttgaagatttaaaaaaaatgtgaaaataaatatatattagtatcctttattttaaagtcaattgtaaaccagaagtactgttattttggtgattaaaatccaaaactttagctgtatttcagtaacaaaaacataccttactagactgtgatggctcacacctgtaatcccagtgctttgggaggctgaggtgggaagattctttgagcccaggagttcaaggctgcagtgaattctgatcgcaccactgaactccagcccgtatgacagagtgagaccctgtttctaaaaacaaaacaaacaaacaaacaaacaacgtatcttactgactaaactggaatggaaatcttataattagtgttgtatttttctgcaaaatagtgaattggtacttgggagacttctgttctttgttgaaaaaaattgcctttgttttgaaattatatcacctgtgttctgaactaaaatgatgggagttcattttgtatttactttgcagtaagtatcatgtaaatatgcaaatgttgaatgtaatatagattgtgtcctcattgagtttttgggtgatacagtttataaatataacaattatacaccctcatacattcgtctgattttgagcttgtaagatgagaactgctttttacacatttaataaaaaaaggtctctgaatta

SEQ ID NO: 21490 - DNA, 827 bp, Homo sapiens
  source 1..827: mol_type = unassigned DNA
gtgacacagcgaagatggcgtcgcccggctgcctgtggctcttggctgtggctctcctgccatggacctgcgcttctcgggcgctgcagcatctggacccgccggcgccgctgccgttggtgatctggcatgggatggggtctcgttatgttgcccaaactggtctcgaactcttggcctcaagcaatcctcctgcctcgtcttaccaaagcgctgggatgataggagacagctgttgcaatcccttaagcatgggtgctattaaaaaaatggtggagaagaaaatacctggaatttacgtcttatctttagagattgggaagaccctgatggaggacgtggagaacagcttcttcttgaatgtcaattcccaagtaacaacagtgtgtcaggcacttgctaaggatcctaaattgcagcaaggctacaatgctatgggattctcccagggaggccaatttctgagggcagtggctcagagatgcccttcacctcccatgatcaatctgatctcggttgggggacaacatcaaggtgtttttggactccctcgatgcccaggagagagctctcacatctgtgacttcatccgaaaaacactgaatgctggggcgtactccaaagttgttcaggaacgcctcgtgcaagccgaatactggcatgaccccataaaggaggatgtgtatcgcaaccacagcatcttcttggcagatataaatcaggagcggggtatcaatgagtcctacaagaaaaacctgatggccctgaagaagtttgtgatggtgaaattcctcaatgattccattgtggaccctgtagattcggag

SEQ ID NO: 21491 - DNA, 2740 bp, Homo sapiens
  source 1..2740: mol_type = unassigned DNA
atgtttcttgcaaaggcagtacagggcagtggtgaagagcaacgactttggaaccaccaatttgctatctctgtgaccttgggcaccttactcagtgccaattcgcagtgcctcagtgtcctcacctgtcagggggagaagtgcatacagcattgttatgaagagtgaattagttaaaggttgtaagaatagtgcctgatagcatctgatcagcactgaatatatgttagcaattattttgattcaccgcagagggcggtctacgagagcgcagagccccactcggccagcggggtctggcgggggacctgtcgcgctgaaagctccagggtagggccgacgcccatcaggctgggcatccgttcgggatgcgcaggttgcgatctgcaaccggcggcgccacgcccaggcgggcggagcgcggttcccggagtctcgcgcccgcggtcatgtgacacagcgaagatggcgtcgcccggctgcctgtggctcttggctgtggctctcctgccatggacctgcgcttctcgggcgctgcagcatctggacccgccggcgccgctgccgttggtgatctggcatgggatgggagacagctgttgcaatcccttaagcatgggtgctattaaaaaaatggtggagaagaaaatacctggaatttacgtcttatctttagagattgggaagaccctgatggaggacgtggagaacagcttcttcttgaatgtcaattcccaagtaacaacagtgtgtcaggcacttgctaaggatcctaaattgcagcaaggctacaatgctatgggattctcccagggaggccaatttctgagggcagtggctcagagatgcccttcacctcccatgatcaatctgatctcggttgggggacaacatcaaggtgtttttggactccctcgatgcccaggagagagctctcacatctgtgacttcatccgaaaaacactgaatgctggggcgtactccaaagttgttcaggaacgcctcgtgcaagccgaatactggcatgaccccataaaggaggatgtgtatcgcaaccacagcatcttcttggcagatataaatcaggagcggggtatcaatgagtcctacaagaaaaacctgatggccctgaagaagtttgtgatggtgaaattcctcaatgattccattgtggaccctgtagattcggagtggtttggattttacagaagtggccaagccaaggaaaccattcccttacaggagacctccctgtacacacaggaccgcctggggctaaaggaaatggacaatgcaggacagctagtgtttctggctacagaaggggaccatcttcagttgtctgaagaatggttttatgcccacatcataccattccttggatgaaacccgtatagttcacaatagagctcagggagcccctaactcttccaaaccacatgggagacagtttccttcatgcccaagcctgagctcagatccagcttgcaactaatccttctatcatctaacatgccctacttggaaagatctaagatctgaatcttatcctttgccatcttctgttaccatatggtgttgaatgcaagtttaattaccatggagattgttttacaaacttttgatgtggtcaagttcagttttagaaaagggagtctgttccagatcagtgccagaactgtgcccaggcccaaaggagacaactaactaaagtagtgagatagattctaagggcaaacatttttccaagtcttgccatatttcaagcaaagaggtgcccaggcctgaggtactcacataaatgctttgttttgctggtgatttaaccagtgcttggaaaaatcttgcttggctatttctgcatcatttcttaaggctgccttcctctctcagtacgttgccctctgtgctatcatcttatcatcaattattagacaaatcccactggcctacagtcttgcttctgcagcacccactttgtctcctcaggtagtgatgaattagttgctgtcacaaaaggagggaagtagcacccaaattaagttgcttaagagaggaaatgtacatcttgtataacttagggagcgaagaaaatgtaggcgcgaaagtgaaaagtgaggcagctagttcttcctattccattctcgaccaacctgccctttcttaatatgactagtggtcttgatgctagagtcaacttactctgttgctggctttagcagagaataggaggaaccatatgaaaaagatcaggctttctgacttccatccccaaaacacatttaccagcatactccaaactgtttctgatgtgttccatgagaaaaggattgtttgctcaaaaagcttggaaaatactacacactccctttctccttctggagatcaacccacattagagtgtctaaggactcctgagaattcctgttacagtaaacaaaactaacgtaatctaccatttcctacactatttgagcatggaaatcatagtccccactctgtgaaaacttaacgctttttggaagacatttctgtagcatgtcagtttggagaaatgatgagctacgccttgatgaaagaaccgtgttggtgctgctaagtttagccattatggtttttcctttctctctcttaagccttattcttcaactaaaagatgaggattaagagcaagaagttgggggggatgtgaaaataattttatgaggttgtctaaaataaagagtagtttcttatcctt

SEQ ID NO: 21492 - DNA, 849 bp, Homo sapiens
  source 1..849: mol_type = unassigned DNA
gtgacacagcgaagatggcgtcgcccggctgcctgtggctcttggctgtggctctcctgccatggacctgcgcttctcgggcgctgcagcatctggacccgccggcgccgctgccgttggtgatctggcatgggatgggtgtttttggactccctcgatgcccaggagagagctctcacatctgtgacttcatccgaaaaacactgaatgctggggcgtactccaaagttgttcaggaacgcctcgtgcaagccgaatactggcatgaccccataaaggaggatgtgtatcgcaaccacagcatcttcttggcagatataaatcaggagcggggtatcaatgagtcctacaagaaaaacctgatggccctgaagaagtttgtgatggtgaaattcctcaatgattccattgtggaccctgtagattcggagtggtttggattttacagaagtggccaagccaaggaaaccattcccttacaggagacctccctgtacacacaggaccgcctggggctaaaggaaatggacaatgcaggacagctagtgtttctggctacagaaggggaccatcttcagttgtctgaagaatggttttatgcccacatcataccattccttggatgaaacccgtatagttcacaatagagctcagggagcccctaactcttccaaaccacatgggagacagtttccttcatgcccaagcctgagctcagatccagcttgcaactaatccttctatcatctaacatgccctacttggaaagatctaagatctgaatcttatcctttgccatcttctgttaccatatggtgttgaatgcaagtttaattaccatggagattg

SEQ ID NO: 21493 - DNA, 1836 bp, Homo sapiens
  source 1..1836: mol_type = unassigned DNA
agcgaagatggcgtcgcccggctgcctgtggctcttggctgtggctctcctgccatggacctgcgcttctcgggcgctgcagcatctggacccgccggcgccgctgccgttggtgatctggcatgggatgggagacagctgttgcaatcccttaagcatgggtgctattaaaaaaatggtggagaagaaaatacctggaatttacgtcttatctttagagattgggaagaccctgatggaggacgtggagaacagcttcttcttgaatgtcaattcccaagtaacaacagtgtgtcaggcacttgctaaggatcctaaattgcagcaaggctacaatgctatgggattctcccagggaggccaatttctgagggcagtggctcagagatgcccttcacctcccatgatcaatctgatctcggttgggggacaacatcaaggtgtttttggactccctcgatgcccaggagagagctctcacatctgtgacttcatccgaaaaacactgaatgctggggcgtactccaaagttgttcaggaacgcctcgtgcaagccgaatactggcatgaccccataaaggaggatgtgtatcgcaaccacagcatcttcttggcagatataaatcaggagcggggtatcaatgagtcctacaagaaaaacctgatggccctgaagaagtttgtgatggtgaaattcctcaatgattccattgtggaccctgtagattcggagtggtttggattttacagaagtggccaagccaaggaaaccattcccttacaggagacctccctgtacacacaggaccgcctggggctaaaggaaatggacaatgcaggacagctagtgtttctggctacagaaggggaccatcttcagttgtctgaagaatggttttatgcccacatcataccattccttggatgaaacccgtatagttcacaatagagctcagggagcccctaactcttccaaaccacatgggagacagtttccttcatgcccaagcctgagctcagatccagcttgcaactaatccttctatcatctaacatgccctacttggaaagatctaagatctgaatcttatcctttgccatcttctgttaccatatggtgttgaatgcaagtttaattaccatggagattgttttacaaacttttgatgtggtcaagttcagttttagaaaagggagtctgttccagatcagtgccagaactgtgcccaggcccaaaggagacaactaactaaagtagtgagatagattctaagggcaaacatttttccaagtcttgccatatttcaagcaaagaggtagtgatgaattagttgctgtcacaaaaggagggaagtagcacccaaattaagttgcttaagagaggaaatgtacatcttgtataacttagggagcgaagaaaatgtaggcgcgaaagtgaaaagtgaggcagctagttcttcctattccattctcgaccaacctgccctttcttaatatgactagtggtcttgatgctagagtcaacttactctgttgctggctttagcagagaataggaggaaccatatgaaaaagatcaggctttctgacttccatccccaaaacacatttaccagcatactccaaactgtttctgatgtgttccatgagaaaaggattgtttgctcaaaaagcttggaaaatactacacactccctttctccttctggagatcaacccacattagagtgtctaaggactcctgagaattcctgttacagtaaacaaaactaacgtaatctaccatttcctacactatttgagcatggaaatcatagtccccactctgtgaaaact

SEQ ID NO: 21494 - DNA, 2202 bp, Homo sapiens
  source 1..2202: mol_type = unassigned DNA
ggaagtggggagaatcaaggcggggaaatcggacttttgggtcgctgggggcaacgaagcctggagaggccttctttccattcccagaatatgtttgctgctttttcctctccccactggcctaaatggatcgctccgcctgtttcctccccagcacctagggcgcaatggaatattccattgcccctcctgtcctgggtctgtgttgcggggaacgctcgcgcggttgccagagaaagccccggacgtgacggatttgcgcgaccccaagcagcccgcccttccccctcccatccgtcattcccctgcgctctctttcctcacccttccccccgccaccgtgggttccagacttgggataagtaaacagcgggtggagcgaggcctacggacccaggccaggtgggagtctgcactcttcaaggggcctgggctgctgctcacgggtattaaagaactccgcgttgttcatggctgaggcgatgcattaggaagatcctggacctagagaacaagtcccccgaacgctgagttggaggcgggacttcgggtgcgcgttggcgggagcatgctggggctctgcgggcagcggctccccgcggcgtgggtcctgcttctgttgcctttcctgccgctgctgctgcttgcagcccccgcgccccaccgcgcgtcctacaagccggtcatcgtggtgcatgggctcttcgacagctcgtacagcttccgccacctgctggaatacatcaatgagacacaccccgggactgtggtgacagtgctcgatctcttcgatgggagagagagcttgcgacccctgtgggaacaggtgcaagggttccgagaggctgtggtccccatcatggcaaaggcccctcaaggggtgcatctcatctgctactcgcaggggggccttgtgtgccgggctctgctttctgtcatggatgatcacaacgtggattctttcatctccctctcctctccacagatgggacagtatggagacacggactacttgaagtggctgttccccacctccatgcggtctaacctctatcggatctgctatagcccctggggccaggaattctccatctgcaactactggcatgatccccaccacgatgacttgtacctcaatgccagcagcttcctggccctgatcaatggggaaagagaccatcccaatgccacagtatggcggaagaactttctgcgtgtgggccacctggtgctgattgggggccctgatgatggtgttattactccctggcagtccagcttctttggtttctatgatgcaaatgagaccgtcctggagatggaggagcaactggtttatctgcgggattcttttgggttgaagactctattggcccggggggccatagtgaggtgtccaatggccggtatctcccacacagcctggcactccaaccgtaccctttatgagacctgcattgaaccttggctctcctgaggatatattcaggggtccccaggaactcctcggtccagagaccaagtggtggccttggaaagcagatgtcaggctttggtgtgcctgtgaccacctcattgctcccatattatcccccatttttagtagagacggggttttagtagagacttggcctcccagaacccccttcctctgctcctccatgaatgacaattccaggcctcccctacctcatgtcctctcatttgggggattgctccgtgctgtccctttctctcaaggccgaagttgggaagtgagaaaccatgtttttaacttgtggctgcttttgctgctgctgctcctccgtatctggctgtatgggtggagaacccaccccctgcccaccacaggggtctccttccaggccactcaggacatttttagcttctctcctccccatgttcccttttttctctaaagtcccctgacatcagccctcccaactcctaagagggactacccatgagagtggggttctgaggctcccctatggggacagttccgttcttgaagtgtcagtgttggggaatatctgtggcctatgaggcccatctcaggtttggggatcccccagtccctatgatcagtgttggagtacccccctgggagagcctagtttctttgaggccccaggccctcttttaactacctttgaataggtgttatccctgtatttatggaaataaagttccatttcctca

SEQ ID NO: 21495 - DNA, 1759 bp, Homo sapiens
  source 1..1759: mol_type = unassigned DNA
ggagtagagtagggcaggagaaactgggccaggctgcacttagctcaaggggcctcgaggactctctgcgtctctggagacaagggcactacacgcacttcagaatgaagagttgcgggagcatgctggggctctgcgggcagcggctccccgcggcgtgggtcctgcttctgttgcctttcctgccgctgctgctgcttgcagcccccgcgccccaccgcgcgtcctacaagccggtcatcgtggtgcatgggctcttcgacagctcgtacagcttccgccacctgctggaatacatcaatgagacacaccccgggactgtggtgacagtgctcgatctcttcgatgggagagagagcttgcgacccctgtgggaacaggtgcaagggttccgagaggctgtggtccccatcatggcaaaggcccctcaaggggtgcatctcatctgctactcgcaggggggccttgtgtgccgggctctgctttctgtcatggatgatcacaacgtggattctttcatctccctctcctctccacagatgggacagtatggagacacggactacttgaagtggctgttccccacctccatgcggtctaacctctatcggatctgctatagcccctggggccaggaattctccatctgcaactactggcatgatccccaccacgatgacttgtacctcaatgccagcagcttcctggccctgatcaatggggaaagagaccatcccaatgccacagtatggcggaagaactttctgcgtgtgggccacctggtgctgattgggggccctgatgatggtgttattactccctggcagtccagcttctttggtttctatgatgcaaatgagaccgtcctggagatggaggagcaactggtttatctgcgggattcttttgggttgaagactctattggcccggggggccatagtgaggtgtccaatggccggtatctcccacacagcctggcactccaaccgtaccctttatgagacctgcattgaaccttggctctcctgaggatatattcaggggtccccaggaactcctcggtccagagaccaagtggtggccttggaaagcagatgtcaggctttggtgtgcctgtgaccacctcattgctcccatattatcccccatttttagtagagacggggttttagtagagacttggcctcccagaacccccttcctctgctcctccatgaatgacaattccaggcctcccctacctcatgtcctctcatttgggggattgctccgtgctgtccctttctctcaaggccgaagttgggaagtgagaaaccatgtttttaacttgtggctgcttttgctgctgctgctcctccgtatctggctgtatgggtggagaacccaccccctgcccaccacaggggtctccttccaggccactcaggacatttttagcttctctcctccccatgttcccttttttctctaaagtcccctgacatcagccctcccaactcctaagagggactacccatgagagtggggttctgaggctcccctatggggacagttccgttcttgaagtgtcagtgttggggaatatctgtggcctatgaggcccatctcaggtttggggatcccccagtccctatgatcagtgttggagtacccccctgggagagcctagtttctttgaggccccaggccctcttttaactacctttgaataggtgttatccctgtatttatggaaataaagttccatttcctcagtg

SEQ ID NO: 21496 - DNA, 1945 bp, Homo sapiens
  source 1..1945: mol_type = unassigned DNA
acggatttgcgcgaccccaagcagcccgcccttccccctcccatccgtcattcccctgcgctctctttcctcacccttccccccgccaccgtgggttccagacttgggataagtaaacagcgggtggagcgaggcctacggacccaggccaggtgggagtctgcactcttcaaggggcctgggctgctgctcacgggtattaaagaactccgcgttgttcatggctgaggcgatgcattaggaagatcctggacctagagaacaagtcccccgaacgctgagttggaggcgggacttcgggcgggagcatgctggggctctgcgggcagcggctccccgcggcgtgggtcctgcttctgttgcctttcctgccgctgctgctgcttgcagcccccgcgccccaccgcgcgtcctacaagccggtcatcgtggtgcatgggctcttcgacagctcgtacagcttccgccacctgctggaatacatcaatgagacacaccccgggactgtggtgacagtgctcgatctcttcgatgggagagagagcttgcgacccctgtgggaacaggtgcaagggttccgagaggctgtggtccccatcatggcaaaggcccctcaaggggtgcatctcatctgctactcgcaggggggccttgtgtgccgggctctgctttctgtcatggatgatcacaacgtggattctttcatctccctctcctctccacagatgggacagtatggagacacggactacttgaagtggctgttccccacctccatgcggtctaacctctatcggatctgctatagcccctggggccaggaattctccatctgcaactactggcatgatccccaccacgatgacttgtacctcaatgccagcagcttcctggccctgatcaatggggaaagagaccatcccaatgccacagtatggcggaagaactttctgcgtgtgggccacctggtgctgattgggggccctgatgatggtgttattactccctggcagtccagcttctttggtttctatgatgcaaatgagaccgtcctggagatggaggagcaactggtttatctgcgggattcttttgggttgaagactctattggcccggggggccatagtgaggtgtccaatggccggtatctcccacacagcctggcactccaaccgtaccctttatgagacctgcattgaaccttggctctcctgaggatatattcaggggtccccaggaactcctcggtccagagaccaagtggtggccttggaaagcagatgtcaggctttggtgtgcctgtgaccacctcattgctcccatattatcccccatttttagtagagacggggttttagtagagacttggcctcccagaacccccttcctctgctcctccatgaatgacaattccaggcctcccctacctcatgtcctctcatttgggggattgctccgtgctgtccctttctctcaaggccgaagttgggaagtgagaaaccatgtttttaacttgtggctgcttttgctgctgctgctcctccgtatctggctgtatgggtggagaacccaccccctgcccaccacaggggtctccttccaggccactcaggacatttttagcttctctcctccccatgttcccttttttctctaaagtcccctgacatcagccctcccaactcctaagagggactacccatgagagtggggttctgaggctcccctatggggacagttccgttcttgaagtgtcagtgttggggaatatctgtggcctatgaggcccatctcaggtttggggatcccccagtccctatgatcagtgttggagtacccccctgggagagcctagtttctttgaggccccaggccctcttttaactacctttgaataggtgttatccctgtatttatggaaataaagttccatttcctcagtg

SEQ ID NO: 21497 - DNA, 1754 bp, Homo sapiens
  source 1..1754: mol_type = unassigned DNA
tccgtcattcccctgcgctctctttcctcacccttccccccgccaccgtgggttccagacttgggataagtaaacagcgggtggagcgaggcctacggacccaggccaggcgggagcatgctggggctctgcgggcagcggctccccgcggcgtgggtcctgcttctgttgcctttcctgccgctgctgctgcttgcagcccccgcgccccaccgcgcgtcctacaagccggtcatcgtggtgcatgggctcttcgacagctcgtacagcttccgccacctgctggaatacatcaatgagacacaccccgggactgtggtgacagtgctcgatctcttcgatgggagagagagcttgcgacccctgtgggaacaggtgcaagggttccgagaggctgtggtccccatcatggcaaaggcccctcaaggggtgcatctcatctgctactcgcaggggggccttgtgtgccgggctctgctttctgtcatggatgatcacaacgtggattctttcatctccctctcctctccacagatgggacagtatggagacacggactacttgaagtggctgttccccacctccatgcggtctaacctctatcggatctgctatagcccctggggccaggaattctccatctgcaactactggcatgatccccaccacgatgacttgtacctcaatgccagcagcttcctggccctgatcaatggggaaagagaccatcccaatgccacagtatggcggaagaactttctgcgtgtgggccacctggtgctgattgggggccctgatgatggtgttattactccctggcagtccagcttctttggtttctatgatgcaaatgagaccgtcctggagatggaggagcaactggtttatctgcgggattcttttgggttgaagactctattggcccggggggccatagtgaggtgtccaatggccggtatctcccacacagcctggcactccaaccgtaccctttatgagacctgcattgaaccttggctctcctgaggatatattcaggggtccccaggaactcctcggtccagagaccaagtggtggccttggaaagcagatgtcaggctttggtgtgcctgtgaccacctcattgctcccatattatcccccatttttagtagagacggggttttagtagagacttggcctcccagaacccccttcctctgctcctccatgaatgacaattccaggcctcccctacctcatgtcctctcatttgggggattgctccgtgctgtccctttctctcaaggccgaagttgggaagtgagaaaccatgtttttaacttgtggctgcttttgctgctgctgctcctccgtatctggctgtatgggtggagaacccaccccctgcccaccacaggggtctccttccaggccactcaggacatttttagcttctctcctccccatgttcccttttttctctaaagtcccctgacatcagccctcccaactcctaagagggactacccatgagagtggggttctgaggctcccctatggggacagttccgttcttgaagtgtcagtgttggggaatatctgtggcctatgaggcccatctcaggtttggggatcccccagtccctatgatcagtgttggagtacccccctgggagagcctagtttctttgaggccccaggccctcttttaactacctttgaataggtgttatccctgtatttatggaaataaagttccatttcctcagtg

SEQ ID NO: 21498 - DNA, 1759 bp, Homo sapiens
  source 1..1759: mol_type = unassigned DNA
ggagtagagtagggcaggagaaactgggccaggctgcacttagctcaaggggcctcgaggactctctgcgtctctggagacaagggcactacacgcacttcagaatgaagagttgcgggagcatgctggggctctgggggcagcggctccccgcggcgtgggtcctgcttctgttgcctttcctgccgctgctgctgcttgcagcccccgcgccccaccgcgagtcctacaagccggtcatcgtggtgcatgggctcttcgacagctcgtacagcttccgccacctgctggaatacatcaatgagacacaccccgggactgtggtgacagtgctcgatctcttcgatgggagagagagcttgcgacccctgtgggaacaggtgcaagggttccgagaggctgtggtccccatcatggcaaaggcccctcaaggggtgcatctcatctgctactcgcaggggggccttgtgtgccgggctctgctttctgtcatggatgatcacaacgtggattctttcatctccctctcctctccacagatgggacagtatggagacacggactacttgaagtggctgttccccacctccatgcggtctaacctctatcggatctgctatagcccctggggccaggaattctccatctgcaactactggcatgatccccaccacgatgacttgtacctcaatgccagcagcttcctggccctgatcaatggggaaagagaccatcccaatgccacagtatggcggaagaactttctgcgtgtgggccacctggtgctgattgggggccctgatgatggtgttattactccctggcagtccagcttctttggtttctatgatgcaaatgagaccgtcctggagatggaggagcaactggtttatctgcgggattcttttgggttgaagactctattggcccggggggccatagtgaggtgtccaatggccggtatctcccacacagcctggcactccaaccgtaccctttatgagacctgcattgaaccttggctctcctgaggatatattcaggggtccccaggaactcctcggtccagagaccaagtggtggccttggaaagcagatgtcaggctttggtgtgcctgtgaccacctcattgctcccatattatcccccatttttagtagagacggggttttagtagagacttggcctcccagaacccccttcctctgctcctccatgaatgacaattccaggcctcccctacctcatgtcctctcatttgggggattgctccgtgctgtccctttctctcaaggccgaagttgggaagtgagaaaccatgtttttaacttgtggctgcttttgctgctgctgctcctccgtatctggctgtatgggtggagaacccaccccctgcccaccacaggggtctccttccaggccactcaggacatttttagcttctctcctccccatgttcccttttttctctaaagtcccctgacatcagccctcccaactcctaagagggactacccatgagagtggggttctgaggctcccctatggggacagttccgttcttgaagtgtcagtgttggggaatatctgtggcctatgaggcccatctcaggtttggggatcccccagtccctatgatcagtgttggagtacccccctgggagagcctagtttctttgaggccccaggccctcttttaactacctttgaataggtgttatccctgtatttatggaaataaagttccatttcctcagtg

SEQ ID NO: 21499 - DNA, 1759 bp, Homo sapiens
  source 1..1759: mol_type = unassigned DNA
ggagtagagtagggcaggagaaactgggccaggctgcacttagctcaaggggcctcgaggactctctgcgtctctggagacaagggcactacacgcacttcagaatgaagagttgcgggagcatgctggggctctgggggcagcggctccccgcggcgtgggtcctgcttctgttgcctttcctgccgctgctgctgcttgcagcccccgcgccccaccgcgcgtcctacaagccggtcatcgtggtgcatgggctcttcgacagctcgtacagcttccgccacctgctggaatacatcaatgagacacaccccgggactgtggtgacagtgctcgatctcttcgatgggagagagagcttgcgacccctgtgggaacaggtgcaagggttccgagaggctgtggtccccatcatggcaaaggcccctcaaggggtgcatctcatctgctactcgcaggggggccttgtgtgccgggctctgctttctgtcatggatgatcacaacgtggattctttcatctccctctcctctccacagatgggacagtatggagacacggactacttgaagtggctgttccccacctccatgcggtctaacctctatcggatctgctatagcccctggggccaggaattctccatctgcaactactggcatgatccccaccacgatgacttgtacctcaatgccagcagcttcctggccctgatcaatggggaaagagaccatcccaatgccacagtatggcggaagaactttctgcgtgtgggccacctggtgctgattgggggccctgatgatggtgttattactccctggcagtccagcttctttggtttctatgatgcaaatgagaccgtcctggagatggaggagcaactggtttatctgcgggattcttttgggttgaagactctattggcccggggggccatagtgaggtgtccaatggccggtatctcccacacagcctggcactccaaccgtaccctttatgagacctgcattgaaccttggctctcctgaggatatattcaggggtccccaggaactcctcggtccagagaccaagtggtggccttggaaagcagatgtcaggctttggtgtgcctgtgaccacctcattgctcccatattatcccccatttttagtagagacggggttttagtagagacttggcctcccagaacccccttcctctgctcctccatgaatgacaattccaggcctcccctacctcatgtcctctcatttgggggattgctccgtgctgtccctttctctcaaggccgaagttgggaagtgagaaaccatgtttttaacttgtggctgcttttgctgctgctgctcctccgtatctggctgtatgggtggagaacccaccccctgcccaccacaggggtctccttccaggccactcaggacatttttagcttctctcctccccatgttcccttttttctctaaagtcccctgacatcagccctcccaactcctaagagggactacccatgagagtggggttctgaggctcccctatggggacagttccgttcttgaagtgtcagtgttggggaatatctgtggcctatgaggcccatctcaggtttggggatcccccagtccctatgatcagtgttggagtacccccctgggagagcctagtttctttgaggccccaggccctcttttaactacctttgaataggtgttatccctgtatttatggaaataaagttccatttcctcagtg

SEQ ID NO: 21500 - DNA, 2111 bp, Homo sapiens
  source 1..2111: mol_type = unassigned DNA
tcgaggactctctgcgtctctggagacaagggcactacacgcacttcagaatgaagagttcacctagggcgcaatggaatattccattgcccctcctgtcctgggtctgtgttgcggggaacgctcgcgcggttgccagagaaagccccggacgtgacggatttgcgcgaccccaagcagcccgcccttccccctcccatccgtcattcccctgcgctctctttcctcacccttccccccgccaccgtgggttccagacttgggataagtaaacagcgggtggagcgaggcctacggacccaggccaggtgggagtctgcactcttcaaggggcctgggctgctgctcacgggtattaaagaactccgcgttgttcatggctgaggcgatgcattaggaagatcctggacctagagaacaagtcccccgaacgctgagttggaggcgggacttcgggtgcgcgttggcgggagcatgctggggctctgcgggcagcggctccccgcggcgtgggtcctgcttctgttgcctttcctgccgctgctgctgcttgcagcccccgcgccccaccgcgcgtcctacaagccggtcatcgtggtgcatgggctcttcgacagctcgtacagcttccgccacctgctggaatacatcaatgagacacaccccgggactgtggtgacagtgctcgatctcttcgatgggagagagagcttgcgacccctgtgggaacaggtgcaagggttccgagaggctgtggtccccatcatggcaaaggcccctcaaggggtgcatctcatctgctactcgcaggggggccttgtgtgccgggctctgctttctgtcatggatgatcacaacgtggattctttcatctccctctcctctccacagatgggacagtatggagacacggactacttgaagtggctgttccccacctccatgcggtctaacctctatcggatctgctatagcccctggggccaggaattctccatctgcaactactggcatgatccccaccacgatgacttgtacctcaatgccagcagcttcctggccctgatcaatggggaaagagaccatcccaatgccacagtatggcggaagaactttctgcgtgtgggccacctggtgctgattgggggccctgatgatggtgttattactccctggcagtccagcttctttggtttctatgatgcaaatgagaccgtcctggagatggaggagcaactggtttatctgcgggattcttttgggttgaagactctattggcccggggggccatagtgaggtgtccaatggccggtatctcccacacagcctggcactccaaccgtaccctttatgagacctgcattgaaccttggctctcctgaggatatattcaggggtccccaggaactcctcggtccagagaccaagtggtggccttggaaagcagatgtcaggctttggtgtgcctgtgaccacctcattgctcccatattatcccccatttttagtagagacggggttttagtagagacttggcctcccagaacccccttcctctgctcctccatgaatgacaattccaggcctcccctacctcatgtcctctcatttgggggattgctccgtgctgtccctttctctcaaggccgaagttgggaagtgagaaaccatgtttttaacttgtggctgcttttgctgctgctgctcctccgtatctggctgtatgggtggagaacccaccccctgcccaccacaggggtctccttccaggccactcaggacatttttagcttctctcctccccatgttcccttttttctctaaagtcccctgacatcagccctcccaactcctaagagggactacccatgagagtggggttctgaggctcccctatggggacagttccgttcttgaagtgtcagtgttggggaatatctgtggcctatgaggcccatctcaggtttggggatcccccagtccctatgatcagtgttggagtacccccctgggagagcctagtttctttgaggccccaggccctcttttaactacctttgaataggtgttatccctgtatttatggaaataaagttccatttcctcagtg

SEQ ID NO: 21501 - DNA, 1754 bp, Homo sapiens
  source 1..1754: mol_type = unassigned DNA
tccgtcattcccctgcgctctctttcctcacccttccccccgccaccgtgggttccagacttgggataagtaaacagcgggtggagcgaggcctacggacccaggccaggcgggagcatgctggggctctgggggcagcggctccccgcggcgtgggtcctgcttctgttgcctttcctgccgctgctgctgcttgcagcccccgcgccccaccgcgagtcctacaagccggtcatcgtggtgcatgggctcttcgacagctcgtacagcttccgccacctgctggaatacatcaatgagacacaccccgggactgtggtgacagtgctcgatctcttcgatgggagagagagcttgcgacccctgtgggaacaggtgcaagggttccgagaggctgtggtccccatcatggcaaaggcccctcaaggggtgcatctcatctgctactcgcaggggggccttgtgtgccgggctctgctttctgtcatggatgatcacaacgtggattctttcatctccctctcctctccacagatgggacagtatggagacacggactacttgaagtggctgttccccacctccatgcggtctaacctctatcggatctgctatagcccctggggccaggaattctccatctgcaactactggcatgatccccaccacgatgacttgtacctcaatgccagcagcttcctggccctgatcaatggggaaagagaccatcccaatgccacagtatggcggaagaactttctgcgtgtgggccacctggtgctgattgggggccctgatgatggtgttattactccctggcagtccagcttctttggtttctatgatgcaaatgagaccgtcctggagatggaggagcaactggtttatctgcgggattcttttgggttgaagactctattggcccggggggccatagtgaggtgtccaatggccggtatctcccacacagcctggcactccaaccgtaccctttatgagacctgcattgaaccttggctctcctgaggatatattcaggggtccccaggaactcctcggtccagagaccaagtggtggccttggaaagcagatgtcaggctttggtgtgcctgtgaccacctcattgctcccatattatcccccatttttagtagagacggggttttagtagagacttggcctcccagaacccccttcctctgctcctccatgaatgacaattccaggcctcccctacctcatgtcctctcatttgggggattgctccgtgctgtccctttctctcaaggccgaagttgggaagtgagaaaccatgtttttaacttgtggctgcttttgctgctgctgctcctccgtatctggctgtatgggtggagaacccaccccctgcccaccacaggggtctccttccaggccactcaggacatttttagcttctctcctccccatgttcccttttttctctaaagtcccctgacatcagccctcccaactcctaagagggactacccatgagagtggggttctgaggctcccctatggggacagttccgttcttgaagtgtcagtgttggggaatatctgtggcctatgaggcccatctcaggtttggggatcccccagtccctatgatcagtgttggagtacccccctgggagagcctagtttctttgaggccccaggccctcttttaactacctttgaataggtgttatccctgtatttatggaaataaagttccatttcctcagtg

SEQ ID NO: 21502 - DNA, 1945 bp, Homo sapiens
  source 1..1945: mol_type = unassigned DNA
acggatttgcgcgaccccaagcagcccgcccttccccctcccatccgtcattcccctgcgctctctttcctcacccttccccccgccaccgtgggttccagacttgggataagtaaacagcgggtggagcgaggcctacggacccaggccaggtgggagtctgcactcttcaaggggcctgggctgctgctcacgggtattaaagaactccgcgttgttcatggctgaggcgatgcattaggaagatcctggacctagagaacaagtcccccgaacgctgagttggaggcgggacttcgggcgggagcatgctggggctctgggggcagcggctccccgcggcgtgggtcctgcttctgttgcctttcctgccgctgctgctgcttgcagcccccgcgccccaccgcgagtcctacaagccggtcatcgtggtgcatgggctcttcgacagctcgtacagcttccgccacctgctggaatacatcaatgagacacaccccgggactgtggtgacagtgctcgatctcttcgatgggagagagagcttgcgacccctgtgggaacaggtgcaagggttccgagaggctgtggtccccatcatggcaaaggcccctcaaggggtgcatctcatctgctactcgcaggggggccttgtgtgccgggctctgctttctgtcatggatgatcacaacgtggattctttcatctccctctcctctccacagatgggacagtatggagacacggactacttgaagtggctgttccccacctccatgcggtctaacctctatcggatctgctatagcccctggggccaggaattctccatctgcaactactggcatgatccccaccacgatgacttgtacctcaatgccagcagcttcctggccctgatcaatggggaaagagaccatcccaatgccacagtatggcggaagaactttctgcgtgtgggccacctggtgctgattgggggccctgatgatggtgttattactccctggcagtccagcttctttggtttctatgatgcaaatgagaccgtcctggagatggaggagcaactggtttatctgcgggattcttttgggttgaagactctattggcccggggggccatagtgaggtgtccaatggccggtatctcccacacagcctggcactccaaccgtaccctttatgagacctgcattgaaccttggctctcctgaggatatattcaggggtccccaggaactcctcggtccagagaccaagtggtggccttggaaagcagatgtcaggctttggtgtgcctgtgaccacctcattgctcccatattatcccccatttttagtagagacggggttttagtagagacttggcctcccagaacccccttcctctgctcctccatgaatgacaattccaggcctcccctacctcatgtcctctcatttgggggattgctccgtgctgtccctttctctcaaggccgaagttgggaagtgagaaaccatgtttttaacttgtggctgcttttgctgctgctgctcctccgtatctggctgtatgggtggagaacccaccccctgcccaccacaggggtctccttccaggccactcaggacatttttagcttctctcctccccatgttcccttttttctctaaagtcccctgacatcagccctcccaactcctaagagggactacccatgagagtggggttctgaggctcccctatggggacagttccgttcttgaagtgtcagtgttggggaatatctgtggcctatgaggcccatctcaggtttggggatcccccagtccctatgatcagtgttggagtacccccctgggagagcctagtttctttgaggccccaggccctcttttaactacctttgaataggtgttatccctgtatttatggaaataaagttccatttcctcagtg

SEQ ID NO: 21503 - DNA, 2111 bp, Homo sapiens
  source 1..2111: mol_type = unassigned DNA
tcgaggactctctgcgtctctggagacaagggcactacacgcacttcagaatgaagagttcacctagggcgcaatggaatattccattgcccctcctgtcctgggtctgtgttgcggggaacgctcgcgcggttgccagagaaagccccggacgtgacggatttgcgcgaccccaagcagcccgcccttccccctcccatccgtcattcccctgcgctctctttcctcacccttccccccgccaccgtgggttccagacttgggataagtaaacagcgggtggagcgaggcctacggacccaggccaggtgggagtctgcactcttcaaggggcctgggctgctgctcacgggtattaaagaactccgcgttgttcatggctgaggcgatgcattaggaagatcctggacctagagaacaagtcccccgaacgctgagttggaggcgggacttcgggtgcgcgttggcgggagcatgctggggctctgggggcagcggctccccgcggcgtgggtcctgcttctgttgcctttcctgccgctgctgctgcttgcagcccccgcgccccaccgcgagtcctacaagccggtcatcgtggtgcatgggctcttcgacagctcgtacagcttccgccacctgctggaatacatcaatgagacacaccccgggactgtggtgacagtgctcgatctcttcgatgggagagagagcttgcgacccctgtgggaacaggtgcaagggttccgagaggctgtggtccccatcatggcaaaggcccctcaaggggtgcatctcatctgctactcgcaggggggccttgtgtgccgggctctgctttctgtcatggatgatcacaacgtggattctttcatctccctctcctctccacagatgggacagtatggagacacggactacttgaagtggctgttccccacctccatgcggtctaacctctatcggatctgctatagcccctggggccaggaattctccatctgcaactactggcatgatccccaccacgatgacttgtacctcaatgccagcagcttcctggccctgatcaatggggaaagagaccatcccaatgccacagtatggcggaagaactttctgcgtgtgggccacctggtgctgattgggggccctgatgatggtgttattactccctggcagtccagcttctttggtttctatgatgcaaatgagaccgtcctggagatggaggagcaactggtttatctgcgggattcttttgggttgaagactctattggcccggggggccatagtgaggtgtccaatggccggtatctcccacacagcctggcactccaaccgtaccctttatgagacctgcattgaaccttggctctcctgaggatatattcaggggtccccaggaactcctcggtccagagaccaagtggtggccttggaaagcagatgtcaggctttggtgtgcctgtgaccacctcattgctcccatattatcccccatttttagtagagacggggttttagtagagacttggcctcccagaacccccttcctctgctcctccatgaatgacaattccaggcctcccctacctcatgtcctctcatttgggggattgctccgtgctgtccctttctctcaaggccgaagttgggaagtgagaaaccatgtttttaacttgtggctgcttttgctgctgctgctcctccgtatctggctgtatgggtggagaacccaccccctgcccaccacaggggtctccttccaggccactcaggacatttttagcttctctcctccccatgttcccttttttctctaaagtcccctgacatcagccctcccaactcctaagagggactacccatgagagtggggttctgaggctcccctatggggacagttccgttcttgaagtgtcagtgttggggaatatctgtggcctatgaggcccatctcaggtttggggatcccccagtccctatgatcagtgttggagtacccccctgggagagcctagtttctttgaggccccaggccctcttttaactacctttgaataggtgttatccctgtatttatggaaataaagttccatttcctcagtg

SEQ ID NO: 21504 - DNA, 1754 bp, Homo sapiens
  source 1..1754: mol_type = unassigned DNA
tccgtcattcccctgcgctctctttcctcacccttccccccgccaccgtgggttccagacttgggataagtaaacagcgggtggagcgaggcctacggacccaggccaggcgggagcatgctggggctctgggggcagcggctccccgcggcgtgggtcctgcttctgttgcctttcctgccgctgctgctgcttgcagcccccgcgccccaccgcgcgtcctacaagccggtcatcgtggtgcatgggctcttcgacagctcgtacagcttccgccacctgctggaatacatcaatgagacacaccccgggactgtggtgacagtgctcgatctcttcgatgggagagagagcttgcgacccctgtgggaacaggtgcaagggttccgagaggctgtggtccccatcatggcaaaggcccctcaaggggtgcatctcatctgctactcgcaggggggccttgtgtgccgggctctgctttctgtcatggatgatcacaacgtggattctttcatctccctctcctctccacagatgggacagtatggagacacggactacttgaagtggctgttccccacctccatgcggtctaacctctatcggatctgctatagcccctggggccaggaattctccatctgcaactactggcatgatccccaccacgatgacttgtacctcaatgccagcagcttcctggccctgatcaatggggaaagagaccatcccaatgccacagtatggcggaagaactttctgcgtgtgggccacctggtgctgattgggggccctgatgatggtgttattactccctggcagtccagcttctttggtttctatgatgcaaatgagaccgtcctggagatggaggagcaactggtttatctgcgggattcttttgggttgaagactctattggcccggggggccatagtgaggtgtccaatggccggtatctcccacacagcctggcactccaaccgtaccctttatgagacctgcattgaaccttggctctcctgaggatatattcaggggtccccaggaactcctcggtccagagaccaagtggtggccttggaaagcagatgtcaggctttggtgtgcctgtgaccacctcattgctcccatattatcccccatttttagtagagacggggttttagtagagacttggcctcccagaacccccttcctctgctcctccatgaatgacaattccaggcctcccctacctcatgtcctctcatttgggggattgctccgtgctgtccctttctctcaaggccgaagttgggaagtgagaaaccatgtttttaacttgtggctgcttttgctgctgctgctcctccgtatctggctgtatgggtggagaacccaccccctgcccaccacaggggtctccttccaggccactcaggacatttttagcttctctcctccccatgttcccttttttctctaaagtcccctgacatcagccctcccaactcctaagagggactacccatgagagtggggttctgaggctcccctatggggacagttccgttcttgaagtgtcagtgttggggaatatctgtggcctatgaggcccatctcaggtttggggatcccccagtccctatgatcagtgttggagtacccccctgggagagcctagtttctttgaggccccaggccctcttttaactacctttgaataggtgttatccctgtatttatggaaataaagttccatttcctcagtg

SEQ ID NO: 21505 - DNA, 1945 bp, Homo sapiens
  source 1..1945: mol_type = unassigned DNA
acggatttgcgcgaccccaagcagcccgcccttccccctcccatccgtcattcccctgcgctctctttcctcacccttccccccgccaccgtgggttccagacttgggataagtaaacagcgggtggagcgaggcctacggacccaggccaggtgggagtctgcactcttcaaggggcctgggctgctgctcacgggtattaaagaactccgcgttgttcatggctgaggcgatgcattaggaagatcctggacctagagaacaagtcccccgaacgctgagttggaggcgggacttcgggcgggagcatgctggggctctgggggcagcggctccccgcggcgtgggtcctgcttctgttgcctttcctgccgctgctgctgcttgcagcccccgcgccccaccgcgcgtcctacaagccggtcatcgtggtgcatgggctcttcgacagctcgtacagcttccgccacctgctggaatacatcaatgagacacaccccgggactgtggtgacagtgctcgatctcttcgatgggagagagagcttgcgacccctgtgggaacaggtgcaagggttccgagaggctgtggtccccatcatggcaaaggcccctcaaggggtgcatctcatctgctactcgcaggggggccttgtgtgccgggctctgctttctgtcatggatgatcacaacgtggattctttcatctccctctcctctccacagatgggacagtatggagacacggactacttgaagtggctgttccccacctccatgcggtctaacctctatcggatctgctatagcccctggggccaggaattctccatctgcaactactggcatgatccccaccacgatgacttgtacctcaatgccagcagcttcctggccctgatcaatggggaaagagaccatcccaatgccacagtatggcggaagaactttctgcgtgtgggccacctggtgctgattgggggccctgatgatggtgttattactccctggcagtccagcttctttggtttctatgatgcaaatgagaccgtcctggagatggaggagcaactggtttatctgcgggattcttttgggttgaagactctattggcccggggggccatagtgaggtgtccaatggccggtatctcccacacagcctggcactccaaccgtaccctttatgagacctgcattgaaccttggctctcctgaggatatattcaggggtccccaggaactcctcggtccagagaccaagtggtggccttggaaagcagatgtcaggctttggtgtgcctgtgaccacctcattgctcccatattatcccccatttttagtagagacggggttttagtagagacttggcctcccagaacccccttcctctgctcctccatgaatgacaattccaggcctcccctacctcatgtcctctcatttgggggattgctccgtgctgtccctttctctcaaggccgaagttgggaagtgagaaaccatgtttttaacttgtggctgcttttgctgctgctgctcctccgtatctggctgtatgggtggagaacccaccccctgcccaccacaggggtctccttccaggccactcaggacatttttagcttctctcctccccatgttcccttttttctctaaagtcccctgacatcagccctcccaactcctaagagggactacccatgagagtggggttctgaggctcccctatggggacagttccgttcttgaagtgtcagtgttggggaatatctgtggcctatgaggcccatctcaggtttggggatcccccagtccctatgatcagtgttggagtacccccctgggagagcctagtttctttgaggccccaggccctcttttaactacctttgaataggtgttatccctgtatttatggaaataaagttccatttcctcagtg

SEQ ID NO: 21506 - DNA, 2111 bp, Homo sapiens
  source 1..2111: mol_type = unassigned DNA
tcgaggactctctgcgtctctggagacaagggcactacacgcacttcagaatgaagagttcacctagggcgcaatggaatattccattgcccctcctgtcctgggtctgtgttgcggggaacgctcgcgcggttgccagagaaagccccggacgtgacggatttgcgcgaccccaagcagcccgcccttccccctcccatccgtcattcccctgcgctctctttcctcacccttccccccgccaccgtgggttccagacttgggataagtaaacagcgggtggagcgaggcctacggacccaggccaggtgggagtctgcactcttcaaggggcctgggctgctgctcacgggtattaaagaactccgcgttgttcatggctgaggcgatgcattaggaagatcctggacctagagaacaagtcccccgaacgctgagttggaggcgggacttcgggtgcgcgttggcgggagcatgctggggctctgggggcagcggctccccgcggcgtgggtcctgcttctgttgcctttcctgccgctgctgctgcttgcagcccccgcgccccaccgcgcgtcctacaagccggtcatcgtggtgcatgggctcttcgacagctcgtacagcttccgccacctgctggaatacatcaatgagacacaccccgggactgtggtgacagtgctcgatctcttcgatgggagagagagcttgcgacccctgtgggaacaggtgcaagggttccgagaggctgtggtccccatcatggcaaaggcccctcaaggggtgcatctcatctgctactcgcaggggggccttgtgtgccgggctctgctttctgtcatggatgatcacaacgtggattctttcatctccctctcctctccacagatgggacagtatggagacacggactacttgaagtggctgttccccacctccatgcggtctaacctctatcggatctgctatagcccctggggccaggaattctccatctgcaactactggcatgatccccaccacgatgacttgtacctcaatgccagcagcttcctggccctgatcaatggggaaagagaccatcccaatgccacagtatggcggaagaactttctgcgtgtgggccacctggtgctgattgggggccctgatgatggtgttattactccctggcagtccagcttctttggtttctatgatgcaaatgagaccgtcctggagatggaggagcaactggtttatctgcgggattcttttgggttgaagactctattggcccggggggccatagtgaggtgtccaatggccggtatctcccacacagcctggcactccaaccgtaccctttatgagacctgcattgaaccttggctctcctgaggatatattcaggggtccccaggaactcctcggtccagagaccaagtggtggccttggaaagcagatgtcaggctttggtgtgcctgtgaccacctcattgctcccatattatcccccatttttagtagagacggggttttagtagagacttggcctcccagaacccccttcctctgctcctccatgaatgacaattccaggcctcccctacctcatgtcctctcatttgggggattgctccgtgctgtccctttctctcaaggccgaagttgggaagtgagaaaccatgtttttaacttgtggctgcttttgctgctgctgctcctccgtatctggctgtatgggtggagaacccaccccctgcccaccacaggggtctccttccaggccactcaggacatttttagcttctctcctccccatgttcccttttttctctaaagtcccctgacatcagccctcccaactcctaagagggactacccatgagagtggggttctgaggctcccctatggggacagttccgttcttgaagtgtcagtgttggggaatatctgtggcctatgaggcccatctcaggtttggggatcccccagtccctatgatcagtgttggagtacccccctgggagagcctagtttctttgaggccccaggccctcttttaactacctttgaataggtgttatccctgtatttatggaaataaagttccatttcctcagtg

SEQ ID NO: 21507 - DNA, 1759 bp, Homo sapiens; identical to SEQ ID NO: 21499
  source 1..1759: mol_type = unassigned DNA

SEQ ID NO: 21508 - DNA, 396 bp, Homo sapiens
  source 1..396: mol_type = unassigned DNA
cacggacctggtgtgggagcgagaggaggtggcttgattgccgggcgtctgttccgagggaggagggtgttgccatctccctcacatgcccttatcacccctttctcaggcgggagcatgctggggctctgggggcagcggctccccgcggcgtgggtcctgcttctgttgcctttcctgccgctgctgctgcttgcagcccccgcgccccaccgcgcgtcctacaagccggtcatcgtggtgcatgggctcttcgacagctcgtacagcttccgccacctgctggaatacatcaatgagggggccttgtgtgccgggctctgctttctgtcatggatgatcacaacgtggattctttcatctccctctcctctccacagatgggacagtatggag

SEQ ID NO: 21509 - DNA, 954 bp, Homo sapiens
  source 1..954: mol_type = unassigned DNA
gactggtcgaaattacgcgggcatgagtcagcgcatccctacgcgccctccgccccttgagggtgggtcgcttatagggaggggagtagagtagggcaggagaaactgggccaggctgcacttagctcaaggggcctcgaggactctctgcgtctctggagacaagggcactacacgcacttcagaatgaagagttacttgggataagtaaacagcgggtggagcgaggcctacggacccaggccaggtgggagtctgcactcttcaaggggcctgggctgctgctcacgggtattaaagaactccgcgttgttcatggctgaggcgatgcattaggaagatcctggacctagagaacaagtcccccgaacgctgagttggaggcgggacttcgggtgcgcgttggcgggagcatgctggggctctgcgggcagcggctccccgcggcgtgggtcctgcttctgttgcctttcctgccgctgctgctgcttgcagcccccgcgccccaccgcgcgtcctacaagccggtcatcgtggtgcatgggctcttcgacagctcgtacagcttccgccacctgctggaatacatcaatgagacacaccccgggactgtggtgacagtgctcgatctcttcgatgggagagagagcttgcgacccctgtgggaacaggtgcaagggttccgagaggctgtggtccccatcatggcaaaggcccctcaaggggtgcatctcatctgctactcgcaggggggccttgtgtgccgggctctgctttctgtcatggatgatcacaacgtggattctttcatctccctctcctctccacagatgggacagtatggagacacggactacttgaagtggctgttccccacctccatgcggtctaacctctatcggatctgctatagcccctggggccaggaattctccatctgcaactactggcatg

SEQ ID NO: 21510 - DNA, 1759 bp, Homo sapiens; identical to SEQ ID NO: 21499
  source 1..1759: mol_type = unassigned DNA

SEQ ID NO: 21511 - DNA, 730 bp, Homo sapiens
  source 1..730: mol_type = unassigned DNA
gctattttgtgacacggacctggtgtgggagcgagaggaggtggcttgattgccgggcgtctgttccgagggaggagggtgttgccatctccctcacatgcccttatcacccctttctcaggcgggagcatgctggggctctgggggcagcggctccccgcggcgtgggtcctgcttctgttgcctttcctgccgctgctgctgcttgcagcccccgcgccccaccgcgagtcctacaagccggtcatcgtggtgcatgggctcttcgacagctcgtacagcttccgccacctgctggaatacatcaatgagacacaccccgggactgtggtgacagtgctcgatctcttcgatgggagagagagcttgcgacccctgtgggaacaggtgcaagggttccgagaggctgtggtccccatcatggcaaaggcccctcaaggggtgcatctcatctgctactcgcaggggggccttgtgtgccgggctctgctttctgtcatggatgatcacaacgtggattctttcatctccctctcctctccacagatgggacagtatggagacacggactacttgaagtggctgttccccacctccatgcggtctaacctctatcggatctgctatagcccctggggccaggaattctccatctgcaactactggcatgatccccaccacgatgacttgtacctcaatgccagcagcttcctggccctgatcaatgggg

SEQ ID NO: 21512 - DNA, 722 bp, Homo sapiens
  source 1..722: mol_type = unassigned DNA
acccttccccccgccaccgtgggttccagacttgggataagtaaacagcgggtggagcgaggcctacggacccaggccaggtgggagtctgcactcttcaaggggcctgggctgctgctcacgggtattaaagaactccgcgttgttcatggctgaggcgatgcattaggaagatcctggacctagagaacaagtcccccgaacgctgagttggaggcgggacttcgggtgcgcgttggcgggagcatgctggggctctgggggcagcggctccccgcggcgtgggtcctgcttctgttgcctttcctgccgctgctgctgcttgcagcccccgcgccccaccgcgagtcctacaagccggtcatcgtggtgcatgggctcttcgacagctcgtacagcttccgccacctgctggaatacatcaatgagatgggacagtatggagacacggactacttgaagtggctgttccccacctccatgcggtctaacctctatcggatctgctatagcccctggggccaggaattctccatctgcaactactggcatgatccccaccacgatgacttgtacctcaatgccagcagcttcctggccctgatcaatggggaaagagaccatcccaatgccacagtatggcggaagaactttctgcgtgtgggccacctggtgctgattgggggccctgatgatggtgttattactccctggcagtccag

SEQ ID NO: 21513 - DNA, 954 bp, Homo sapiens
  source 1..954: mol_type = unassigned DNA
gactggtcgaaattacgcgggcatgagtcagcgcatccctacgcgccctccgccccttgagggtgggtcgcttatagggaggggagtagagtagggcaggagaaactgggccaggctgcacttagctcaaggggcctcgaggactctctgcgtctctggagacaagggcactacacgcacttcagaatgaagagttacttgggataagtaaacagcgggtggagcgaggcctacggacccaggccaggtgggagtctgcactcttcaaggggcctgggctgctgctcacgggtattaaagaactccgcgttgttcatggctgaggcgatgcattaggaagatcctggacctagagaacaagtcccccgaacgctgagttggaggcgggacttcgggtgcgcgttggcgggagcatgctggggctctgggggcagcggctccccgcggcgtgggtcctgcttctgttgcctttcctgccgctgctgctgcttgcagcccccgcgccccaccgcgcgtcctacaagccggtcatcgtggtgcatgggctcttcgacagctcgtacagcttccgccacctgctggaatacatcaatgagacacaccccgggactgtggtgacagtgctcgatctcttcgatgggagagagagcttgcgacccctgtgggaacaggtgcaagggttccgagaggctgtggtccccatcatggcaaaggcccctcaaggggtgcatctcatctgctactcgcaggggggccttgtgtgccgggctctgctttctgtcatggatgatcacaacgtggattctttcatctccctctcctctccacagatgggacagtatggagacacggactacttgaagtggctgttccccacctccatgcggtctaacctctatcggatctgctatagcccctggggccaggaattctccatctgcaactactggcatg

SEQ ID NO: 21514 - DNA, 722 bp, Homo sapiens
  source 1..722: mol_type = unassigned DNA
acccttccccccgccaccgtgggttccagacttgggataagtaaacagcgggtggagcgaggcctacggacccaggccaggtgggagtctgcactcttcaaggggcctgggctgctgctcacgggtattaaagaactccgcgttgttcatggctgaggcgatgcattaggaagatcctggacctagagaacaagtcccccgaacgctgagttggaggcgggacttcgggtgcgcgttggcgggagcatgctggggctctgggggcagcggctccccgcggcgtgggtcctgcttctgttgcctttcctgccgctgctgctgcttgcagcccccgcgccccaccgcgcgtcctacaagccggtcatcgtggtgcatgggctcttcgacagctcgtacagcttccgccacctgctggaatacatcaatgagatgggacagtatggagacacggactacttgaagtggctgttccccacctccatgcggtctaacctctatcggatctgctatagcccctggggccaggaattctccatctgcaactactggcatgatccccaccacgatgacttgtacctcaatgccagcagcttcctggccctgatcaatggggaaagagaccatcccaatgccacagtatggcggaagaactttctgcgtgtgggccacctggtgctgattgggggccctgatgatggtgttattactccctggcagtccag

SEQ ID NO: 21515 - DNA, 954 bp, Homo sapiens; identical to SEQ ID NO: 21513
  source 1..954: mol_type = unassigned DNA

SEQ ID NO: 21516 - DNA, 1945 bp, Homo sapiens
  source 1..1945: mol_type = unassigned DNA
acggatttgcgcgaccccaagcagcccgcccttccccctcccatccgtcattcccctgcgttctctttcctcacccttccccccgccaccgtgggttccagacttgggataagtaaacagcgggtggagcgaggcctacggacccaggccaggtgggagtctgcactcttcaaggggcctgggctgctgctcacgggtattaaagaactccgcgttgttcatggctgaggcgatgcattaggaagatcctggacctagagaacaagtcccccgaacgctgagttggaggcgggacttcgggcgggagcatgctggggctctgggggcagcggctccccgcggcgtgggtcctgcttctgttgcctttcctgccgctgctgctgcttgcagcccccgcgccccaccgcgcgtcctacaagccggtcatcgtggtgcatgggctcttcgacagctcgtacagcttccgccacctgctggaatacatcaatgagacacaccccgggactgtggtgacagtgctcgatctcttcgatgggagagagagcttgcgacccctgtgggaacaggtgcaagggttccgagaggctgtggtccccatcatggcaaaggcccctcaaggggtgcatctcatctgctactcgcaggggggccttgtgtgccgggctctgctttctgtcatggatgatcacaacgtggattctttcatctccctctcctctccacagatgggacagtatggagacacggactacttgaagtggctgttccccacctccatgcggtctaacctctatcggatctgctatagcccctggggccaggaattctccatctgcaactactggcatgatccccaccacgatgacttgtacctcaatgccagcagcttcctggccctgatcaatggggaaagagaccatcccaatgccacagtatggcggaagaactttctgcgtgtgggccacctggtgctgattgggggccctgatgatggtgttattactccctggcagtccagcttctttggtttctatgatgcaaatgagaccgtcctggagatggaggagcaactggtttatctgcgggattcttttgggttgaagactctattggcccggggggccatagtgaggtgtccaatggccggtatctcccacacagcctggcactccaaccgtaccctttatgagacctgcattgaaccttggctctcctgaggatatattcaggggtccccaggaactcctcggtccagagaccaagtggtggccttggaaagcagatgtcaggctttggtgtgcctgtgaccacctcattgctcccatattatcccccatttttagtagagacggggttttagtagagacttggcctcccagaacccccttcctctgctcctccatgaatgacaattccaggcctcccctacctcatgtcctctcatttgggggattgctccgtgctgtccctttctctcaaggccgaagttgggaagtgagaaaccatgtttttaacttgtggctgcttttgctgctgctgctcctccgtatctggctgtatgggtggagaacccaccccctgcccaccacaggggtctccttccaggccactcaggacatttttagcttctctcctccccatgttcccttttttctctaaagtcccctgacatcagccctcccaactcctaagagggactacccatgagagtggggttctgaggctcccctatggggacagttccgttcttgaagtgtcagtgttggggaatatctgtggcctatgaggcccatctcaggtttggggatcccccagtccctatgatcagtgttggagtacccccctgggagagcctagtttctttgaggccccaggccctcttttaactacctttgaataggtgttatccctgtatttatggaaataaagttccatttcctcagtg

SEQ ID NO: 21517 - DNA, 2128 bp, Homo sapiens
  source 1..2128: mol_type = unassigned DNA
acttagctcaaggggcctcgaggactctctgcgtctctggagacaagggcactacacgcacttcagaatgaagagttcacctagggcgcaatggaatattccattgcccctcctgtcctgggtctgtgttgcggggaacgctcgcgcggttgccagagaaagccccggacgtgacggatttgcgcgaccccaagcagcccgcccttccccctcccatccgtcattcccctgcgctctctttcctcacccttccccccgccaccgtgggttccagacttgggataagtaaacagcgggtggagcgaggcctacggacccaggccaggtgggagtctgcactcttcaaggggcctgggctgctgctcacgggtattaaagaactccgcgttgttcatggctgaggcgatgcattaggaagatcctggacctagagaacaagtcccccgaacgctgagttggaggcgggacttcgggtgcgcgttggcgggagcatgctggggctctgggggcagcggctccccgcggcgtgggtcctgcttctgttgcctttcctgccgctgctgctgcttgcagcccccgcgccccaccgcgcgtcctacaagccggtcatcgtggtgcatgggctcttcgacagctcgtacagcttccgccacctgctggaatacatcaatgagacacaccccgggactgtggtgacagtgctcgatctcttcgatgggagagagagcttgcgacccctgtgggaacaggtgcaagggttccgagaggctgtggtccccatcatggcaaaggcccctcaaggggtgcatctcatctgctactcgcaggggggccttgtgtgccgggctctgctttctgtcatggatgatcacaacgtggattctttcatctccctctcctctccacagatgggacagtatggagacacggactacttgaagtggctgttccccacctccatgcggtctaacctctatcggatctgctatagcccctggggccaggaattctccatctgcaactactggcatgatccccaccacgatgacttgtacctcaatgccagcagcttcctggccctgatcaatggggaaagagaccatcccaatgccacagtatggcggaagaactttctgcgtgtgggccacctggtgctgattgggggccctgatgatggtgttattactccctggcagtccagcttctttggtttctatgatgcaaatgagaccgtcctggagatggaggagcaactggtttatctgcgggattcttttgggttgaagactctattggcccggggggccatagtgaggtgtccaatggccggtatctcccacacagcctggcactccaaccgtaccctttatgagacctgcattgaaccttggctctcctgaggatatattcaggggtccccaggaactcctcggtccagagaccaagtggtggccttggaaagcagatgtcaggctttggtgtgcctgtgaccacctcattgctcccatattatcccccatttttagtagagacggggttttagtagagacttggcctcccagaacccccttcctctgctcctccatgaatgacaattccaggcctcccctacctcatgtcctctcatttgggggattgctccgtgctgtccctttctctcaaggccgaagttgggaagtgagaaaccatgtttttaacttgtggctgcttttgctgctgctgctcctccgtatctggctgtatgggtggagaacccaccccctgcccaccacaggggtctccttccaggccactcaggacatttttagcttctctcctccccatgttcccttttttctctaaagtcccctgacatcagccctcccaactcctaagagggactacccatgagagtggggttctgaggctcccctatggggacagttccgttcttgaagtgtcagtgttggggaatatctgtggcctatgaggcccatctcaggtttggggatcccccagtccctatgatcagtgttggagtacccccctgggagagcctagtttctttgaggccccaggccctcttttaactacctttgaataggtgttatccctgtatttatggaaataaagttccatttcctcagtg

SEQ ID NO: 21518 - DNA, 1759 bp, Homo sapiens; identical to SEQ ID NO: 21499
  source 1..1759: mol_type = unassigned DNA

SEQ ID NO: 21519 - DNA, 396 bp, Homo sapiens; identical to SEQ ID NO: 21508
  source 1..396: mol_type = unassigned DNA

SEQ ID NO: 21520 - DNA, 1945 bp, Homo sapiens; identical to SEQ ID NO: 21505
  source 1..1945: mol_type = unassigned DNA

SEQ ID NO: 21521 - DNA, 722 bp, Homo sapiens
  source 1..722: mol_type = unassigned DNA
acccttccccccgccaccgtgggttccagacttgggataagtaaacagcgggtggagcgaggcctacggacccaggccaggtgggagtctgcactcttcaaggggcctgggctgctgctcacgggtattaaagaactccgcgttgttcatggctgaggcgatgcattaggaagatcctggacctagagaacaagtcccccgaacgctgagttggaggcgggacttcgggtgcgcgttggcgggagcatgctggggctctgcgggcagcggctccccgcggcgtgggtcctgcttctgttgcctttcctgccgctgctgctgcttgcagcccccgcgccccaccgcgcgtcctacaagccggtcatcgtggtgcatgggctcttcgacagctcgtacagcttccgccacctgctggaatacatcaatgagatgggacagtatggagacacggactacttgaagtggctgttccccacctccatgcggtctaacctctatcggatctgctatagcccctggggccaggaattctccatctgcaactactggcatgatccccaccacgatgacttgtacctcaatgccagcagcttcctggccctgatcaatggggaaagagaccatcccaatgccacagtatggcggaagaactttctgcgtgtgggccacctggtgctgattgggggccctgatgatggtgttattactccctggcagtccag

SEQ ID NO: 21522 - DNA, 1018 bp, Homo sapiens
  source 1..1018: mol_type = unassigned DNA
acggatttgcgcgaccccaagcagcccgcccttccccctcccatccgtcattcccctgcgctctctttcctcacccttccccccgccaccgtgggttccagacttgggataagtaaacagcgggtggagcgaggcctacggacccaggccaggtgggagtctgcactcttcaaggggcctgggctgctgctcacgggtattaaagaactccgcgttgttcatggctgaggcgatgcattaggaagatcctggacctagagaacaagtcccccgaacgctgagttggaggcgggacttcgggcgggagcatgctggggctctgggggcagcggctccccgcggcgtgggtcctgcttctgttgcctttcctgccgctgctgctgcttgcagcccccgcgccccaccgcgagtcctacaagccggtcatcgtggtgcatgggctcttcgacagctcgtacagcttccgccacctgctggaatacatcaatgagacacaccccgggactgtggtgacagtgctcgatctcttcgatgggagagagagcttgcgacccctgtgggaacaggtgcaagggttccgagaggctgtggtccccatcatggcaaaggcccctcaaggggtgcatctcatctgctactcgcaggggggccttgtgtgccgggctctgctttctgtcatggatgatcacaacgtggattctttcatctccctctcctctccacagatgggacagtatggagacacggactacttgaagtggctgttccccacctccatgcggtctaacctctatcggatctgctatagcccctggggccaggaattctccatctgcaactactggcatgatccccaccacgatgacttgtacctcaatgccagcagcttcctggccctgatcaatggggaaagagaccatcccaatgccacagtatggcggaagaactttctgcgtgtgggccacctggtgctgattgggggccctgatgatggtgttattactccctggcagtccag

SEQ ID NO: 21523 - DNA, 954 bp, Homo sapiens; identical to SEQ ID NO: 21513
  source 1..954: mol_type = unassigned DNA

SEQ ID NO: 21524 - DNA, 827 bp, Homo sapiens
  source 1..827: mol_type = unassigned DNA
tccgtcattcccctgcgctctctttcctcacccttccccccgccaccgtgggttccagacttgggataagtaaacagcgggtggagcgaggcctacggacccaggccaggcgggagcatgctggggctctgggggcagcggctccccgcggcgtgggtcctgcttctgttgcctttcctgccgctgctgctgcttgcagcccccgcgccccaccgcgagtcctacaagccggtcatcgtggtgcatgggctcttcgacagctcgtacagcttccgccacctgctggaatacatcaatgagacacaccccgggactgtggtgacagtgctcgatctcttcgatgggagagagagcttgcgacccctgtgggaacaggtgcaagggttccgagaggctgtggtccccatcatggcaaaggcccctcaaggggtgcatctcatctgctactcgcaggggggccttgtgtgccgggctctgctttctgtcatggatgatcacaacgtggattctttcatctccctctcctctccacagatgggacagtatggagacacggactacttgaagtggctgttccccacctccatgcggtctaacctctatcggatctgctatagcccctggggccaggaattctccatctgcaactactggcatgatccccaccacgatgacttgtacctcaatgccagcagcttcctggccctgatcaatggggaaagagaccatcccaatgccacagtatggcggaagaactttctgcgtgtgggccacctggtgctgattgggggccctgatgatggtgttattactccctggcagtccag

SEQ ID NO: 21525 - DNA, 730 bp, Homo sapiens
  source 1..730: mol_type = unassigned DNA
gctattttgtgacacggacctggtgtgggagcgagaggaggtggcttgattgccgggcgtctgttccgagggaggagggtgttgccatctccctcacatgcccttatcacccctttctcaggcgggagcatgctggggctctgggggcagcggctccccgcggcgtgggtcctgcttctgttgcctttcctgccgctgctgctgcttgcagcccccgcgccccaccgcgcgtcctacaagccggtcatcgtggtgcatgggctcttcgacagctcgtacagcttccgccacctgctggaatacatcaatgagacacaccccgggactgtggtgacagtgctcgatctcttcgatgggagagagagcttgcgacccctgtgggaacaggtgcaagggttccgagaggctgtggtccccatcatggcaaaggcccctcaaggggtgcatctcatctgctactcgcaggggggccttgtgtgccgggctctgctttctgtcatggatgatcacaacgtggattctttcatctccctctcctctccacagatgggacagtatggagacacggactacttgaagtggctgttccccacctccatgcggtctaacctctatcggatctgctatagcccctggggccaggaattctccatctgcaactactggcatgatccccaccacgatgacttgtacctcaatgccagcagcttcctggccctgatcaatgggg

SEQ ID NO: 21526 - DNA, 1754 bp, Homo sapiens
  source 1..1754: mol_type = unassigned DNA
tccgtcattcccctgcgttctctttcctcacccttccccccgccaccgtgggttccagacttgggataagtaaacagcgggtggagcgaggcctacggacccaggccaggcgggagcatgctggggctctgggggcagcggctccccgcggcgtgggtcctgcttctgttgcctttcctgccgctgctgctgcttgcagcccccgcgccccaccgcgcgtcctacaagccggtcatcgtggtgcatgggctcttcgacagctcgtacagcttccgccacctgctggaatacatcaatgagacacaccccgggactgtggtgacagtgctcgatctcttcgatgggagagagagcttgcgacccctgtgggaacaggtgcaagggttccgagaggctgtggtccccatcatggcaaaggcccctcaaggggtgcatctcatctgctactcgcaggggggccttgtgtgccgggctctgctttctgtcatggatgatcacaacgtggattctttcatctccctctcctctccacagatgggacagtatggagacacggactacttgaagtggctgttccccacctccatgcggtctaacctctatcggatctgctatagcccctggggccaggaattctccatctgcaactactggcatgatccccaccacgatgacttgtacctcaatgccagcagcttcctggccctgatcaatggggaaagagaccatcccaatgccacagtatggcggaagaactttctgcgtgtgggccacctggtgctgattgggggccctgatgatggtgttattactccctggcagtccagcttctttggtttctatgatgcaaatgagaccgtcctggagatggaggagcaactggtttatctgcgggattcttttgggttgaagactctattggcccggggggccatagtgaggtgtccaatggccggtatctcccacacagcctggcactccaaccgtaccctttatgagacctgcattgaaccttggctctcctgaggatatattcaggggtccccaggaactcctcggtccagagaccaagtggtggccttggaaagcagatgtcaggctttggtgtgcctgtgaccacctcattgctcccatattatcccccatttttagtagagacggggttttagtagagacttggcctcccagaacccccttcctctgctcctccatgaatgacaattccaggcctcccctacctcatgtcctctcatttgggggattgctccgtgctgtccctttctctcaaggccgaagttgggaagtgagaaaccatgtttttaacttgtggctgcttttgctgctgctgctcctccgtatctggctgtatgggtggagaacccaccccctgcccaccacaggggtctccttccaggccactcaggacatttttagcttctctcctccccatgttcccttttttctctaaagtcccctgacatcagccctcccaactcctaagagggactacccatgagagtggggttctgaggctcccctatggggacagttccgttcttgaagtgtcagtgttggggaatatctgtggcctatgaggcccatctcaggtttggggatcccccagtccctatgatcagtgttggagtacccccctgggagagcctagtttctttgaggccccaggccctcttttaactacctttgaataggtgttatccctgtatttatggaaataaagttccatttcctcagtg

SEQ ID NO: 21527 - DNA, 730 bp, Homo sapiens; identical to SEQ ID NO: 21525
  source 1..730: mol_type = unassigned DNA

SEQ ID NO: 21528 - DNA, 832 bp, Homo sapiens
  source 1..832: mol_type = unassigned DNA
ggagtagagtagggcaggagaaactgggccaggctgcacttagctcaaggggcctcgaggactctctgcgtctctggagacaagggcactacacgcacttcagaatgaagagttgcgggagcatgctggggctctgggggcagcggctccccgcggcgtgggtcctgcttctgttgcctttcctgccgctgctgctgcttgcagcccccgcgccccaccgcgagtcctacaagccggtcatcgtggtgcatgggctcttcgacagctcgtacagcttccgccacctgctggaatacatcaatgagacacaccccgggactgtggtgacagtgctcgatctcttcgatgggagagagagcttgcgacccctgtgggaacaggtgcaagggttccgagaggctgtggtccccatcatggcaaaggcccctcaaggggtgcatctcatctgctactcgcaggggggccttgtgtgccgggctctgctttctgtcatggatgatcacaacgtggattctttcatctccctctcctctccacagatgggacagtatggagacacggactacttgaagtggctgttccccacctccatgcggtctaacctctatcggatctgctatagcccctggggccaggaattctccatctgcaactactggcatgatccccaccacgatgacttgtacctcaatgccagcagcttcctggccctgatcaatggggaaagagaccatcccaatgccacagtatggcggaagaactttctgcgtgtgggccacctggtgctgattgggggccctgatgatggtgttattactccctggcagtccag

SEQ ID NO: 21529 - DNA, 1184 bp, Homo sapiens
  source 1..1184: mol_type = unassigned DNA
tcgaggactctctgcgtctctggagacaagggcactacacgcacttcagaatgaagagttcacctagggcgcaatggaatattccattgcccctcctgtcctgggtctgtgttgcggggaacgctcgcgcggttgccagagaaagccccggacgtgacggatttgcgcgaccccaagcagcccgcccttccccctcccatccgtcattcccctgcgctctctttcctcacccttccccccgccaccgtgggttccagacttgggataagtaaacagcgggtggagcgaggcctacggacccaggccaggtgggagtctgcactcttcaaggggcctgggctgctgctcacgggtattaaagaactccgcgttgttcatggctgaggcgatgcattaggaagatcctggacctagagaacaagtcccccgaacgctgagttggaggcgggacttcgggtgcgcgttggcgggagcatgctggggctctgggggcagcggctccccgcggcgtgggtcctgcttctgttgcctttcctgccgctgctgctgcttgcagcccccgcgccccaccgcgagtcctacaagccggtcatcgtggtgcatgggctcttcgacagctcgtacagcttccgccacctgctggaatacatcaatgagacacaccccgggactgtggtgacagtgctcgatctcttcgatgggagagagagcttgcgacccctgtgggaacaggtgcaagggttccgagaggctgtggtccccatcatggcaaaggcccctcaaggggtgcatctcatctgctactcgcaggggggccttgtgtgccgggctctgctttctgtcatggatgatcacaacgtggattctttcatctccctctcctctccacagatgggacagtatggagacacggactacttgaagtggctgttccccacctccatgcggtctaacctctatcggatctgctatagcccctggggccaggaattctccatctgcaactactggcatgatccccaccacgatgacttgtacctcaatgccagcagcttcctggccctgatcaatggggaaagagaccatcccaatgccacagtatggcggaagaactttctgcgtgtgggccacctggtgctgattgggggccctgatgatggtgttattactccctggcagtccag

SEQ ID NO: 21530 - DNA, 954 bp, Homo sapiens; identical to SEQ ID NO: 21513
  source 1..954: mol_type = unassigned DNA

SEQ ID NO: 21531 - DNA, 722 bp, Homo sapiens; identical to SEQ ID NO: 21514
  source 1..722: mol_type = unassigned DNA

SEQ ID NO: 21532 - DNA, 730 bp, Homo sapiens; identical to SEQ ID NO: 21511
  source 1..730: mol_type = unassigned DNA

SEQ ID NO: 21533 - DNA, 730 bp, Homo sapiens
  source 1..730: mol_type = unassigned DNA
gctattttgtgacacggacctggtgtgggagcgagaggaggtggcttgattgccgggcgtctgttccgagggaggagggtgttgccatctccctcacatgcccttatcacccctttctcaggcgggagcatgctggggctctgcgggcagcggctccccgcggcgtgggtcctgcttctgttgcctttcctgccgctgctgctgcttgcagcccccgcgccccaccgcgcgtcctacaagccggtcatcgtggtgcatgggctcttcgacagctcgtacagcttccgccacctgctggaatacatcaatgagacacaccccgggactgtggtgacagtgctcgatctcttcgatgggagagagagcttgcgacccctgtgggaacaggtgcaagggttccgagaggctgtggtccccatcatggcaaaggcccctcaaggggtgcatctcatctgctactcgcaggggggccttgtgtgccgggctctgctttctgtcatggatgatcacaacgtggattctttcatctccctctcctctccacagatgggacagtatggagacacggactacttgaagtggctgttccccacctccatgcggtctaacctctatcggatctgctatagcccctggggccaggaattctccatctgcaactactggcatgatccccaccacgatgacttgtacctcaatgccagcagcttcctggccctgatcaatgggg

SEQ ID NO: 21534 - DNA, 1051 bp, Homo sapiens
  source 1..1051: mol_type = unassigned DNA
gttgccagagaaagccccggacgtgacggatttgcgcgaccccaagcagcccgcccttccccctcccatccgtcattcccctgcgctctctttcctcacccttccccccgccaccgtgggttccagacttgggataagtaaacagcgggtggagcgaggcctacggacccaggccaggtgggagtctgcactcttcaaggggcctgggctgctgctcacgggtattaaagaactccgcgttgttcatggctgaggcgatgcattaggaagatcctggacctagagaacaagtcccccgaacgctgagttggaggcgggacttcgggtgcgcgttggcgggagcatgctggggctctgcgggcagcggctccccgcggcgtgggtcctgcttctgttgcctttcctgccgctgctgctgcttgcagcccccgcgccccaccgcgcgtcctacaagccggtcatcgtggtgcatgggctcttcgacagctcgtacagcttccgccacctgctggaatacatcaatgagggggccttgtgtgccgggctctgctttctgtcatggatgatcacaacgtggattctttcatctccctctcctctccacagatgggacagtatggagacacggactacttgaagtggctgttccccacctccatgcggtctaacctctatcggatctgctatagcccctggggccaggaattctccatctgcaactactggcatgatccccaccacgatgacttgtacctcaatgccagcagcttcctggccctgatcaatggggaaagagaccatcccaatgccacagtatggcggaagaactttctgcgtgtgggccacctggtgctgattgggggccctgatgatggtgttattactccctggcagtccagcttctttggtttctatgatgcaaatgagaccgtcctggagatggaggagcaactgcctgtagggtccagcgtcaaagcgaatcatggggtccagggctgagctgtgcactctcttaggcggattctccttcctcctgctactgataccaggc

SEQ ID NO: 21535 - DNA, 722 bp, Homo sapiens; identical to SEQ ID NO: 21514
  source 1..722: mol_type = unassigned DNA

SEQ ID NO: 21536 - DNA, 1874 bp, Homo sapiens
  source 1..1874: mol_type = unassigned DNA
tattccattgcccctcctgtcctgggtctgtgttgcggggaacgctcgcgcggttgccagagaaagccccggacgtgacggatttgcgcgaccccaagcagcccgcccttccccctcccatccgtcattcccctgcgctctctttcctcacccttccccccgccaccgtgggttccagacttgggataagtaaacagcgggtggagcgaggcctacggacccaggccaggcgggagcatgctggggctctgggggcagcggctccccgcggcgtgggtcctgcttctgttgcctttcctgccgctgctgctgcttgcagcccccgcgccccaccgcgcgtcctacaagccggtcatcgtggtgcatgggctcttcgacagctcgtacagcttccgccacctgctggaatacatcaatgagacacaccccgggactgtggtgacagtgctcgatctcttcgatgggagagagagcttgcgacccctgtgggaacaggtgcaagggttccgagaggctgtggtccccatcatggcaaaggcccctcaaggggtgcatctcatctgctactcgcaggggggccttgtgtgccgggctctgctttctgtcatggatgatcacaacgtggattctttcatctccctctcctctccacagatgggacagtatggagacacggactacttgaagtggctgttccccacctccatgcggtctaacctctatcggatctgctatagcccctggggccaggaattctccatctgcaactactggcatgatccccaccacgatgacttgtacctcaatgccagcagcttcctggccctgatcaatggggaaagagaccatcccaatgccacagtatggcggaagaactttctgcgtgtgggccacctggtgctgattgggggccctgatgatggtgttattactccctggcagtccagcttctttggtttctatgatgcaaatgagaccgtcctggagatggaggagcaactggtttatctgcgggattcttttgggttgaagactctattggcccggggggccatagtgaggtgtccaatggccggtatctcccacacagcctggcactccaaccgtaccctttatgagacctgcattgaaccttggctctcctgaggatatattcaggggtccccaggaactcctcggtccagagaccaagtggtggccttggaaagcagatgtcaggctttggtgtgcctgtgaccacctcattgctcccatattatcccccatttttagtagagacggggttttagtagagacttggcctcccagaacccccttcctctgctcctccatgaatgacaattccaggcctcccctacctcatgtcctctcatttgggggattgctccgtgctgtccctttctctcaaggccgaagttgggaagtgagaaaccatgtttttaacttgtggctgcttttgctgctgctgctcctccgtatctggctgtatgggtggagaacccaccccctgcccaccacaggggtctccttccaggccactcaggacatttttagcttctctcctccccatgttcccttttttctctaaagtcccctgacatcagccctcccaactcctaagagggactacccatgagagtggggttctgaggctcccctatggggacagttccgttcttgaagtgtcagtgttggggaatatctgtggcctatgaggcccatctcaggtttggggatcccccagtccctatgatcagtgttggagtacccccctgggagagcctagtttctttgaggccccaggccctcttttaactacctttgaataggtgttatccctgtatttatggaaataaagttccatttcctcagtg

SEQ ID NO: 21537 - DNA, 2111 bp, Homo sapiens; identical to SEQ ID NO: 21506
  source 1..2111: mol_type = unassigned DNA

SEQ ID NO: 21538 - DNA, 1945 bp, Homo sapiens; identical to SEQ ID NO: 21505
  source 1..1945: mol_type = unassigned DNA

SEQ ID NO: 21539 - DNA, 396 bp, Homo sapiens
  source 1..396: mol_type = unassigned DNA
cacggacctggtgtgggagcgagaggaggtggcttgattgccgggcgtctgttccgagggaggagggtgttgccatctccctcacatgcccttatcacccctttctcaggcgggagcatgctggggctctgggggcagcggctccccgcggcgtgggtcctgcttctgttgcctttcctgccgctgctgctgcttgcagcccccgcgccccaccgcgagtcctacaagccggtcatcgtggtgcatgggctcttcgacagctcgtacagcttccgccacctgctggaatacatcaatgagggggccttgtgtgccgggctctgctttctgtcatggatgatcacaacgtggattctttcatctccctctcctctccacagatgggacagtatggag

SEQ ID NO: 21540 - DNA, 730 bp, Homo sapiens; identical to SEQ ID NO: 21525
  source 1..730: mol_type = unassigned DNA

SEQ ID NO: 21541 - DNA, 730 bp, Homo sapiens; identical to SEQ ID NO: 21525
  source 1..730: mol_type = unassigned DNA

SEQ ID NO: 21542 - DNA, 1754 bp, Homo sapiens; identical to SEQ ID NO: 21504
  source 1..1754: mol_type = unassigned DNA

SEQ ID NO: 21543 - DNA, 1474 bp, Homo sapiens
  source 1..1474: mol_type = unassigned DNA
ggaagtggggagaatcaaggcggggaaatcggacttttgggtcgctgggggcaacgaagcctggagaggccttctttccattcccagaatatgtttgctgctttttcctctccccactggcctaaatggatcgctccgcctgtttcctccccagcacctagggcgcaatggaatattccattgcccctcctgtcctgggtctgtgttgcggggaacgctcgcgcggttgccagagaaagccccggacgtgacggatttgcgcgaccccaagcagcccgcccttccccctcccatccgtcattcccctgcgctctctttcctcacccttccccccgccaccgtgggttccagacttgggataagtaaacagcgggtggagcgaggcctacggacccaggccaggtgggagtctgcactcttcaaggggcctgggctgctgctcacgggtattaaagaactccgcgttgttcatggctgaggcgatgcattaggaagatcctggacctagagaacaagtcccccgaacgctgagttggaggcgggacttcgggtgcgcgttggcgggagcatgctggggctctgcgggcagcggctccccgcggcgtgggtcctgcttctgttgcctttcctgccgctgctgctgcttgcagcccccgcgccccaccgcgcgtcctacaagccggtcatcgtggtgcatgggctcttcgacagctcgtacagcttccgccacctgctggaatacatcaatgagacacaccccgggactgtggtgacagtgctcgatctcttcgatgggagagagagcttgcgacccctgtgggaacaggtgcaagggttccgagaggctgtggtccccatcatggcaaaggcccctcaaggggtgcatctcatctgctactcgcaggggggccttgtgtgccgggctctgctttctgtcatggatgatcacaacgtggattctttcatctccctctcctctccacagatgggacagtatggagacacggactacttgaagtggctgttccccacctccatgcggtctaacctctatcggatctgctatagcccctggggccaggaattctccatctgcaactactggcatgatccccaccacgatgacttgtacctcaatgccagcagcttcctggccctgatcaatggggaaagagaccatcccaatgccacagtatggcggaagaactttctgcgtgtgggccacctggtgctgattgggggccctgatgatggtgttattactccctggcagtccagcttctttggtttctatgatgcaaatgagaccgtcctggagatggaggagcaactgcctgccaggcccacccaccagtctgagctgcttctgctgaggctggtctgcttgaagcctcccaggagaaagaagccagcctgtagggtccagcgtcaaagcgaatcatggggtccagggctgagctgtgcactctcttag

SEQ ID NO: 21544 - DNA, 722 bp, Homo sapiens; identical to SEQ ID NO: 21512
  source 1..722: mol_type = unassigned DNA

SEQ ID NO: 21545 - DNA, 954 bp, Homo sapiens; identical to SEQ ID NO: 21513
  source 1..954: mol_type = unassigned DNA

SEQ ID NO: 21546 - DNA, 730 bp, Homo sapiens; identical to SEQ ID NO: 21525
  source 1..730: mol_type = unassigned DNA

SEQ ID NO: 21547 - DNA, 1754 bp, Homo sapiens; identical to SEQ ID NO: 21504
  source 1..1754: mol_type = unassigned DNA

SEQ ID NO: 21548 - DNA, 2111 bp, Homo sapiens
  source 1..2111: mol_type = unassigned DNA
tcgaggactctctgcgtctctggagacaagggcactacacgcacttcagaatgaagagttcacctagggcgcaatggaatattccattgcccctcctgtcctgggtctgtgttgcggggaacgctcgcgcggttgccagagaaagccccggacgtgacggatttgcgcgaccccaagcagcccgcccttccccctcccatccgtcattcccctgcgttctctttcctcacccttccccccgccaccgtgggttccagacttgggataagtaaacagcgggtggagcgaggcctacggacccaggccaggtgggagtctgcactcttcaaggggcctgggctgctgctcacgggtattaaagaactccgcgttgttcatggctgaggcgatgcattaggaagatcctggacctagagaacaagtcccccgaacgctgagttggaggcgggacttcgggtgcgcgttggcgggagcatgctggggctctgggggcagcggctccccgcggcgtgggtcctgcttctgttgcctttcctgccgctgctgctgcttgcagcccccgcgccccaccgcgcgtcctacaagccggtcatcgtggtgcatgggctcttcgacagctcgtacagcttccgccacctgctggaatacatcaatgagacacaccccgggactgtggtgacagtgctcgatctcttcgatgggagagagagcttgcgacccctgtgggaacaggtgcaagggttccgagaggctgtggtccccatcatggcaaaggcccctcaaggggtgcatctcatctgctactcgcaggggggccttgtgtgccgggctctgctttctgtcatggatgatcacaacgtggattctttcatctccctctcctctccacagatgggacagtatggagacacggactacttgaagtggctgttccccacctccatgcggtctaacctctatcggatctgctatagcccctggggccaggaattctccatctgcaactactggcatgatccccaccacgatgacttgtacctcaatgccagcagcttcctggccctgatcaatggggaaagagaccatcccaatgccacagtatggcggaagaactttctgcgtgtgggccacctggtgctgattgggggccctgatgatggtgttattactccctggcagtccagcttctttggtttctatgatgcaaatgagaccgtcctggagatggaggagcaactggtttatctgcgggattcttttgggttgaagactctattggcccggggggccatagtgaggtgtccaatggccggtatctcccacacagcctggcactccaaccgtaccctttatgagacctgcattgaaccttggctctcctgaggatatattcaggggtccccaggaactcctcggtccagagaccaagtggtggccttggaaagcagatgtcaggctttggtgtgcctgtgaccacctcattgctcccatattatcccccatttttagtagagacggggttttagtagagacttggcctcccagaacccccttcctctgctcctccatgaatgacaattccaggcctcccctacctcatgtcctctcatttgggggattgctccgtgctgtccctttctctcaaggccgaagttgggaagtgagaaaccatgtttttaacttgtggctgcttttgctgctgctgctcctccgtatctggctgtatgggtggagaacccaccccctgcccaccacaggggtctccttccaggccactcaggacatttttagcttctctcctccccatgttcccttttttctctaaagtcccctgacatcagccctcccaactcctaagagggactacccatgagagtggggttctgaggctcccctatggggacagttccgttcttgaagtgtcagtgttggggaatatctgtggcctatgaggcccatctcaggtttggggatcccccagtccctatgatcagtgttggagtacccccctgggagagcctagtttctttgaggccccaggccctcttttaactacctttgaataggtgttatccctgtatttatggaaataaagttccatttcctcagtg

SEQ ID NO: 21549 - DNA, 396 bp, Homo sapiens; identical to SEQ ID NO: 21508
  source 1..396: mol_type = unassigned DNA

SEQ ID NO: 21550 - DNA, 396 bp, Homo sapiens
  source 1..396: mol_type = unassigned DNA
cacggacctggtgtgggagcgagaggaggtggcttgattgccgggcgtctgttccgagggaggagggtgttgccatctccctcacatgcccttatcacccctttctcaggcgggagcatgctggggctctgcgggcagcggctccccgcggcgtgggtcctgcttctgttgcctttcctgccgctgctgctgcttgcagcccccgcgccccaccgcgcgtcctacaagccggtcatcgtggtgcatgggctcttcgacagctcgtacagcttccgccacctgctggaatacatcaatgagggggccttgtgtgccgggctctgctttctgtcatggatgatcacaacgtggattctttcatctccctctcctctccacagatgggacagtatggag

SEQ ID NO: 21551 - DNA, 1945 bp, Homo sapiens; identical to SEQ ID NO: 21505
  source 1..1945: mol_type = unassigned DNA

SEQ ID NO: 21552 - DNA, 2111 bp, Homo sapiens; identical to SEQ ID NO: 21506
  source 1..2111: mol_type = unassigned DNA

SEQ ID NO: 21553 - DNA, 954 bp, Homo sapiens
  source 1..954: mol_type = unassigned DNA
gactggtcgaaattacgcgggcatgagtcagcgcatccctacgcgccctccgccccttgagggtgggtcgcttatagggaggggagtagagtagggcaggagaaactgggccaggctgcacttagctcaaggggcctcgaggactctctgcgtctctggagacaagggcactacacgcacttcagaatgaagagttacttgggataagtaaacagcgggtggagcgaggcctacggacccaggccaggtgggagtctgcactcttcaaggggcctgggctgctgctcacgggtattaaagaactccgcgttgttcatggctgaggcgatgcattaggaagatcctggacctagagaacaagtcccccgaacgctgagttggaggcgggacttcgggtgcgcgttggcgggagcatgctggggctctgggggcagcggctccccgcggcgtgggtcctgcttctgttgcctttcctgccgctgctgctgcttgcagcccccgcgccccaccgcgagtcctacaagccggtcatcgtggtgcatgggctcttcgacagctcgtacagcttccgccacctgctggaatacatcaatgagacacaccccgggactgtggtgacagtgctcgatctcttcgatgggagagagagcttgcgacccctgtgggaacaggtgcaagggttccgagaggctgtggtccccatcatggcaaaggcccctcaaggggtgcatctcatctgctactcgcaggggggccttgtgtgccgggctctgctttctgtcatggatgatcacaacgtggattctttcatctccctctcctctccacagatgggacagtatggagacacggactacttgaagtggctgttccccacctccatgcggtctaacctctatcggatctgctatagcccctggggccaggaattctccatctgcaactactggcatg

SEQ ID NO: 21554 - DNA, 954 bp, Homo sapiens; identical to SEQ ID NO: 21553
  source 1..954: mol_type = unassigned DNA

SEQ ID NO: 21555 - DNA, 396 bp, Homo sapiens; identical to SEQ ID NO: 21539
  source 1..396: mol_type = unassigned DNA

SEQ ID NO: 21556 - DNA, 1278 bp, Homo sapiens
  source 1..1278: mol_type = unassigned DNA
ggaagtggggagaatcaaggcggggaaatcggacttttgggtcgctgggggcaacgaagcctggagaggccttctttccattcccagaatatgtttgctgctttttcctctccccactggcctaaatggatcgctccgcctgtttcctccccagcacctagggcgcaatggaatattccattgcccctcctgtcctgggtctgtgttgcggggaacgctcgcgcggttgccagagaaagccccggacgtgacggatttgcgcgaccccaagcagcccgcccttccccctcccatccgtcattcccctgcgctctctttcctcacccttccccccgccaccgtgggttccagacttgggataagtaaacagcgggtggagcgaggcctacggacccaggccaggtgggagtctgcactcttcaaggggcctgggctgctgctcacgggtattaaagaactccgcgttgttcatggctgaggcgatgcattaggaagatcctggacctagagaacaagtcccccgaacgctgagttggaggcgggacttcgggtgcgcgttggcgggagcatgctggggctctgggggcagcggctccccgcggcgtgggtcctgcttctgttgcctttcctgccgctgctgctgcttgcagcccccgcgccccaccgcgagtcctacaagccggtcatcgtggtgcatgggctcttcgacagctcgtacagcttccgccacctgctggaatacatcaatgagacacaccccgggactgtggtgacagtgctcgatctcttcgatgggagagagagcttgcgacccctgtgggaacaggtgcaagggttccgagaggctgtggtccccatcatggcaaaggcccctcaaggggtgcatctcatctgctactcgcaggggggccttgtgtgccgggctctgctttctgtcatggatgatcacaacgtggattctttcatctccctctcctctccacagatgggacagtatggagacacggactacttgaagtggctgttccccacctccatgcggtctaacctctatcggatctgctatagcccctggggccaggaattctccatctgcaactactggcatgatccccaccacgatgacttgtacctcaatgccagcagcttcctggccctgatcaatggggaaagagaccatcccaatgccacagtatggcggaagaactttctgcgtgtgggccacctggtgctgattgggggccctgatgatggtgttattactccctggcagtccag

SEQ ID NO: 21557 - DNA, 163 bp, Homo sapiens
  source 1..163: mol_type = unassigned DNA
accacgatgacttgtacctcaatgccagcagcttcctggccctgatcaatggggaaagagaccatcccaatgccacagtatggcggaagaactttctgcgtgtgggccacctggtgctgattgggggccctgatgatggtgttattactccctggcagtccag

SEQ ID NO: 21558 - DNA, 901 bp, Homo sapiens
  source 1..901: mol_type = unassigned DNA
agcgaggcctacggacccaggccaggtgggagtctgcactcttcaaggggcctgggctgctgctcacgggtattaaagaactccgcgttgttcatggctgaggcgatgcattaggaagatcctggacctagagaacaagtcccccgaacgctgagttggaggcgggacttcgggtgcgcgttggcgggagcatgctggggctctgggggcagcggctccccgcggcgtgggtcctgcttctgttgcctttcctgccgctgctgctgcttgcagcccccgcgccccaccgcgagtcctacaagccggtcatcgtggtgcatgggctcttcgacagctcgtacagcttccgccacctgctggaatacatcaatgagacacaccccgggactgtggtgacagtgctcgatctcttcgatgggagagagagcttgcgacccctgtgggaacaggtgcaagggttccgagaggctgtggtccccatcatggcaaaggcccctcaaggggtgcatctcatctgctactcgcaggggggccttgtgtgccgggctctgctttctgtcatggatgatcacaacgtggattctttcatctccctctcctctccacagatgggacagtatggagacacggactacttgaagtggctgttccccacctccatgcggtctaacctctatcggatctgctatagcccctggggccaggaattctccatctgcaactactggcatgatccccaccacgatgacttgtacctcaatgccagcagcttcctggccctgatcaatggggaaagagaccatcccaatgccacagtatggcggaagaactttctgcgtgtgggccacctggtgctgattgggggccctgatgatggtgttattactccctggcagtccag

SEQ ID NO: 21559 - DNA, 2382 bp, Homo sapiens
  source 1..2382: mol_type = unassigned DNA
tttttttttttttttaaacaaaaacacagccagataatcattattcttcccttacgtccccccagcccccacctggggcagtcgctctcccggctgcgtcccttttcgtccatgtcctagcagagactacagagcagtacagaggctctcgctgaaaccagtcccaggctccacagagtcagatcacggcttcacaccagtcgttctggtcacttaggcgttcgcgtgagcgctcaaccccttaccgccacctcatcgtcactctacaccattctgagcgcaaaaatgttttgattgagacaaatttagaccaagcaatgaccttgtaaacagagagaggggctcagacatgctgagaaatccttatctctagagaaacgtctttaaatgctaagtaaaagccctagcaagtaaaagccctgaggcactagggtgtcggttaggggtcacaggcggagaggtggggcgcctgggggtttcggtagggagccacccacagataactcagacagccagattctgggggtcgttcaggttgaaagactggtcgaaattacgcgggcatgagtcagcgcatccctacgcgccctccgccccttgagggtgggtcgcttatagggaggggagtagagtagggcaggagaaactgggccaggctgcacttagctcaaggggcctcgaggactctctgcgtctctggagacaagggcactacacgcacttcagaatgaagagttgcgggagcatgctggggctctgggggcagcggctccccgcggcgtgggtcctgcttctgttgcctttcctgccgctgctgctgcttgcagcccccgcgccccaccgcgcgtcctacaagccggtcatcgtggtgcatgggctcttcgacagctcgtacagcttccgccacctgctggaatacatcaatgagacacaccccgggactgtggtgacagtgctcgatctcttcgatgggagagagagcttgcgacccctgtgggaacaggtgcaagggttccgagaggctgtggtccccatcatggcaaaggcccctcaaggggtgcatctcatctgctactcgcaggggggccttgtgtgccgggctctgctttctgtcatggatgatcacaacgtggattctttcatctccctctcctctccacagatgggacagtatggagacacggactacttgaagtggctgttccccacctccatgcggtctaacctctatcggatctgctatagcccctggggccaggaattctccatctgcaactactggcatgatccccaccacgatgacttgtacctcaatgccagcagcttcctggccctgatcaatggggaaagagaccatcccaatgccacagtatggcggaagaactttctgcgtgtgggccacctggtgctgattgggggccctgatgatggtgttattactccctggcagtccagcttctttggtttctatgatgcaaatgagaccgtcctggagatggaggagcaactggtttatctgcgggattcttttgggttgaagactctattggcccggggggccatagtgaggtgtccaatggccggtatctcccacacagcctggcactccaaccgtaccctttatgagacctgcattgaaccttggctctcctgaggatatattcaggggtccccaggaactcctcggtccagagaccaagtggtggccttggaaagcagatgtcaggctttggtgtgcctgtgaccacctcattgctcccatattatcccccatttttagtagagacggggttttagtagagacttggcctcccagaacccccttcctctgctcctccatgaatgacaattccaggcctcccctacctcatgtcctctcatttgggggattgctccgtgctgtccctttctctcaaggccgaagttgggaagtgagaaaccatgtttttaacttgtggctgcttttgctgctgctgctcctccgtatctggctgtatgggtggagaacccaccccctgcccaccacaggggtctccttccaggccactcaggacatttttagcttctctcctccccatgttcccttttttctctaaagtcccctgacatcagccctcccaactcctaagagggactacccatgagagtggggttctgaggctcccctatggggacagttccgttcttgaagtgtcagtgttggggaatatctgtggcctatgaggcccatctcaggtttggggatcccccagtccctatgatcagtgttggagtacccccctgggagagcctagtttctttgaggccccaggccctcttttaactacctttgaataggtgttatccctgtatttatggaaataaagttccatttcctcagtg

SEQ ID NO: 21560 - DNA, 2202 bp, Homo sapiens
  source 1..2202: mol_type = unassigned DNA
ggaagtggggagaatcaaggcggggaaatcggacttttgggtcgctgggggcaacgaagcctggagaggccttctttccattcccagaatatgtttgctgctttttcctctccccactggcctaaatggatcgctccgcctgtttcctccccagcacctagggcgcaatggaatattccattgcccctcctgtcctgggtctgtgttgcggggaacgctcgcgcggttgccagagaaagccccggacgtgacggatttgcgcgaccccaagcagcccgcccttccccctcccatccgtcattcccctgcgctctctttcctcacccttccccccgccaccgtgggttccagacttgggataagtaaacagcgggtggagcgaggcctacggacccaggccaggtgggagtctgcactcttcaaggggcctgggctgctgctcacgggtattaaagaactccgcgttgttcatggctgaggcgatgcattaggaagatcctggacctagagaacaagtcccccgaacgctgagttggaggcgggacttcgggtgcgcgttggcgggagcatgctggggctctgggggcagcggctccccgcggcgtgggtcctgcttctgttgcctttcctgccgctgctgctgcttgcagcccccgcgccccaccgcgcgtcctacaagccggtcatcgtggtgcatgggctcttcgacagctcgtacagcttccgccacctgctggaatacatcaatgagacacaccccgggactgtggtgacagtgctcgatctcttcgatgggagagagagcttgcgacccctgtgggaacaggtgcaagggttccgagaggctgtggtccccatcatggcaaaggcccctcaaggggtgcatctcatctgctactcgcaggggggccttgtgtgccgggctctgctttctgtcatggatgatcacaacgtggattctttcatctccctctcctctccacagatgggacagtatggagacacggactacttgaagtggctgttccccacctccatgcggtctaacctctatcggatctgctatagcccctggggccaggaattctccatctgcaactactggcatgatccccaccacgatgacttgtacctcaatgccagcagcttcctggccctgatcaatggggaaagagaccatcccaatgccacagtatggcggaagaactttctgcgtgtgggccacctggtgctgattgggggccctgatgatggtgttattactccctggcagtccagcttctttggtttctatgatgcaaatgagaccgtcctggagatggaggagcaactggtttatctgcgggattcttttgggttgaagactctattggcccggggggccatagtgaggtgtccaatggccggtatctcccacacagcctggcactccaaccgtaccctttatgagacctgcattgaaccttggctctcctgaggatatattcaggggtccccaggaactcctcggtccagagaccaagtggtggccttggaaagcagatgtcaggctttggtgtgcctgtgaccacctcattgctcccatattatcccccatttttagtagagacggggttttagtagagacttggcctcccagaacccccttcctctgctcctccatgaatgacaattccaggcctcccctacctcatgtcctctcatttgggggattgctccgtgctgtccctttctctcaaggccgaagttgggaagtgagaaaccatgtttttaacttgtggctgcttttgctgctgctgctcctccgtatctggctgtatgggtggagaacccaccccctgcccaccacaggggtctccttccaggccactcaggacatttttagcttctctcctccccatgttcccttttttctctaaagtcccctgacatcagccctcccaactcctaagagggactacccatgagagtggggttctgaggctcccctatggggacagttccgttcttgaagtgtcagtgttggggaatatctgtggcctatgaggcccatctcaggtttggggatcccccagtccctatgatcagtgttggagtacccccctgggagagcctagtttctttgaggccccaggccctcttttaactacctttgaataggtgttatccctgtatttatggaaataaagttccatttcctca

SEQ ID NO: 21561 - DNA, 2202 bp, Homo sapiens; identical to SEQ ID NO: 21560
  source 1..2202: mol_type = unassigned DNA

SEQ ID NO: 21562 - DNA, 1051 bp, Homo sapiens
  source 1..1051: mol_type = unassigned DNA
gttgccagagaaagccccggacgtgacggatttgcgcgaccccaagcagcccgcccttccccctcccatccgtcattcccctgcgttctctttcctcacccttccccccgccaccgtgggttccagacttgggataagtaaacagcgggtggagcgaggcctacggacccaggccaggtgggagtctgcactcttcaaggggcctgggctgctgctcacgggtattaaagaactccgcgttgttcatggctgaggcgatgcattaggaagatcctggacctagagaacaagtcccccgaacgctgagttggaggcgggacttcgggtgcgcgttggcgggagcatgctggggctctgggggcagcggctccccgcggcgtgggtcctgcttctgttgcctttcctgccgctgctgctgcttgcagcccccgcgccccaccgcgcgtcctacaagccggtcatcgtggtgcatgggctcttcgacagctcgtacagcttccgccacctgctggaatacatcaatgagggggccttgtgtgccgggctctgctttctgtcatggatgatcacaacgtggattctttcatctccctctcctctccacagatgggacagtatggagacacggactacttgaagtggctgttccccacctccatgcggtctaacctctatcggatctgctatagcccctggggccaggaattctccatctgcaactactggcatgatccccaccacgatgacttgtacctcaatgccagcagcttcctggccctgatcaatggggaaagagaccatcccaatgccacagtatggcggaagaactttctgcgtgtgggccacctggtgctgattgggggccctgatgatggtgttattactccctggcagtccagcttctttggtttctatgatgcaaatgagaccgtcctggagatggaggagcaactgcctgtagggtccagcgtcaaagcgaatcatggggtccagggctgagctgtgcactctcttaggcggattctccttcctcctgctactgataccaggc

SEQ ID NO: 21563 - DNA, 1754 bp, Homo sapiens
  source 1..1754: mol_type = unassigned DNA
gagtagagtagggcaggagaaactgggccaggctgcacttagctcaaggggcctcgaggactctctgcgtctctggagacaagggcactacacgcacttcagaatgaagagttgcgggagcatgctggggctctgggggcagcggctccccgcggcgtgggtcctgcttctgttgcctttcctgccgctgctgctgcttgcagcccccgcgccccaccgcgcgtcctacaagccggtcatcgtggtgcatgggctcttcgacagctcgtacagcttccgccacctgctggaatacatcaatgagacacaccccgggactgtggtgacagtgctcgatctcttcgatgggagagagagcttgcgacccctgtgggaacaggtgcaagggttccgagaggctgtggtccccatcatggcaaaggcccctcaaggggtgcatctcatctgctactcgcaggggggccttgtgtgccgggctctgctttctgtcatggatgatcacaacgtggattctttcatctccctctcctctccacagatgggacagtatggagacacggactacttgaagtggctgttccccacctccatgcggtctaacctctatcggatctgctatagcccctggggccaggaattctccatctgcaactactggcatgatccccaccacgatgacttgtacctcaatgccagcagcttcctggccctgatcaatggggaaagagaccatcccaatgccacagtatggcggaagaactttctgcgtgtgggccacctggtgctgattgggggccctgatgatggtgttattactccctggcagtccagcttctttggtttctatgatgcaaatgagaccgtcctggagatggaggagcaactggtttatctgcgggattcttttgggttgaagactctattggcccggggggccatagtgaggtgtccaatggccggtatctcccacacagcctggcactccaaccgtaccctttatgagacctgcattgaaccttggctctcctgaggatatattcaggggtccccaggaactcctcggtccagagaccaagtggtggccttggaaagcagatgtcaggctttggtgtgcctgtgaccacctcattgctcccatattatcccccatttttagtagagacggggttttagtagagacttggcctcccagaacccccttcctctgctcctccatgaatgacaattccaggcctcccctacctcatgtcctctcatttgggggattgctccgtgctgtccctttctctcaaggccgaagttgggaagtgagaaaccatgtttttaacttgtggctgcttttgctgctgctgctcctccgtatctggctgtatgggtggagaacccaccccctgcccaccacaggggtctccttccaggccactcaggacatttttagcttctctcctccccatgttcccttttttctctaaagtcccctgacatcagccctcccaactcctaagagggactacccatgagagtggggttctgaggctcccctatggggacagttccgttcttgaagtgtcagtgttggggaatatctgtggcctatgaggcccatctcaggtttggggatcccccagtccctatgatcagtgttggagtacccccctgggagagcctagtttctttgaggccccaggccctcttttaactacctttgaataggtgttatccctgtatttatggaaataaagttccatttcctc

SEQ ID NO: 21564 - DNA, 1269 bp, Homo sapiens
  source 1..1269: mol_type = unassigned DNA
gcttgaagcctcccaggagaaagaagccagcctgtagggtccagcgtcaaagcgaatcatggggtccagggctgagctgtgcactctcttaggcggattctccttcctcctgctactgataccaggcgagggggccaagggtggatccctcagagagagtcagggagtctgctccaagcagacactggtggtcccgctccactacaacgagtcctacagccaaccagtgtacaagccctacctgaccttgtgcgctgggaggcgcatctgcagcacttacaggaccatgtaccgcgttatgtggcgggaggtgaggcgggaggttcagcagacccatgcagtgtgctgccagggctggaagaagcggcacccgggggcgctcacctgtgaagccatctgcgccaagccttgcctgaacggaggcgtctgcgttaggcctgaccagtgcgagtgcgcccccggctggggagggaagcactgtcatgtggacgtggatgaatgtaggaccagcatcaccctctgctcgcaccattgttttaatacggcaggcagcttcacctgcggctgcccccatgacctagtgctaggcgtggacgggcgcacctgcatggaggggtccccagagcccccaaccagtgccagcatactcagcgtggccgttcgggaggcggaaaaagatgagcgcgctctgaagcaggagattcacgagctgcgagggcgcctggagcggctggagcagtgggccggtcaggctggggcctgggtcagagcggtgctgcccgtgccgcctgaagagctgcagccagaacaggtggctgagctgtggggccggggtgaccggatcgaatctctcagcgaccaggtgctgctgctggaggagaggctaggtgcctgctcctgtgaggacaacagcctgggcctcggcgtcaatcatcgataagaagcctctacagcacccctgccccctaatttatacagaaaccggacccactaatcctctgggattggccgactgtgagctgcagataaggctatcagccaccaaagagcaatgaacaatggaaacttcagagagctgaagaaagggggaggcctgtgttcttggcctgcccctgagtcttctggctgggggcaggttgcctgggcaagaactgcttcttcaattccttaacaaatgcaaccaccaacacccagatctctctctctctttattttcagtttttttgctgttatccagataattaataaaaaccaaccacgcaaaactgg

SEQ ID NO: 21565 - DNA, 1474 bp, Homo sapiens
  source 1..1474: mol_type = unassigned DNA
ggaagtggggagaatcaaggcggggaaatcggacttttgggtcgctgggggcaacgaagcctggagaggccttctttccattcccagaatatgtttgctgctttttcctctccccactggcctaaatggatcgctccgcctgtttcctccccagcacctagggcgcaatggaatattccattgcccctcctgtcctgggtctgtgttgcggggaacgctcgcgcggttgccagagaaagccccggacgtgacggatttgcgcgaccccaagcagcccgcccttccccctcccatccgtcattcccctgcgctctctttcctcacccttccccccgccaccgtgggttccagacttgggataagtaaacagcgggtggagcgaggcctacggacccaggccaggtgggagtctgcactcttcaaggggcctgggctgctgctcacgggtattaaagaactccgcgttgttcatggctgaggcgatgcattaggaagatcctggacctagagaacaagtcccccgaacgctgagttggaggcgggacttcgggtgcgcgttggcgggagcatgctggggctctgggggcagcggctccccgcggcgtgggtcctgcttctgttgcctttcctgccgctgctgctgcttgcagcccccgcgccccaccgcgcgtcctacaagccggtcatcgtggtgcatgggctcttcgacagctcgtacagcttccgccacctgctggaatacatcaatgagacacaccccgggactgtggtgacagtgctcgatctcttcgatgggagagagagcttgcgacccctgtgggaacaggtgcaagggttccgagaggctgtggtccccatcatggcaaaggcccctcaaggggtgcatctcatctgctactcgcaggggggccttgtgtgccgggctctgctttctgtcatggatgatcacaacgtggattctttcatctccctctcctctccacagatgggacagtatggagacacggactacttgaagtggctgttccccacctccatgcggtctaacctctatcggatctgctatagcccctggggccaggaattctccatctgcaactactggcatgatccccaccacgatgacttgtacctcaatgccagcagcttcctggccctgatcaatggggaaagagaccatcccaatgccacagtatggcggaagaactttctgcgtgtgggccacctggtgctgattgggggccctgatgatggtgttattactccctggcagtccagcttctttggtttctatgatgcaaatgagaccgtcctggagatggaggagcaactgcctgccaggcccacccaccagtctgagctgcttctgctgaggctggtctgcttgaagcctcccaggagaaagaagccagcctgtagggtccagcgtcaaagcgaatcatggggtccagggctgagctgtgcactctcttag

SEQ ID NO: 21566 - DNA, 2202 bp, Homo sapiens
  source 1..2202: mol_type = unassigned DNA
ggaagtggggagaatcaaggcggggaaatcggacttttgggtcgctgggggcaacgaagcctggagaggccttctttccattcccagaatatgtttgctgctttttcctctccccactggcctaaatggatcgctccgcctgtttcctccccagcacctagggcgcaatggaatattccattgcccctcctgtcctgggtctgtgttgcggggaacgctcgcgcggttgccagagaaagccccggacgtgacggatttgcgcgaccccaagcagcccgcccttccccctcccatccgtcattcccctgcgctctctttcctcacccttccccccgccaccgtgggttccagacttgggataagtaaacagcgggtggagcgaggcctacggacccaggccaggtgggagtctgcactcttcaaggggcctgggctgctgctcacgggtattaaagaactccgcgttgttcatggctgaggcgatgcattaggaagatcctggacctagagaacaagtcccccgaacgctgagttggaggcgggacttcgggtgcgcgttggcgggagcatgctggggctctgggggcagcggctccccgcggcgtgggtcctgcttctgttgcctttcctgccgctgctgctgcttgcagcccccgcgccccaccgcgagtcctacaagccggtcatcgtggtgcatgggctcttcgacagctcgtacagcttccgccacctgctggaatacatcaatgagacacaccccgggactgtggtgacagtgctcgatctcttcgatgggagagagagcttgcgacccctgtgggaacaggtgcaagggttccgagaggctgtggtccccatcatggcaaaggcccctcaaggggtgcatctcatctgctactcgcaggggggccttgtgtgccgggctctgctttctgtcatggatgatcacaacgtggattctttcatctccctctcctctccacagatgggacagtatggagacacggactacttgaagtggctgttccccacctccatgcggtctaacctctatcggatctgctatagcccctggggccaggaattctccatctgcaactactggcatgatccccaccacgatgacttgtacctcaatgccagcagcttcctggccctgatcaatggggaaagagaccatcccaatgccacagtatggcggaagaactttctgcgtgtgggccacctggtgctgattgggggccctgatgatggtgttattactccctggcagtccagcttctttggtttctatgatgcaaatgagaccgtcctggagatggaggagcaactggtttatctgcgggattcttttgggttgaagactctattggcccggggggccatagtgaggtgtccaatggccggtatctcccacacagcctggcactccaaccgtaccctttatgagacctgcattgaaccttggctctcctgaggatatattcaggggtccccaggaactcctcggtccagagaccaagtggtggccttggaaagcagatgtcaggctttggtgtgcctgtgaccacctcattgctcccatattatcccccatttttagtagagacggggttttagtagagacttggcctcccagaacccccttcctctgctcctccatgaatgacaattccaggcctcccctacctcatgtcctctcatttgggggattgctccgtgctgtccctttctctcaaggccgaagttgggaagtgagaaaccatgtttttaacttgtggctgcttttgctgctgctgctcctccgtatctggctgtatgggtggagaacccaccccctgcccaccacaggggtctccttccaggccactcaggacatttttagcttctctcctccccatgttcccttttttctctaaagtcccctgacatcagccctcccaactcctaagagggactacccatgagagtggggttctgaggctcccctatggggacagttccgttcttgaagtgtcagtgttggggaatatctgtggcctatgaggcccatctcaggtttggggatcccccagtccctatgatcagtgttggagtacccccctgggagagcctagtttctttgaggccccaggccctcttttaactacctttgaataggtgttatccctgtatttatggaaataaagttccatttcctca

SEQ ID NO: 21567 - DNA, 1051 bp, Homo sapiens
  source 1..1051: mol_type = unassigned DNA
gttgccagagaaagccccggacgtgacggatttgcgcgaccccaagcagcccgcccttccccctcccatccgtcattcccctgcgctctctttcctcacccttccccccgccaccgtgggttccagacttgggataagtaaacagcgggtggagcgaggcctacggacccaggccaggtgggagtctgcactcttcaaggggcctgggctgctgctcacgggtattaaagaactccgcgttgttcatggctgaggcgatgcattaggaagatcctggacctagagaacaagtcccccgaacgctgagttggaggcgggacttcgggtgcgcgttggcgggagcatgctggggctctgggggcagcggctccccgcggcgtgggtcctgcttctgttgcctttcctgccgctgctgctgcttgcagcccccgcgccccaccgcgcgtcctacaagccggtcatcgtggtgcatgggctcttcgacagctcgtacagcttccgccacctgctggaatacatcaatgagggggccttgtgtgccgggctctgctttctgtcatggatgatcacaacgtggattctttcatctccctctcctctccacagatgggacagtatggagacacggactacttgaagtggctgttccccacctccatgcggtctaacctctatcggatctgctatagcccctggggccaggaattctccatctgcaactactggcatgatccccaccacgatgacttgtacctcaatgccagcagcttcctggccctgatcaatggggaaagagaccatcccaatgccacagtatggcggaagaactttctgcgtgtgggccacctggtgctgattgggggccctgatgatggtgttattactccctggcagtccagcttctttggtttctatgatgcaaatgagaccgtcctggagatggaggagcaactgcctgtagggtccagcgtcaaagcgaatcatggggtccagggctgagctgtgcactctcttaggcggattctccttcctcctgctactgataccaggc

SEQ ID NO: 21568 - DNA, 1277 bp, Homo sapiens; identical to SEQ ID NO: 9348
  source 1..1277: mol_type = unassigned DNA

SEQ ID NO: 21569 - DNA, 1474 bp, Homo sapiens; identical to SEQ ID NO: 21565
  source 1..1474: mol_type = unassigned DNA

SEQ ID NO: 21570 - DNA, 1051 bp, Homo sapiens; identical to SEQ ID NO: 21567
  source 1..1051: mol_type = unassigned DNA

SEQ ID NO: 21571 - DNA, 1474 bp, Homo sapiens
  source 1..1474: mol_type = unassigned DNA
ggaagtggggagaatcaaggcggggaaatcggactttcgggtcgctgggggcaacgaagcctggagaggccttctttccattcccagaatatgtttgctgctttttcctctccccactggcctaaatggatcgctccgcctgtttcctccccagcacctagggcgcaatggaatattccattgcccctcctgtcctgggtctgtgttgcggggaacgctcgcgcggttgccagagaaagccccggacgtgacggatttgcgcgaccccaagcagcccgcccttccccctcccatccgtcattcccctgcgttctctttcctcacccttccccccgccaccgtgggttccagacttgggataagtaaacagcgggtggagcgaggcctacggacccaggccaggtgggagtctgcactcttcaaggggcctgggctgctgctcacgggtattaaagaactccgcgttgttcatggctgaggcgatgcattaggaagatcctggacctagagaacaagtcccccgaacgctgagttggaggcgggacttcgggtgcgcgttggcgggagcatgctggggctctgggggcagcggctccccgcggcgtgggtcctgcttctgttgcctttcctgccgctgctgctgcttgcagcccccgcgccccaccgcgcgtcctacaagccggtcatcgtggtgcatgggctcttcgacagctcgtacagcttccgccacctgctggaatacatcaatgagacacaccccgggactgtggtgacagtgctcgatctcttcgatgggagagagagcttgcgacccctgtgggaacaggtgcaagggttccgagaggctgtggtccccatcatggcaaaggcccctcaaggggtgcatctcatctgctactcgcaggggggccttgtgtgccgggctctgctttctgtcatggatgatcacaacgtggattctttcatctccctctcctctccacagatgggacagtatggagacacggactacttgaagtggctgttccccacctccatgcggtctaacctctatcggatctgctatagcccctggggccaggaattctccatctgcaactactggcatgatccccaccacgatgacttgtacctcaatgccagcagcttcctggccctgatcaatggggaaagagaccatcccaatgccacagtatggcggaagaactttctgcgtgtgggccacctggtgctgattgggggccctgatgatggtgttattactccctggcagtccagcttctttggtttctatgatgcaaatgagaccgtcctggagatggaggagcaactgcctgccaggcccacccaccagtctgagctgcttctgctgaggctggtctgcttgaagcctcccaggagaaagaagccagcctgtagggtccagcgtcaaagcgaatcatggggtccagggctgagctgtgcactctcttag

SEQ ID NO: 21572 - DNA, 1051 bp, Homo sapiens; identical to SEQ ID NO: 21567
  source 1..1051: mol_type = unassigned DNA

SEQ ID NO: 21573 - DNA, 1269 bp, Homo sapiens
  source 1..1269: mol_type = unassigned DNA
gcttgaagcctcccaggagaaagaagccagcctgtagggtccagcgtcaaagcgaatcatggggtccagggctgagctgtgcactctcttaggcggattctccttcctcctgctactgataccaggcgagggggccaagggtggatccctcagagagagtcagggagtctgctccaagcagacactggtggtcccgctccactacaacgagtcctacagccaaccagtgtacaagccctacctgaccttgtgcgctgggaggcgcatctgcagcacttacaggaccatgtaccgcgttatgtggcgggaggtgaggcgggaggttcagcagacccatgcagtgtgctgccagggctggaagaagcggcacccgggggcgctcacctgtgaagccatctgcgccaagccttgcctgaacggaggcgtctgcgttaggcctgaccagtgcgagtgcgcccccggctggggagggaagcactgtcatgtggacgtggatgaatgtaggaccagcatcaccctctgctcgcaccattgttttaatacggcaggcagcttcacctgcggctgcccccatgacctagtgctaggcgtggacgggcgcacctgcatggaggggtccccagagcccccaaccagtgccagcatactcagcgtggccgttcgggaggcagaaaaagatgagcgcgctctgaagcaggagattcacgagctgcgagggcgcctggagcggctggagcagtgggccggtcaggctggggcctgggtcagagcggtgctgcccgtgccgcctgaagagctgcagccagaacaggtggctgagctgtggggccggggtgaccggatcgaatctctcagcgaccaggtgctgctgctggaggagaggctaggtgcctgctcctgtgaggacaacagcctgggcctcggcgtcaatcatcgataagaagcctctacagcacccctgccccctaatttatacagaaaccggacccactaatcctctgggattggccgactgtgagctgcagataaggctatcagccaccaaagagcaatgaacaatggaaacttcagagagctgaagaaagggggaggcctgtgttcttggcctgcccctgagtcttctggctgggggcaggttgcctgggcaagaactgcttcttcaattccttaacaaatgcaaccaccaacacccagatctctctctctctttattttcagtttttttgctgttatccagataattaataaaaaccaaccacgcaaaactgg

SEQ ID NO: 21574 - DNA, 1269 bp, Homo sapiens; identical to SEQ ID NO: 21564
  source 1..1269: mol_type = unassigned DNA

SEQ ID NO: 21575 - DNA, 2202 bp, Homo sapiens; identical to SEQ ID NO: 21560
  source 1..2202: mol_type = unassigned DNA

SEQ ID NO: 21576 - DNA, 1051 bp, Homo sapiens; identical to SEQ ID NO: 21567
  source 1..1051: mol_type = unassigned DNA

SEQ ID NO: 21577 - DNA, 2202 bp, Homo sapiens; identical to SEQ ID NO: 21560
  source 1..2202: mol_type = unassigned DNA

SEQ ID NO: 21578 - DNA, 1051 bp, Homo sapiens
  source 1..1051: mol_type = unassigned DNA
gttgccagagaaagccccggacgtgacggatttgcgcgaccccaagcagcccgcccttccccctcccatccgtcattcccctgcgctctctttcctcacccttccccccgccaccgtgggttccagacttgggataagtaaacagcgggtggagcgaggcctacggacccaggccaggtgggagtctgcactcttcaaggggcctgggctgctgctcacgggtattaaagaactccgcgttgttcatggctgaggcgatgcattaggaagatcctggacctagagaacaagtcccccgaacgctgagttggaggcgggacttcgggtgcgcgttggcgggagcatgctggggctctgggggcagcggctccccgcggcgtgggtcctgcttctgttgcctttcctgccgctgctgctgcttgcagcccccgcgccccaccgcgagtcctacaagccggtcatcgtggtgcatgggctcttcgacagctcgtacagcttccgccacctgctggaatacatcaatgagggggccttgtgtgccgggctctgctttctgtcatggatgatcacaacgtggattctttcatctccctctcctctccacagatgggacagtatggagacacggactacttgaagtggctgttccccacctccatgcggtctaacctctatcggatctgctatagcccctggggccaggaattctccatctgcaactactggcatgatccccaccacgatgacttgtacctcaatgccagcagcttcctggccctgatcaatggggaaagagaccatcccaatgccacagtatggcggaagaactttctgcgtgtgggccacctggtgctgattgggggccctgatgatggtgttattactccctggcagtccagcttctttggtttctatgatgcaaatgagaccgtcctggagatggaggagcaactgcctgtagggtccagcgtcaaagcgaatcatggggtccagggctgagctgtgcactctcttaggcggattctccttcctcctgctactgataccaggc

SEQ ID NO: 21579 - DNA, 1474 bp, Homo sapiens; identical to SEQ ID NO: 21565
  source 1..1474: mol_type = unassigned DNA

SEQ ID NO: 21580 - DNA, 1474 bp, Homo sapiens
  source 1..1474: mol_type = unassigned DNA
ggaagtggggagaatcaaggcggggaaatcggacttttgggtcgctgggggcaacgaagcctggagaggccttctttccattcccagaatatgtttgctgctttttcctctccccactggcctaaatggatcgctccgcctgtttcctccccagcacctagggcgcaatggaatattccattgcccctcctgtcctgggtctgtgttgcggggaacgctcgcgcggttgccagagaaagccccggacgtgacggatttgcgcgaccccaagcagcccgcccttccccctcccatccgtcattcccctgcgctctctttcctcacccttccccccgccaccgtgggttccagacttgggataagtaaacagcgggtggagcgaggcctacggacccaggccaggtgggagtctgcactcttcaaggggcctgggctgctgctcacgggtattaaagaactccgcgttgttcatggctgaggcgatgcattaggaagatcctggacctagagaacaagtcccccgaacgctgagttggaggcgggacttcgggtgcgcgttggcgggagcatgctggggctctgggggcagcggctccccgcggcgtgggtcctgcttctgttgcctttcctgccgctgctgctgcttgcagcccccgcgccccaccgcgagtcctacaagccggtcatcgtggtgcatgggctcttcgacagctcgtacagcttccgccacctgctggaatacatcaatgagacacaccccgggactgtggtgacagtgctcgatctcttcgatgggagagagagcttgcgacccctgtgggaacaggtgcaagggttccgagaggctgtggtccccatcatggcaaaggcccctcaaggggtgcatctcatctgctactcgcaggggggccttgtgtgccgggctctgctttctgtcatggatgatcacaacgtggattctttcatctccctctcctctccacagatgggacagtatggagacacggactacttgaagtggctgttccccacctccatgcggtctaacctctatcggatctgctatagcccctggggccaggaattctccatctgcaactactggcatgatccccaccacgatgacttgtacctcaatgccagcagcttcctggccctgatcaatggggaaagagaccatcccaatgccacagtatggcggaagaactttctgcgtgtgggccacctggtgctgattgggggccctgatgatggtgttattactccctggcagtccagcttctttggtttctatgatgcaaatgagaccgtcctggagatggaggagcaactgcctgccaggcccacccaccagtctgagctgcttctgctgaggctggtctgcttgaagcctcccaggagaaagaagccagcctgtagggtccagcgtcaaagcgaatcatggggtccagggctgagctgtgcactctcttag

SEQ ID NO: 21581 - DNA, 1474 bp, Homo sapiens; identical to SEQ ID NO: 21565
  source 1..1474: mol_type = unassigned DNA

SEQ ID NO: 21582 - DNA, 2202 bp, Homo sapiens
  source 1..2202: mol_type = unassigned DNA
ggaagtggggagaatcaaggcggggaaatcggactttcgggtcgctgggggcaacgaagcctggagaggccttctttccattcccagaatatgtttgctgctttttcctctccccactggcctaaatggatcgctccgcctgtttcctccccagcacctagggcgcaatggaatattccattgcccctcctgtcctgggtctgtgttgcggggaacgctcgcgcggttgccagagaaagccccggacgtgacggatttgcgcgaccccaagcagcccgcccttccccctcccatccgtcattcccctgcgttctctttcctcacccttccccccgccaccgtgggttccagacttgggataagtaaacagcgggtggagcgaggcctacggacccaggccaggtgggagtctgcactcttcaaggggcctgggctgctgctcacgggtattaaagaactccgcgttgttcatggctgaggcgatgcattaggaagatcctggacctagagaacaagtcccccgaacgctgagttggaggcgggacttcgggtgcgcgttggcgggagcatgctggggctctgggggcagcggctccccgcggcgtgggtcctgcttctgttgcctttcctgccgctgctgctgcttgcagcccccgcgccccaccgcgcgtcctacaagccggtcatcgtggtgcatgggctcttcgacagctcgtacagcttccgccacctgctggaatacatcaatgagacacaccccgggactgtggtgacagtgctcgatctcttcgatgggagagagagcttgcgacccctgtgggaacaggtgcaagggttccgagaggctgtggtccccatcatggcaaaggcccctcaaggggtgcatctcatctgctactcgcaggggggccttgtgtgccgggctctgctttctgtcatggatgatcacaacgtggattctttcatctccctctcctctccacagatgggacagtatggagacacggactacttgaagtggctgttccccacctccatgcggtctaacctctatcggatctgctatagcccctggggccaggaattctccatctgcaactactggcatgatccccaccacgatgacttgtacctcaatgccagcagcttcctggccctgatcaatggggaaagagaccatcccaatgccacagtatggcggaagaactttctgcgtgtgggccacctggtgctgattgggggccctgatgatggtgttattactccctggcagtccagcttctttggtttctatgatgcaaatgagaccgtcctggagatggaggagcaactggtttatctgcgggattcttttgggttgaagactctattggcccggggggccatagtgaggtgtccaatggccggtatctcccacacagcctggcactccaaccgtaccctttatgagacctgcattgaaccttggctctcctgaggatatattcaggggtccccaggaactcctcggtccagagaccaagtggtggccttggaaagcagatgtcaggctttggtgtgcctgtgaccacctcattgctcccatattatcccccatttttagtagagacggggttttagtagagacttggcctcccagaacccccttcctctgctcctccatgaatgacaattccaggcctcccctacctcatgtcctctcatttgggggattgctccgtgctgtccctttctctcaaggccgaagttgggaagtgagaaaccatgtttttaacttgtggctgcttttgctgctgctgctcctccgtatctggctgtatgggtggagaacccaccccctgcccaccacaggggtctccttccaggccactcaggacatttttagcttctctcctccccatgttcccttttttctctaaagtcccctgacatcagccctcccaactcctaagagggactacccatgagagtggggttctgaggctcccctatggggacagttccgttcttgaagtgtcagtgttggggaatatctgtggcctatgaggcccatctcaggtttggggatcccccagtccctatgatcagtgttggagtacccccctgggagagcctagtttctttgaggccccaggccctcttttaactacctttgaataggtgttatccctgtatttatggaaataaagttccatttcctca

SEQ ID NO: 21583 - DNA, 4537 bp, Homo sapiens
  source 1..4537: mol_type = unassigned DNA
cttggcgccgtagtggttaggttgagccctaggcgtgggggagaactggggaaactggaatttcccgcggagctgacagcgcttgcgctccccctactcgttctaattccacgcgctccaaaatatccgccatggagaaatcttggccaggatgtccattctaggcccatcggtgctgtcttgctgaaggttgggtcaggcatctaaagggactgtggtaagggagggtgtgacacaggtgtaagctgccatcgtcatcatgaactttgagggtctggaccctggactggcagaatatgccccagccatgcattctgccctggaccctgtcttggatgcccacctgaacccaagtctgctacagaatgtggagctggacccagagggagtggccttggaggctcttcccgtccaggaatcagtgcacataatggaaggtgtctactctgaattgcacagcgtggtggctgaagtgggtgtacctgtttccgtctcccactttgacttgcacgaggagatgctgtgggtggggagccacgggggccatgccacttcattttttggcccagccttggagcgctactcatcctttcaagtcaatggcagtgatgatattcggcagatccagagcctggagaatggtatcctttttctcaccaagaacaacctcaagtatatggcccgtgggggcctcattatatttgattacctgctggatgagaatgaggatatgcacagtctcctactgactgacagcagcactctactcgttggtgggctgcagaatcacataatagagattgatcttaacactgtccaggagactcagaagtatgcagtagagacgcctggagtcaccatcatgagacagacaaatcgcttcttcttctgcggccacacgtctggcaaggtttccctgagagacctccgtacttttaaggtggaacatgagtttgatgccttctcaggaagtctgtcagactttgatgtgcatggcaacctgctagctgcctgtggcttctccagccgcctcactggcctggcctgcgaccgtttcctcaaggtgtatgatttgcgcatgatgcgtgccatcacaccacttcaagtacatgtggatcctgccttcttgcgcttcattcctacatatacttctcgtcttgctatcatctctcagtcagggcagtgccaattctgtgaacccacaggcctggccaacccagccgatatctttcatgtgaatcctgtggggcctctgctaatgacatttgatgtgtcagccagcaagcaggctctggcctttggggattctgagggctgtgtgcacctctggactgattccccggagccttccttcaacccctactcccgtgagactgagtttgctttgccgtgtctcgtggactcactgcctcctctggactggagccaggacctgctgcctctttccctcatccctgtcccactcaccactgacacacttctctctgattggcctgctgccaactctgctccagctcccaggcgagcaccacccgtggatgcagagattctgcgcaccatgaagaaggtgggcttcattggctatgcgcccaatccccgcaccaggctgcgcaatcagataccctacagactcaaggagtcagacagtgaatttgacagcttcagccaggtcactgagtcaccagtaggacgagaagaggaaccacatctccacatggtttctaagaaataccgcaaggtgaccatcaaatattccaagctagggctggaggactttgacttcaaacactacaataagaccttgtttgctggattagagccccacattcccaacgcctactgtaactgcatgatccaggtgctctatttcctggagcctgtacgctgtctaattcaaaaccacctttgccagaaggagttctgtctggcatgtgagctgggcttcctgtttcacatgttggacctctctcgtggtgacccttgccagggcaataattttcttcgggcattccgtactattcctgaggcctcagccctcggtctaatcctggctgactcagatgaggcctcaggcaagggcaatctggccaggctcattcagaggtggaatcgcttcattctcactcaactgcatcaagatatgcaggagctggaaataccacaggcttatcgaggtgctggaggcagcttttgctcatcgggggactctgttattgggcagctcttcagctgtgagatggagaactgcagcctctgccgctgtggcagtgagaccgtgcgagcctcatccactctgcttttcacactctcctaccctgatggtagcaaaagtgataaaactgggaagaactatgactttgctcaggtgctgaagcgaagcatctgcctggaccagaatacacaggcctggtgtgacacctgtgaaaagtaccagcccacgattcagacccgcaacatccgccatctgccagatattcttgtcatcaattgtgaggtgaacagctcaaaagaggctgatttctggagaatgcaggctgaggttgccttcaagatggcagtaaagaaacacggtggggaaatctccaagaacaaggaatttgctttggctgattggaaggaactagggagtccagagggtgtgctggtgtgtccctccattgaggagttgaagaacgtctggcttcctttctccattcgcatgaagatgaccaaaaacaaagggctggatgtttgcaattggactgatggggatgagatgcagtggggcccagccagggcagaggaggagcatggtgtctatgtgtatgacctgatggctactgtggtacacatcctggactcacgcacagggggcagcctggtggctcacatcaaagttggagagacctaccaccagcgcaaggagggcgttactcaccagcagtggtatctgttcaatgactttcttattgaacctattgataagcatgaagctgtgcagtttgacatgaattggaaagtacctgcaatcctttattatgtcaaacggaatctcaattccagatacaacctgaacatcaagaaccctattgaggcaagtgtcttgctggctgaagcctcgctggcacggaagcagcggaaaacacatactacctttattccactgatgctgaatgagatgccacagattggggacctggtgggtctggatgctgagtttgtcacccttaatgaggaggaagcagagttacgcagtgatggtaccaagtctaccattaaaccaagccagatgtcagtagccaggattacctgtgttcggggccagggacccaatgagggtatccccttcattgatgactacatctctacccaggagcaggtggtggattacttgactcaatactcgggtataaagcctggtgacctcgatgccaaaatttcctccaagcacctaacaactctcaagtctacctacttaaagcttcgttttctcattgacattggagtcaagtttgtgggtcatggcctgcagaaggacttccgggtcatcaacctgatggtgcccaaggaccaagtccttgacactgtctacctgttccatatgccccgaaaacgaatgatttccctgcgattccttgcttggtactttctggacctgaagattcaaggggaaacccatgacagtattgaggatgcccgcacagcccttcagctgtaccgaaagtatctggagctaagcaaaaatggcactgagcctgagtctttccacaaggtgctcaagggtctttatgagaagggcagaaagatggactggaaggtgcctgagcctgagggccaaacaagtcccaagaatgcagctgtcttctcctcagtgctggcgctctgactacccttcccaaagaaccacggccctctccctttactgttctatagccccagaactgggagatggcttcctaagttggctataccttgtccacttccagtactggacgtgctcagggtctagggtcacagatggtgctattaattgaactggaacacagcagaattgttgcaaaggttctaggagccagattcattccttcttcattctttgcaaaacagtggtacagacatggagtctagaattgacccagatggaaagtaattggtattcttaatatcctgggtgactaatatccaggcagagaagctcctggaaccataactgtaagttcctagctggctagggattgaagtcctggacagtgacagaggataccacagtagttcaagacttagcacaagtcaccaactgcttcagggatacctggaggggccagcaagtagagtgttggtggcccaagcaaaccagtgttgccaataccattgccaaaagggcctttggatcctggacaaagcttggctgccggcttcatttattcctgctgatggctgagaagcatctgtcttccatcccacttgcctgtcccaagttttgttccattttttaaaaatttgttgtaaactgcatgttttataaaataaaaataaaatatcgtttgttatttatctc

SEQ ID NO: 21584 - DNA, 5372 bp, Homo sapiens
  source 1..5372: mol_type = unassigned DNA
agagaattctgggtaactagccgtttccgtcaccttcccctgcccccgccccaattgtgggtaactggccattattgttttcctctagagaatcctgggtagctattggagaggattctaggaaactgacttctcgttctccccaccgtccaatccacccgttttcacccccaattctgggagaaagcaccttaaatccctctacctaactccaacccccgcaattctcgctcccttcacctgatgattcagggctgaacaaggccaggatgtccattctaggcccatcggtgctgtcttgctgaaggttgggtcaggcatctaaagggactgtggtaagggagggtgtgacacaggtgtaagctgccatcgtcatcatgaactttgagggtctggaccctggactggcagaatatgccccagccatgcattctgccctggaccctgtcttggatgcccacctgaacccaagtctgctacagaatgtggagctggacccagagggagtggccttggaggctcttcccgtccaggaatcagtgcacataatggaaggtgtctactctgaattgcacagcgtggtggctgaagtgggtgtacctgtttccgtctcccactttgacttgcacgaggagatgctgtgggtggggagccacgggggccatgccacttcattttttggcccagccttggagcgctactcatcctttcaagtcaatggcagtgatgatattcggcagatccagagcctggagaatggtatcctttttctcaccaagaacaacctcaagtatatggcccgtgggggcctcattatatttgattacctgctggatgagaatgaggatatgcacagtctcctactgactgacagcagcactctactcgttggtgggctgcagaatcacataatagagattgatcttaacactgtccaggagactcagaagtatgcagtagagacgcctggagtcaccatcatgagacagacaaatcgcttcttcttctgcggccacacgtctggcaaggtttccctgagagacctccgtacttttaaggtggaacatgagtttgatgccttctcaggaagtctgtcagactttgatgtgcatggcaacctgctagctgcctgtggcttctccagccgcctcactggcctggcctgcgaccgtttcctcaaggtgtatgatttgcgcatgatgcgtgccatcacaccacttcaagtacatgtggatcctgccttcttgcgcttcattcctacatatacttctcgtcttgctatcatctctcagtcagggcagtgccaattctgtgaacccacaggcctggccaacccagccgatatctttcatgtgaatcctgtggggcctctgctaatgacatttgatgtgtcagccagcaagcaggctctggcctttggggattctgagggctgtgtgcacctctggactgattccccggagccttccttcaacccctactcccgtgagactgagtttgctttgccgtgtctcgtggactcactgcctcctctggactggagccaggacctgctgcctctttccctcatccctgtcccactcaccactgacacacttctctctgattggcctgctgccaactctgctccagctcccaggcgagcaccacccgtggatgcagagattctgcgcaccatgaagaaggtgggcttcattggctatgcgcccaatccccgcaccaggctgcgcaatcagataccctacagactcaaggagtcagacagtgaatttgacagcttcagccaggtcactgagtcaccagtaggacgagaagaggaaccacatctccacatggtttctaagaaataccgcaaggtgaccatcaaatattccaagctagggctggaggactttgacttcaaacactacaataagaccttgtttgctggattagagccccacattcccaacgcctactgtaactgcatgatccaggtgctctatttcctggagcctgtacgctgtctaattcaaaaccacctttgccagaaggagttctgtctggcatgtgagctgggcttcctgtttcacatgttggacctctctcgtggtgacccttgccagggcaataattttcttcgggcattccgtactattcctgaggcctcagccctcggtctaatcctggctgactcagatgaggcctcaggcaagggcaatctggccaggctcattcagaggtggaatcgcttcattctcactcaactgcatcaagatatgcaggagctggaaataccacaggcttatcgaggtgctggaggcagcagcttttgctcatcgggggactctgttattgggcagctcttcagctgtgagatggagaactgcagcctctgccgctgtggcagtgagaccgtgcgagcctcatccactctgcttttcacactctcctaccctgatggtagcaaaagtgataaaactgggaagaactatgactttgctcaggtgctgaagcgaagcatctgcctggaccagaatacacaggcctggtgtgacacctgtgaaaagtaccagcccacgattcagacccgcaacatccgccatctgccagatattcttgtcatcaattgtgaggtgaacagctcaaaagaggctgatttctggagaatgcaggctgaggttgccttcaagatggcagtaaagaaacacggtggggaaatctccaagaacaaggaatttgctttggctgattggaaggaactagggagtccagagggtgtgctggtgtgtccctccattgaggagttgaagaacgtctggcttcctttctccattcgcatgaagatgaccaaaaacaaagggctggatgtttgcaattggactgatggggatgagatgcagtggggcccagccagggcagaggaggagcatggtgtctatgtgtatgacctgatggctactgtggtacacatcctggactcacgcacagggggcagcctggtggctcacatcaaagttggagagacctaccaccagcgcaaggagggcgttactcaccagcagtggtatctgttcaatgactttcttattgaacctattgataagcatgaagctgtgcagtttgacatgaattggaaagtacctgcaatcctttattatgtcaaacggaatctcaattccagatacaacctgaacatcaagaaccctattgaggcaagtgtcttgctggctgaagcctcgctggcacggaagcagcggaaaacacatactacctttattccactgatgctgaatgagatgccacagattggggacctggtgggtctggatgctgagtttgtcacccttaatgaggaggaagcagagttacgcagtgatggtaccaagtctaccattaaaccaagccagatgtcagtagccaggattacctgtgttcggggccagggacccaatgagggtatccccttcattgatgactacatctctacccaggagcaggtggtggattacttgactcaatactcgggtataaagcctggtgacctcgatgccaaaatttcctccaagcacctaacaactctcaagtctacctacttaaagcttcgttttctcattgacattggagtcaagtttgtgggtcatggcctgcagaaggacttccgggtcatcaacctgatggtgcccaaggaccaagtccttgacactgtctacctgttccatatgccccgaaaacgaatgatttccctgcgattccttgcttggtactttctggacctgaagattcaaggggaaacccatgacagtattgaggatgcccgcacagcccttcagctgtaccgaaagtatctggagctaagcaaaaatggcactgagcctgagtctttccacaaggtgctcaagggtctttatgagaagggcagaaagatggactggaaggtgcctgagcctgagggccaaacaagtcccaagaatgcagctgtcttctcctcagtgctggcgctctgactacccttcccaaagaaccacggccctctccctttactgttctatagccccagaactgggagatggcttcctaagttggctataccttgtccacttccagtactggacgtgctcagggtctagggtcacagatggtgctattaattgaactggaacacagcagaattgttgcaaaggttctaggagccagattcattccttcttcattctttgcaaaacagtggtacagacatggagtctagaattgacccagatggaaagtaattggtattcttaatatcctgggtgactaatatccaggcagagaagctcctggaaccataactgtaagttcctagctggctagggattgaagtcctggacagtgacagaggataccacagtagttcaagacttagcacaagtcaccaactgcttcagggatacctggaggggccagcaagtagagtgttggtggcccaagcaaaccagtgttgccaataccattgccaaaagggcctttggatcctggacaaagcttggctgccggcttcatttattcctgctgatggctgagaagcatctgtcttccatcccacttgcctgtcccaagttttgttccattttttaaaaatttgttgtaaactgcatgttttataaaataaaaataaaatatcgtttgttatttatctcattagagaactgctagtgtgggttctctggcttcagtcttcctctccttcctttgaaggtaaaggtccggaatccaaagttatggatatgaaagggtataattaggccgggcgcggtggctcacttctgtaatcctagcactttgggaggcagaggtgggtggaacacgaggtcaggagttaaagaccagcctgaccaagatggtgaaaccccgtctctactaaaaatacaaaaattagctgggagtggtggatggcgactgtaaccctagctgaggcagaaaattgcttcaacccgggaggcggaggttgcagtgagccgagatcacgccactgtatgccagcctgggcgatagggcgagactccgtctcaaaaaaaggggaaaaaggtataatttatgccttttctgggcaatgctgggtctttgctatagctgcccagtaccctaagtcagactgaagatgtacagtatggtttccgttaattgtgtaagccgacaaactacaggtcccaggatagcttgagacttgtagttgctcacaaagatgggtccggtgctgcggtgcttcctgggagatgtagtttcctgtgtattgaaacctggactgctcgctggccggcagcgcaccgttttgaaggtcctagcccacctgggctggctcacgcgcacgactagccgctcccatacagcacgcccggactctgtcgtcgctt

SEQ ID NO: 21585 - DNA, 4576 bp, Homo sapiens
  source 1..4576: mol_type = unassigned DNA
atgccccgagcccttcttgattggaagaagcgcctcggaccccggtccttggcgccgtagtggttaggttgagccctaggcgtgggggagaactggggaaactggaatttcccgcggagctgacagcgcttgcgctccccctactcgttctaattccacgcgctccaaaatatccgccatggagaaatcttggccaggatgtccattctaggcccatcggtgctgtcttgctgaaggttgggtcaggcatctaaagggactgtggtaagggagggtgtgacacaggtgtaagctgccatcgtcatcatgaactttgagggtctggaccctggactggcagaatatgccccagccatgcattctgccctggaccctgtcttggatgcccacctgaacccaagtctgctacagaatgtggagctggacccagagggagtggccttggaggctcttcccgtccaggaatcagtgcacataatggaaggtgtctactctgaattgcacagcgtggtggctgaagtgggtgtacctgtttccgtctcccactttgacttgcacgaggagatgctgtgggtggggagccacgggggccatgccacttcattttttggcccagccttggagcgctactcatcctttcaagtcaatggcagtgatgatattcggcagatccagagcctggagaatggtatcctttttctcaccaagaacaacctcaagtatatggcccgtgggggcctcattatatttgattacctgctggatgagaatgaggatatgcacagtctcctactgactgacagcagcactctactcgttggtgggctgcagaatcacataatagagattgatcttaacactgtccaggagactcagaagtatgcagtagagacgcctggagtcaccatcatgagacagacaaatcgcttcttcttctgcggccacacgtctggcaaggtttccctgagagacctccgtacttttaaggtggaacatgagtttgatgccttctcaggaagtctgtcagactttgatgtgcatggcaacctgctagctgcctgtggcttctccagccgcctcactggcctggcctgcgaccgtttcctcaaggtgtatgatttgcgcatgatgcgtgccatcacaccacttcaagtacatgtggatcctgccttcttgcgcttcattcctacatatacttctcgtcttgctatcatctctcagtcagggcagtgccaattctgtgaacccacaggcctggccaacccagccgatatctttcatgtgaatcctgtggggcctctgctaatgacatttgatgtgtcagccagcaagcaggctctggcctttggggattctgagggctgtgtgcacctctggactgattccccggagccttccttcaacccctactcccgtgagactgagtttgctttgccgtgtctcgtggactcactgcctcctctggactggagccaggacctgctgcctctttccctcatccctgtcccactcaccactgacacacttctctctgattggcctgctgccaactctgctccagctcccaggcgagcaccacccgtggatgcagagattctgcgcaccatgaagaaggtgggcttcattggctatgcgcccaatccccgcaccaggctgcgcaatcagataccctacagactcaaggagtcagacagtgaatttgacagcttcagccaggtcactgagtcaccagtaggacgagaagaggaaccacatctccacatggtttctaagaaataccgcaaggtgaccatcaaatattccaagctagggctggaggactttgacttcaaacactacaataagaccttgtttgctggattagagccccacattcccaacgcctactgtaactgcatgatccaggtgctctatttcctggagcctgtacgctgtctaattcaaaaccacctttgccagaaggagttctgtctggcatgtgagctgggcttcctgtttcacatgttggacctctctcgtggtgacccttgccagggcaataattttcttcgggcattccgtactattcctgaggcctcagccctcggtctaatcctggctgactcagatgaggcctcaggcaagggcaatctggccaggctcattcagaggtggaatcgcttcattctcactcaactgcatcaagatatgcaggagctggaaataccacaggcttatcgaggtgctggaggcagcagcttttgctcatcgggggactctgttattgggcagctcttcagctgtgagatggagaactgcagcctctgccgctgtggcagtgagaccgtgcgagcctcatccactctgcttttcacactctcctaccctgatgataaaactgggaagaactatgactttgctcaggtgctgaagcgaagcatctgcctggaccagaatacacaggcctggtgtgacacctgtgaaaagtaccagcccacgattcagacccgcaacatccgccatctgccagatattcttgtcatcaattgtgaggtgaacagctcaaaagaggctgatttctggagaatgcaggctgaggttgccttcaagatggcagtaaagaaacacggtggggaaatctccaagaacaaggaatttgctttggctgattggaaggaactagggagtccagagggtgtgctggtgtgtccctccattgaggagttgaagaacgtctggcttcctttctccattcgcatgaagatgaccaaaaacaaagggctggatgtttgcaattggactgatggggatgagatgcagtggggcccagccagggcagaggaggagcatggtgtctatgtgtatgacctgatggctactgtggtacacatcctggactcacgcacagggggcagcctggtggctcacatcaaagttggagagacctaccaccagcgcaaggagggcgttactcaccagcagtggtatctgttcaatgactttcttattgaacctattgataagcatgaagctgtgcagtttgacatgaattggaaagtacctgcaatcctttattatgtcaaacggaatctcaattccagatacaacctgaacatcaagaaccctattgaggcaagtgtcttgctggctgaagcctcgctggcacggaagcagcggaaaacacatactacctttattccactgatgctgaatgagatgccacagattggggacctggtgggtctggatgctgagtttgtcacccttaatgaggaggaagcagagttacgcagtgatggtaccaagtctaccattaaaccaagccagatgtcagtagccaggattacctgtgttcggggccagggacccaatgagggtatccccttcattgatgactacatctctacccaggagcaggtggtggattacttgactcaatactcgggtataaagcctggtgacctcgatgccaaaatttcctccaagcacctaacaactctcaagtctacctacttaaagcttcgttttctcattgacattggagtcaagtttgtgggtcatggcctgcagaaggacttccgggtcatcaacctgatggtgcccaaggaccaagtccttgacactgtctacctgttccatatgccccgaaaacgaatgatttccctgcgattccttgcttggtactttctggacctgaagattcaaggggaaacccatgacagtattgaggatgcccgcacagcccttcagctgtaccgaaagtatctggagctaagcaaaaatggcactgagcctgagtctttccacaaggtgctcaagggtctttatgagaagggcagaaagatggactggaaggtgcctgagcctgagggccaaacaagtcccaagaatgcagctgtcttctcctcagtgctggcgctctgactacccttcccaaagaaccacggccctctccctttactgttctatagccccagaactgggagatggcttcctaagttggctataccttgtccacttccagtactggacgtgctcagggtctagggtcacagatggtgctattaattgaactggaacacagcagaattgttgcaaaggttctaggagccagattcattccttcttcattctttgcaaaacagtggtacagacatggagtctagaattgacccagatggaaagtaattggtattcttaatatcctgggtgactaatatccaggcagagaagctcctggaaccataactgtaagttcctagctggctagggattgaagtcctggacagtgacagaggataccacagtagttcaagacttagcacaagtcaccaactgcttcagggatacctggaggggccagcaagtagagtgttggtggcccaagcaaaccagtgttgccaataccattgccaaaagggcctttggatcctggacaaagcttggctgccggcttcatttattcctgctgatggctgagaagcatctgtcttccatcccacttgcctgtcccaagttttgttccattttttaaaaatttgttgtaaactgcatgttttataaaataaaaataaaatatcgtttgttatttatctca

SEQ ID NO: 21586 - DNA, 4641 bp, Homo sapiens
  source 1..4641: mol_type = unassigned DNA
ttctgggtaactagccgtttccgtcaccttcccctgcccccgccccaattgtgggtaactggccattattgttttcctctagagaatcctgggtagctattggagaggattctaggaaactgacttctcgttctccccaccgtccaatccacccgttttcacccccaattctgggagaaagcaccttaaatccctctacctaactccaacccccgcaattctcgctcccttcacctgatgattcagggctgaacaaggcaagatgtccattctaggcccatcggtgctgtcttgctgaaggttgggtcaggcatctaaagggactgtggtaagggagggtgtgacacaggtgtaagctgccatcgtcatcatgaactttgagggtctggaccctggactggcagaatatgccccagccatgcattctgccctggaccctgtcttggatgcccacctgaacccaagtctgctacagaatgtggagctggacccagagggagtggccttggaggctcttcccgtccaggaatcagtgcacataatggaaggtgtctactctgaattgcacagcgtggtggctgaagtgggtgtacctgtttccgtctcccactttgacttgcacgaggagatgctgtgggtggggagccacgggggccatgccacttcattttttggcccagccttggagcgctactcatcctttcaagtcaatggcagtgatgatattcggcagatccagagcctggagaatggtatcctttttctcaccaagaacaacctcaagtatatggcccgtgggggcctcattatatttgattacctgctggatgagaatgaggatatgcacagtctcctactgactgacagcagcactctactcgttggtgggctgcagaatcacataatagagattgatcttaacactgtccaggagactcagaagtatgcagtagagacgcctggagtcaccatcatgagacagacaaatcgcttcttcttctgcggccacacgtctggcaaggtttccctgagagacctccgtacttttaaggtggaacatgagtttgatgccttctcaggaagtctgtcagactttgatgtgcatggcaacctgctagctgcctgtggcttctccagccgcctcactggcctggcctgcgaccgtttcctcaaggtgtatgatttgcgcatgatgcgtgccatcacaccacttcaagtacatgtggatcctgccttcttgcgcttcattcctacatatacttctcgtcttgctatcatctctcagtcagggcagtgccaattctgtgaacccacaggcctggccaacccagccgatatctttcatgtgaatcctgtggggcctctgctaatgacatttgatgtgtcagccagcaagcaggctctggcctttggggattctgagggctgtgtgcacctctggactgattccccggagccttccttcaacccctactcccgtgagactgagtttgctttgccgtgtctcgtggactcactgcctcctctggactggagccaggacctgctgcctctttccctcatccctgtcccactcaccactgacacacttctctctgattggcctgctgccaactctgctccagctcccaggcgagcaccacccgtggatgcagagattctgcgcaccatgaagaaggtgggcttcattggctatgcgcccaatccccgcaccaggctgcgcaatcagataccctacagactcaaggagtcagacagtgaatttgacagcttcagccaggtcactgagtcaccagtaggacgagaagaggaaccacatctccacatggtttctaagaaataccgcaaggtgaccatcaaatattccaagctagggctggaggactttgacttcaaacactacaataagaccttgtttgctggattagagccccacattcccaacgcctactgtaactgcatgatccaggtgctctatttcctggagcctgtacgctgtctaattcaaaaccacctttgccagaaggagttctgtctggcatgtgagctgggcttcctgtttcacatgttggacctctctcgtggtgacccttgccagggcaataattttcttcgggcattccgtactattcctgaggcctcagccctcggtctaatcctggctgactcagatgaggcctcaggcaagggcaatctggccaggctcattcagaggtggaatcgcttcattctcactcaactgcatcaagatatgcaggagctggaaataccacaggcttatcgaggtgctggaggcagcagcttttgctcatcgggggactctgttattgggcagctcttcagctgtgagatggagaactgcagcctctgccgctgtggcagtgagaccgtgcgagcctcatccactctgcttttcacactctcctaccctgatggtagcaaaagtgataaaactgggaagaactatgactttgctcaggtgctgaagcgaagcatctgcctggaccagaatacacaggcctggtgtgacacctgtgaaaagtaccagcccacgattcagacccgcaacatccgccatctgccagatattcttgtcatcaattgtgaggtgaacagctcaaaagaggctgatttctggagaatgcaggctgaggttgccttcaagatggcagtaaagaaacacggtggggaaatctccaagaacaaggaatttgctttggctgattggaaggaactagggagtccagagggtgtgctggtgtgtccctccattgaggagttgaagaacgtctggcttcctttctccattcgcatgaagatgaccaaaaacaaagggctggatgtttgcaattggactgatggggatgagatgcagtggggcccagccagggcagaggaggagcatggtgtctatgtgtatgacctgatggctactgtggtacacatcctggactcacgcacagggggcagcctggtggctcacatcaaagttggagagacctaccaccagcgcaaggagggcgttactcaccagcagtggtatctgttcaatgactttcttattgaacctattgataagcatgaagctgtgcagtttgacatgaattggaaagtacctgcaatcctttattatgtcaaacggaatctcaattccagatacaacctgaacatcaagaaccctattgaggcaagtgtcttgctggctgaagcctcgctggcacggaagcagcggaaaacacatactacctttattccactgatgctgaatgagatgccacagattggggacctggtgggtctggatgctgagtttgtcacccttaatgaggaggaagcagagttacgcagtgatggtaccaagtctaccattaaaccaagccagatgtcagtagccaggattacctgtgttcggggccagggacccaatgagggtatccccttcattgatgactacatctctacccaggagcaggtggtggattacttgactcaatactcgggtataaagcctggtgacctcgatgccaaaatttcctccaagcacctaacaactctcaagtctacctacttaaagcttcgttttctcattgacattggagtcaagtttgtgggtcatggcctgcagaaggacttccgggtcatcaacctgatggtgcccaaggaccaagtccttgacactgtctacctgttccatatgccccgaaaacgaatgatttccctgcgattccttgcttggtactttctggacctgaagattcaaggggaaacccatgacagtattgaggatgcccgcacagcccttcagctgtaccgaaagtatctggagctaagcaaaaatggcactgagcctgagtctttccacaaggtgctcaagggtctttatgagaagggcagaaagatggactggaaggtgcctgagcctgagggccaaacaagtcccaagaatgcagctgtcttctcctcagtgctggcgctctgactacccttcccaaagaaccacggccctctccctttactgttctatagccccagaactgggagatggcttcctaagttggctataccttgtccacttccagtactggacgtgctcagggtctagggtcacagatggtgctattaattgaactggaacacagcagaattgttgcaaaggttctaggagccagattcattccttcttcattctttgcaaaacagtggtacagacatggagtctagaattgacccagatggaaagtaattggtattcttaatatcctgggtgactaatatccaggcagagaagctcctggaaccataactgtaagttcctagctggctagggattgaagtcctggacagtgacagaggataccacagtagttcaagacttagcacaagtcaccaactgcttcagggatacctggaggggccagcaagtagagtgttggtggcccaagcaaaccagtgttgccaataccattgccaaaagggcctttggatcctggacaaagcttggctgccggcttcatttattcctgctgatggctgagaagcatctgtcttccatcccacttgcctgtcccaagttttgttccattttttaaaaatttgttgtaaactgcatgttttataaaataaaaataaaatatcgtttgt

SEQ ID NO: 21587 - DNA, 1537 bp, Homo sapiens
  source 1..1537: mol_type = unassigned DNA
cagccctccccagcgcagcgcgagcgcgggccagagcgcagcggccgcgggcactccagggaggcccgggggcgggcagcccggcggccgcctagctgcccccagccagggccccgggagggaggggctcggacgggccttagaaactcaccaagaactaacacgcgcagcccggcagtcccgctgcccactgcggcggcgagcatggacgcggtgttgctggagcacttccccgggggcctagacgcctttccttcttcgtacttcgacgaggacgacttcttcaccgaccagtcttcacgggaccccctggaggacggcgatgagctgctggcggacgagcaggccgaggtggagttccttagccaccagctccacgagtactgctaccgcgacggggcgtgcctgctgctgcagcccgcgcccccggccgccccgctagcgctcgccccgccgtcctcggggggcctcggtgagccagacgacggcggcggcggcggctactgctgcgagacgggggcgcccccaggcggcttcccctactcgcccggctcgccgccctcgtgcctggcctacccgtgcgccggggcggcagtactgtctcccggggcgcggctgcgcggcctgagcggagcggcggctgcggcggcgcggcgccggcggcgggtgcgctccgaggcggagctgcagcagctgcggcaggcggccaacgtgcgcgagcggcggcgcatgcagtccatcaacgacgccttcgaggggctgcgctcgcacatccccacgctgccctacgagaagcgcctctccaaggtggacacgctgcgcctggccatcggctacatcaacttcctcagcgagctcgtgcaggccgacctgcccttgcgcggcggtggcgcgggcggctgcggggggccgggcggcggcgggcgcctgggcggggacagcccgggcagccaggcccagaaggtcatcatctgccatcggggcacccggtccccctcccccagcgaccctgattatggcctccctcccctagcaggacactctctctcatggactgatgaaaaacaactcaaggaacaaaatattatccgaacagccaaagtctggaccccagaggaccccagaaaactcaacagcaaatcttccttcaacaacatagaaaacgaaccaccatttgagtttgtgtcctgagaagtcccagactcggctgaagatctgattatgtctctgtgcatattgtacatgtaaatatctataatgtaaatgtaatttaagaatcaaatttttcgaatggcaatcaactgtttattatttatctatttattatcctgttgagttgatgaaatagatgatttctttttaaatatataatttatataacttatcctgattttctgaaaatatgcaatagcctatgattttcctgaactctgtgttgttgggagaactctggccagaaaacgtcctgcttatttattgccagatatggtttatttctaagcgttgtcaataaatgctatttacaccttttcctgaa

SEQ ID NO: 21588 - DNA, 2501 bp, Homo sapiens
  source 1..2501: mol_type = unassigned DNA
aaagcgagcaggggtggcgccgggagtgggaacgccacacagtgccaaatccccggctccagctcccgactcccggctcccggctcccggctcccggtgcccaatcccgggccgcagccatgaacggcgaggagcagtactacgcggccacgcagctttacaaggacccatgcgcgttccagcgaggcccggcgccggagttcagcgccagcccccctgcgtgcctgtacatgggccgccagcccccgccgccgccgccgcacccgttccctggcgccctgggcgcgctggagcagggcagccccccggacatctccccgtacgaggtgccccccctcgccgacgaccccgcggtggcgcaccttcaccaccacctcccggctcagctcgcgctcccccacccgcccgccgggcccttcccggagggagccgagccgggcgtcctggaggagcccaaccgcgtccagctgcctttcccatggatgaagtctaccaaagctcacgcgtggaaaggccagtgggcaggcggcgcctacgctgcggagccggaggagaacaagcggacgcgcacggcctacacgcgcgcacagctgctagagctggagaaggagttcctattcaacaagtacatctcacggccgcgccgggtggagctggctgtcatgttgaacttgaccgagagacacatcaagatctggttccaaaaccgccgcatgaagtggaaaaaggaggaggacaagaagcgcggcggcgggacagctgtcgggggtggcggggtcgcggagcctgagcaggactgcgccgtgacctccggcgaggagcttctggcgctgccgccgccgccgccccccggaggtgctgtgccgcccgctgcccccgttgccgcccgagagggccgcctgccgcctggccttagcgcgtcgccacagccctccagcgtcgcgcctcggcggccgcaggaaccacgatgagaggcaggagctgctcctggctgaggggcttcaaccactcgccgaggaggagcagagggcctaggaggaccccgggcgtggaccacccgccctggcagttgaatggggcggcaattgcggggcccaccttagaccgaaggggaaaacccgctctctcaggcgcatgtgccagttggggccccgcgggtagatgccggcaggccttccggaagaaaaagagccattggtttttgtagtattggggccctcttttagtgatactggattggcgttgtttgtggctgttgcgcacatccctgccctcctacagcactccaccttgggacctgtttagagaagccggctcttcaaagacaatggaaactgtaccatacacattggaaggctccctaacacacacagcggggaagctgggccgagtaccttaatctgccataaagccattcttactcgggcgacccctttaagtttagaaataattgaaaggaaatgtttgagttttcaaagatcccgtgaaattgatgccagtggaatacagtgagtcctcctcttcctcctcctcctcttccccctccccttcctcctcctcctcttcttttccctcctcttcctcttcctcctgctctcctttcctccccctcctcttttccctcctcttcctcttcctcctgctctcctttcctccccctcctctttctcctcctcctcctcttcttccccctcctctccctcctcctcttcttccccctcctctccctcctcctcttcttctccctcctcttcctcttcctcctcttccacgtgctctcctttcctccccctcctcttgctccccttcttccccgtcctcttcctcctcctcctcttcttctccctcctcttcctcctcctctttcttcctgacctctttctttctcctcctcctccttctacctccccttctcatccctcctcttcctcttctctagctgcacacttcactactgcacatcttataacttgcacccctttcttctgaggaagagaacatcttgcaaggcagggcgagcagcggcagggctggcttaggagcagtgcaagagtccctgtgctccagttccacactgctggcagggaaggcaaggggggacgggcctggatctgggggtgagggagaaagatggacccctgggtgaccactaaaccaaagatattcggaactttctatttaggatgtggacgtaattcctgttccgaggtagaggctgtgctgaagacaagcacagtggcctggtgcgccttggaaaccaacaactattcacgagccagtatgaccttcacatctttagaaattatgaaaacgtatgtgattggagggtttggaaaaccagttatcttatttaacattttaaaaattacctaacagttatttacaaacaggtctgtgcatcccaggtctgtcttcttttcaaggtctgggccttgtgctcgggttatgtttgtgggaaatgcttaataaatactgataatatgggaagagatgaaaactga

SEQ ID NO: 21589 - DNA, 1483 bp, Homo sapiens
  source 1..1483: mol_type = unassigned DNA
gcgtgtggaacctgacggaactgccacgatgctgccactttggactctttcactgctgctgggagcagtagcaggaaaagaagtttgctacgaaagactcggctgcttcagtgatgactccccatggtcaggaattacggaaagacccctccatatattgccttggtctccaaaagatgtcaacacccgcttcctcctatatactaatgagaacccaaacaactttcaagaagttgccgcagattcatcaagcatcagtggctccaatttcaaaacaaatagaaaaactcgctttattattcatggattcatagacaagggagaagaaaactggctggccaatgtgtgcaagaatctgttcaaggtggaaagtgtgaactgtatctgtgtggactggaaaggtggctcccgaactggatacacacaagcctcgcagaacatcaggatcgtgggagcagaagtggcatattttgttgaatttcttcagtcggcgttcggttactcaccttccaatgtgcatgtcattggccacagcctgggtgcccacgctgctggggaggctggaaggagaaccaatgggaccattggacgcatcacagggttggacccagcagaaccttgctttcagggcacacctgaattagtccgattggaccccagcgatgccaaatttgtggatgtaattcacacggatggtgcccccatagtccccaatttggggtttggaatgagccaagtcgtgggccacctagatttctttccaaatggaggagtggaaatgcctggatgtaaaaagaacattctctctcagattgtggacatagacggaatctgggaagggactcgagactttgcggcctgtaatcacttaagaagctacaaatattacactgatagcatcgtcaaccctgatggctttgctggattcccctgtgcctcttacaacgtcttcactgcaaacaagtgtttcccttgtccaagtggaggctgcccacagatgggtcactatgctgatagatatcctgggaaaacaaatgatgtgggccagaaattttatctagacactggtgatgccagtaattttgcacgttggaggtataaggtatctgtcacactgtctggaaaaaaggttacaggacacatactagtttctttgttcggaaataaaggaaactctaagcagtatgaaattttcaagggcactctcaaaccagatagtactcattccaatgaatttgactcagatgtggatgttggggacttgcagatggttaaatttatttggtataacaatgtgatcaacccaactttacctagagtgggagcatccaagattatagtggagacaaatgttggaaaacagttcaacttctgtagtccagaaaccgtcagggaggaagttctgctcaccctcacaccgtgttaggagactactgttatttgaccaatgaattgacttctaataaaatctagtggtgatgca

SEQ ID NO: 21590 - DNA, 457 bp, Homo sapiens
  source 1..457: mol_type = unassigned DNA
ggcaggtgctcgcttggtctagtgcccatttactctggactccggatggctgccgcacgcctctgcctctccctgctgctcctgtccacctgcgtggctctgttactacagccactgctgggtgcccagggagccccactggagccagtgtacccaggggacaatgccacaccagagcagatggcccagtatgcagctgatctccgtagatacatcaacatgctgaccaggcctaggtatgggaaaagacacaaagaggacacgctggccttctcggagtgggggtccccgcatgctgctgtccccagggagctcagcccgctggacttataatgccaccttctgtctcctacgactccatgagcagcgccagcccagctctcccctctgcacccttggctctggccaaagcttgctccctgctcccacacaggctcaataaagcaagtcaaagcca

SEQ ID NO: 21591 - DNA, 1956 bp, Homo sapiens
  source 1..1956: mol_type = unassigned DNA
gggcacaggagtgcggccgggggcggggccgagtgggccccggtacgaaccctccgggaagccgggcgcgctgcctgcccttggcccggggcgcagagcgtcacactggatctggggagcatcctacccccactgtggacctcagtctcctcacctgagacatgggcggccccatccgcaccctgtaagccgcaagccaaggagattcctggcccccatcctggattcacttaactacatctcctggtggaagggccctgggatctgcactttcaacatgcttctagaatgattctgatgtttactgaaggttgagaactgcaaccctgtgggattaataatgactagagaatctgagaggcgtcatccctcaagtgtatcacttagttcaagagtcctggaatcttttcacatccactatgaacacctctcacctcctggccttgctgctcccaaaatctccacaaggtgaaaacagaagcaaacccctgggcaccccatacaacttctctgaacattgccaggattccgtggacgtgatggtcttcatcgtcacttcctacagcattgagactgtcgtgggggtcctgggtaacctctgcctgatgtgtgtgactgtgaggcagaaggagaaagccaacgtgaccaacctgcttatcgccaacctggccttctctgacttcctcatgtgcctcctctgccagccgctgaccgccgtctacaccatcatggactactggatctttggagagaccctctgcaagatgtcggccttcatccagtgcatgtcggtgacggtctccatcctctcgctcgtcctcgtggccctggagaggcatcagctcatcatcaacccaacaggctggaagcccagcatctcacaggcctacctggggattgtgctcatctgggtcattgcctgtgtcctctccctgcccttcctggccaacagcatcctggagaatgtcttccacaagaaccactccaaggctctggagttcctggcggataaggtggtctgtaccgagtcctggccactggctcaccaccgcaccatctacaccaccttcctgctcctcttccagtactgcctcccactgggcttcatcctggtctgttatgcacgcatctaccggcgcctgcagaggcaggggcgcgtgtttcacaagggcacctacagcttgcgagctgggcacatgaagcaggtcaatgtggtgctggtggtgatggtggtggcctttgctgtgctctggctgcctctgcatgtgttcaacagcctggaagactggcaccatgaggccatccccatctgccacgggaacctcatcttcttagtgtgccacttgcttgccatggcctccacctgcgtcaacccattcatctatggctttctcaacaccaacttcaagaaggagatcaaggccctggtgctgacttgccagcagagcgcccccctggaggagtcggagcatctgcccctgtccacagtacatacggaagtctccaaagggtccctgaggctaagtggcaggtccaatcccatttaaccaggtctaggtcttctccctgccatgtcccttgccaggctcttccacttagctaagtgggcacactgcaagctggggtggcaccccagcattcctggctttctggggtccagataggctggcaagagctgtttttgcatccatttgcatcgtgaagactggcattttgatacttcagctgtttgttcctgggagaattctgagcacagattccagaggtcacagtaagccttgcagcttgagctgaaagatgccagagccggagatgtctgctggcagcaggcagggttcattctggtgacacagcaacagatgcctggcctgggaacccagggatttcacctccaccagtgagaccacggggccactgtggggtgagggaaggagcgcttggagtcagagctctaga

SEQ ID NO: 21592 - DNA, 1622 bp, Homo sapiens
  source 1..1622: mol_type = unassigned DNA
ttaataatgactagagaatctgagaggcgtcatccctcaagtgtatcacttagttcaagagtcctggaatcttttcacatccactatgaacacctctcacctcctggccttgctgctcccaaaatctccacaaggtgaaaacagaagcaaacccctgggcaccccatacaacttctctgaacattgccaggattccgtggacgtgatggtcttcatcgtcacttcctacagcattgagactgtcgtgggggtcctgggtaacctctgcctgatgtgtgtgactgtgaggcagaaggagaaagccaacgtgaccaacctgcttatcgccaacctggccttctctgacttcctcatgtgcctcctctgccagccgctgaccgccgtctacaccatcatggactactggatctttggagagaccctctgcaagatgtcggccttcatccagtgcatgtcggtgacggtctccatcctctcgctcgtcctcgtggccctggagaggcatcagctcatcatcaacccaacaggctggaagcccagcatctcacaggcctacctggggattgtgctcatctgggtcattgcctgtgtcctctccctgcccttcctggccaacagcatcctggagaatgtcttccacaagaaccactccaaggctctggagttcctggcggataaggtggtctgtaccgagtcctggccactggctcaccaccgcaccatctacaccaccttcctgctcctcttccagtactgcctcccactgggcttcatcctggtctgttatgcacgcatctaccggcgcctgcagaggcaggggcgcgtgtttcacaagggcacctacagcttgcgagctgggcacatgaagcaggtcaatgtggtgctggtggtgatggtggtggcctttgctgtgctctggctgcctctgcatgtgttcaacagcctggaagactggcaccatgaggccatccccatctgccacgggaacctcatcttcttagtgtgccacttgcttgccatggcctccacctgcgtcaacccattcatctatggctttctcaacaccaacttcaagaaggagatcaaggccctggtgctgacttgccagcagagcgcccccctggaggagtcggagcatctgcccctgtccacagtacatacggaagtctccaaagggtccctgaggctaagtggcaggtccaatcccatttaaccaggtctaggtcttctccctgccatgtcccttgccaggctcttccacttagctaagtgggcacactgcaagctggggtggcaccccagcattcctggctttctggggtccagataggctggcaagagctgtttttgcatccatttgcatcgtgaagactggcattttgatacttcagctgtttgttcctgggagaattctgagcacagattccagaggtcacagtaagccttgcagcttgagctgaaagatgccagagccggagatgtctgctggcagcaggcagggttcattctggtgacacagcaacagatgcctggcctgggaacccagggatttcacctccaccagtgagaccacggggccactgtggggtgagggaaggagcgcttggagtcagagctctaga

SEQ ID NO: 21593 - DNA, 3367 bp, Homo sapiens
  source 1..3367: mol_type = unassigned DNA
cctgacacctctgcaaataattgtcttcctcccgtattcctcctgaaacggttcgctcctttcgctgtctctcccagacccatctggttttcacatcgccatacaaagcccaacccgcccatctcctctctgcaagcccagagaacttgattccccatgttgaaactcgtcggtggcggtggcgggcaggactgggcatgctcagtggcggggaccagtctgggaggcgaggaagccgcgtttgaagtcgcgcggcctggggatcaggggaaggcgggcggcgggagccccggctgggggtgcgcggggatccccgattccgcgcccggggctggcgtgctccaggccggcgccgtggggccggcgcgcggggggcagggcgcagaggaggtgggggagtcggcaggaggaggggaggagcgccgggttcgccatccccaggcgccggctctgcggctgctgaatcggaagccgcagggaggatccggggaaataaagacgccggagaatgacctccagcgaggccgcctgagccggggcccgcgcacagccccgccagcccccggcatgggcgaccgcagcgggcagcaggagcgctcggtcccgcactctccaggggcccccgtgggcaccagcgccgccgctgtgaacgggctgctgcacaacggcttccatccgccgccagtccagccgccgcacgtctgcagccggggtccagtgggcggcagcgacgcggcgccccagcgcctcccgctcctgccggagctgcagccgcagccactgctccctcagcatgactccccggccaagaaatgccggctgcggaggaggatggactcggggagaaagaacaggccgccattcccatggtttggcatggacatcggtggaacgctggttaaattggtgtatttcgagccgaaggatattacagccgaagaggagcaagaggaagtggagaacctgaagagcatccggaagtatttgacttctaatactgcttatgggaaaactgggatccgagacgtccacctggaactgaaaaacctgaccatgtgtggacgcaaagggaacctgcacttcatccgctttcccagctgtgctatgcacaggttcattcagatgggcagcgagaagaacttctctagccttcacaccaccctctgtgccacaggaggcggggctttcaaattcgaagaggacttcagaatgattgctgacctgcagctgcataaactggatgaactggactgtctgattcagggcctgctttatgtcgactctgttggcttcaacggcaagccagaatgttactattttgaaaatcccacaaatcctgaattgtgtcaaaaaaagccgtactgccttgataacccataccctatgttgctggttaacatgggctcaggtgtcagcattctagccgtgtactccaaggacaactataaaagagttacagggaccagtcttggaggtggaacattcctaggcctatgttgcttgctgactggttgtgagacctttgaagaagctctggaaatggcagctaaaggcgacagcaccaatgttgataaactggtgaaggacatttacggaggagactatgaacgatttggccttcaaggatctgctgtagcatcaagctttggcaacatgatgagtaaagaaaagcgagattccatcagcaaggaagacctcgcccgggccacattggtcaccatcaccaacaacattggctccattgctcggatgtgcgcgttgaatgagaacatagacagagttgtgtttgttggaaattttctcagaatcaatatggtctccatgaagctgctggcatatgccatggatttttggtccaaaggacaactgaaagctctgtttttggaacatgagggttattttggagccgttggggcactgttggaactgttcaaaatgactgatgacaagtagagacgagcagtggaggaaacagcctcccaaaaggacagagaactaaaaaattgctgctggagaaggtgaaagtcgctttgggacggaagccaagccattatggcagatgaacctgctggatttgtaaataatttaaaatccttccagatgatcttttactcttaggttttgagctaatgattcaaaacgggggaatataaaaggttttttttctgtatactgtatttttttaaaaaaatggtgcagcgtggccaaacctaccaattgtatgcattaactttgaaaagttgtttgatgtttaagaaggacctgatatgtaagcgctggtcatttttcttctggggtttactgatcagtgtggtgattttaacttcatttagtaattactctaggagattttaccttgacttatatttttcatgacgtttcatgatttgctgttggtttcaaatgaaactacaaatctggcatgttttactgtgaacacttttgttatttgttttgtacccttttttgtcttgtttttctgttttagttgtcttctgaaaaaagagtcgttccctctgtttctgtcctcagatgatgtccctccccctacctgtaacctttctttgacataattgttcatatcaatgaaggtgctgaccagctcaatacaaagttaagcacaagatctaaagctcttgaaaatgcccgtgaagagaagactgaatgtgttaatgaatttaatgagtctggcaaaagttgcaaattatatgcaagtttgtcctatcgcttataaatgtagtgtttcattggatttattttatgctaggttatattaagttgaaatagtctgtgattaaatgtcctcatccatgcacagaatatgaatggcagcaaatctttgtgcaagaaatttgaaacttattgggaaaagcctcccagtagattaattgttcatatcaggagatttagggtaagtcatgggttgaggtgtcagatagtaatatctatttgttttgtacatgtatatatctaggaactttgtaacaacacatctttaataatgttaaaggttttttcatttttaatattttaaactaaaaactgtacttcaatctcagtttctaaaattaaaaataatttatactgatctatatattttttctttttgaaagatttcattaagactgatgggtaactttcaaatgagggtcatgtacaaatattgggatgcatgagatcccatgatcttgtgtattgagcttattgttgaaagggatttttgaaggacagaacaattactccatgatgaatcttcctttctctgccttctgagcaccgtctttaatttccatatcttcaagtcttgaagaagttgatgttaattgaagaattcacttgtctggttgaaataaagcctgtttctgtt

SEQ ID NO: 21594 - DNA, 2513 bp, Homo sapiens
  source 1..2513: mol_type = unassigned DNA
cacaatctaaagcttgtatatataatggtagtttgtaaagtgtaccttccccacaggacgctgtgggatgtaaatttgtaggtcgagtttacagctggtttttcttgactgaagctcattcaactggttacttctttgtgggtgtctttaatgaagcttataaatggcaaaaagcaaacattcccatggtttggcatggacatcggtggaacgctggttaaattggtgtatttcgagccgaaggatattacagccgaagaggagcaagaggaagtggagaacctgaagagcatccggaagtatttgacttctaatactgcttatgggaaaactgggatccgagacgtccacctggaactgaaaaacctgaccatgtgtggacgcaaagggaacctgcacttcatccgctttcccagctgtgctatgcacaggttcattcagatgggcagcgagaagaacttctctagccttcacaccaccctctgtgccacaggaggcggggctttcaaattcgaagaggacttcagaatgattgctgacctgcagctgcataaactggatgaactggactgtctgattcagggcctgctttatgtcgactctgttggcttcaacggcaagccagaatgttactattttgaaaatcccacaaatcctgaattgtgtcaaaaaaagccgtactgccttgataacccataccctatgttgctggttaacatgggctcaggtgtcagcattctagccgtgtactccaaggacaactataaaagagttacagggaccagctttggcaacatgatgagtaaagaaaagcgagattccatcagcaaggaagacctcgcccgggccacattggtcaccatcaccaacaacattggctccattgctcggatgtgcgcgttgaatgagaacatagacagagttgtgtttgttggaaattttctcagaatcaatatggtctccatgaagctgctggcatatgccatggatttttggtccaaaggacaactgaaagctctgtttttggaacatgagggttattttggagccgttggggcactgttggaactgttcaaaatgactgatgacaagtagagacgagcagtggaggaaacagcctcccaaaaggacagagaactaaaaaattgctgctggagaaggtgaaagtcgctttgggacggaagccaagccattatggcagatgaacctgctggatttgtaaataatttaaaatccttccagatgatcttttactcttaggttttgagctaatgattcaaaacgggggaatataaaaggttttttttctgtatactgtatttttttaaaaaaatggtgcagcgtggccaaacctaccaattgtatgcattaactttgaaaagttgtttgatgtttaagaaggacctgatatgtaagcgctggtcatttttcttctggggtttactgatcagtgtggtgattttaacttcatttagtaattactctaggagattttaccttgacttatatttttcatgacgtttcatgatttgctgttggtttcaaatgaaactacaaatctggcatgttttactgtgaacacttttgttatttgttttgtacccttttttgtcttgtttttctgttttagttgtcttctgaaaaaagagtcgttccctctgtttctgtcctcagatgatgtccctccccctacctgtaacctttctttgacataattgttcatatcaatgaaggtgctgaccagctcaatacaaagttaagcacaagatctaaagctcttgaaaatgcccgtgaagagaagactgaatgtgttaatgaatttaatgagtctggcaaaagttgcaaattatatgcaagtttgtcctatcgcttataaatgtagtgtttcattggatttattttatgctaggttatattaagttgaaatagtctgtgattaaatgtcctcatccatgcacagaatatgaatggcagcaaatctttgtgcaagaaatttgaaacttattgggaaaagcctcccagtagattaattgttcatatcaggagatttagggtaagtcatgggttgaggtgtcagatagtaatatctatttgttttgtacatgtatatatctaggaactttgtaacaacacatctttaataatgttaaaggttttttcatttttaatattttaaactaaaaactgtacttcaatctcagtttctaaaattaaaaataatttatactgatctatatattttttctttttgaaagatttcattaagactgatgggtaactttcaaatgagggtcatgtacaaatattgggatgcatgagatcccatgatcttgtgtattgagcttattgttgaaagggatttttgaaggacagaacaattactccatgatgaatcttcctttctctgccttctgagcaccgtctttaatttccatatcttcaagtcttgaagaagttgatgttaattgaagaattcacttgtctggttgaaataaagcctgtttctgttgtga

SEQ ID NO: 21595 - DNA, 2703 bp, Homo sapiens
  source 1..2703: mol_type = unassigned DNA
aagtgcattatttcacaatctaaagcttgtatatataatggtagtttgtaaagtgtaccttccccacaggacgctgtgggatgtaaatttgtaggtcgagtttacagctggtttttcttgactgaagctcattcaactggttacttctttgtgggtgtctttaatgaagcttataaatggcaaaaagcaaacattcccatggtttggcatggacatcggtggaacgctggttaaattggtgtatttcgagccgaaggatattacagccgaagaggagcaagaggaagtggagaacctgaagagcatccggaagtatttgacttctaatactgcttatgggaaaactgggatccgagacgtccacctggaactgaaaaacctgaccatgtgtggacgcaaagggaacctgcacttcatccgctttcccagctgtgctatgcacaggttcattcagatgggcagcgagaagaacttctctagccttcacaccaccctctgtgccacaggaggcggggctttcaaattcgaagaggacttcagaatgattgctgacctgcagctgcataaactggatgaactggactgtctgattcagggcctgctttatgtcgactctgttggcttcaacggcaagccagaatgttactattttgaaaatcccacaaatcctgaattgtgtcaaaaaaagccgtactgccttgataacccataccctatgttgctggttaacatgggctcaggtgtcagcattctagccgtgtactccaaggacaactataaaagagttacagggaccagtcttggaggtggaacattcctaggcctatgttgcttgctgactggttgtgagacctttgaagaagctctggaaatggcagctaaaggcgacagcaccaatgttgataaactggtgaaggacatttacggaggagactatgaacgatttggccttcaaggatctgctgtagcatcaagctttggcaacatgatgagtaaagaaaagcgagattccatcagcaaggaagacctcgcccgggccacattggtcaccatcaccaacaacattggctccattgctcggatgtgcgcgttgaatgagaacatagacagagttgtgtttgttggaaattttctcagaatcaatatggtctccatgaagctgctggcatatgccatggatttttggtccaaaggacaactgaaagctctgtttttggaacatgagggttattttggagccgttggggcactgttggaactgttcaaaatgactgatgacaagtagagacgagcagtggaggaaacagcctcccaaaaggacagagaactaaaaaattgctgctggagaaggtgaaagtcgctttgggacggaagccaagccattatggcagatgaacctgctggatttgtaaataatttaaaatccttccagatgatcttttactcttaggttttgagctaatgattcaaaacgggggaatataaaaggttttttttctgtatactgtatttttttaaaaaaatggtgcagcgtggccaaacctaccaattgtatgcattaactttgaaaagttgtttgatgtttaagaaggacctgatatgtaagcgctggtcatttttcttctggggtttactgatcagtgtggtgattttaacttcatttagtaattactctaggagattttaccttgacttatatttttcatgacgtttcatgatttgctgttggtttcaaatgaaactacaaatctggcatgttttactgtgaacacttttgttatttgttttgtacccttttttgtcttgtttttctgttttagttgtcttctgaaaaaagagtcgttccctctgtttctgtcctcagatgatgtccctccccctacctgtaacctttctttgacataattgttcatatcaatgaaggtgctgaccagctcaatacaaagttaagcacaagatctaaagctcttgaaaatgcccgtgaagagaagactgaatgtgttaatgaatttaatgagtctggcaaaagttgcaaattatatgcaagtttgtcctatcgcttataaatgtagtgtttcattggatttattttatgctaggttatattaagttgaaatagtctgtgattaaatgtcctcatccatgcacagaatatgaatggcagcaaatctttgtgcaagaaatttgaaacttattgggaaaagcctcccagtagattaattgttcatatcaggagatttagggtaagtcatgggttgaggtgtcagatagtaatatctatttgttttgtacatgtatatatctaggaactttgtaacaacacatctttaataatgttaaaggttttttcatttttaatattttaaactaaaaactgtacttcaatctcagtttctaaaattaaaaataatttatactgatctatatattttttctttttgaaagatttcattaagactgatgggtaactttcaaatgagggtcatgtacaaatattgggatgcatgagatcccatgatcttgtgtattgagcttattgttgaaagggatttttgaaggacagaacaattactccatgatgaatcttcctttctctgccttctgagcaccgtctttaatttccatatcttcaagtcttgaagaagttgatgttaattgaagaattcacttgtctggttgaaataaagcctgtttctgttgtga

SEQ ID NO: 21596 - DNA, 2800 bp, Homo sapiens
  source 1..2800: mol_type = unassigned DNA
gccgaagtgcattatttcacaatctaaagcttgtatatataatggtagtttgtaaagtgtaccttccccacaggacgctgtgggatgtaaatttgtaggtcgagtttacagctggtttttcttgactgaagctcattcaactggttacttctttgtgggtgtctttaatgaagcttataaatggcaaaaagcaaacatgctcttttgcctttctgccatgggatgatgcagcaagaaggccttcaccagatgcagtccctcgatcttggacttctcagcctccagaactcattcccatggtttggcatggacatcggtggaacgctggttaaattggtgtatttcgagccgaaggatattacagccgaagaggagcaagaggaagtggagaacctgaagagcatccggaagtatttgacttctaatactgcttatgggaaaactgggatccgagacgtccacctggaactgaaaaacctgaccatgtgtggacgcaaagggaacctgcacttcatccgctttcccagctgtgctatgcacaggttcattcagatgggcagcgagaagaacttctctagccttcacaccaccctctgtgccacaggaggcggggctttcaaattcgaagaggacttcagaatgattgctgacctgcagctgcataaactggatgaactggactgtctgattcagggcctgctttatgtcgactctgttggcttcaacggcaagccagaatgttactattttgaaaatcccacaaatcctgaattgtgtcaaaaaaagccgtactgccttgataacccataccctatgttgctggttaacatgggctcaggtgtcagcattctagccgtgtactccaaggacaactataaaagagttacagggaccagtcttggaggtggaacattcctaggcctatgttgcttgctgactggttgtgagacctttgaagaagctctggaaatggcagctaaaggcgacagcaccaatgttgataaactggtgaaggacatttacggaggagactatgaacgatttggccttcaaggatctgctgtagcatcaagctttggcaacatgatgagtaaagaaaagcgagattccatcagcaaggaagacctcgcccgggccacattggtcaccatcaccaacaacattggctccattgctcggatgtgcgcgttgaatgagaacatagacagagttgtgtttgttggaaattttctcagaatcaatatggtctccatgaagctgctggcatatgccatggatttttggtccaaaggacaactgaaagctctgtttttggaacatgagggttattttggagccgttggggcactgttggaactgttcaaaatgactgatgacaagtagagacgagcagtggaggaaacagcctcccaaaaggacagagaactaaaaaattgctgctggagaaggtgaaagtcgctttgggacggaagccaagccattatggcagatgaacctgctggatttgtaaataatttaaaatccttccagatgatcttttactcttaggttttgagctaatgattcaaaacgggggaatataaaaggttttttttctgtatactgtatttttttaaaaaaatggtgcagcgtggccaaacctaccaattgtatgcattaactttgaaaagttgtttgatgtttaagaaggacctgatatgtaagcgctggtcatttttcttctggggtttactgatcagtgtggtgattttaacttcatttagtaattactctaggagattttaccttgacttatatttttcatgacgtttcatgatttgctgttggtttcaaatgaaactacaaatctggcatgttttactgtgaacacttttgttatttgttttgtacccttttttgtcttgtttttctgttttagttgtcttctgaaaaaagagtcgttccctctgtttctgtcctcagatgatgtccctccccctacctgtaacctttctttgacataattgttcatatcaatgaaggtgctgaccagctcaatacaaagttaagcacaagatctaaagctcttgaaaatgcccgtgaagagaagactgaatgtgttaatgaatttaatgagtctggcaaaagttgcaaattatatgcaagtttgtcctatcgcttataaatgtagtgtttcattggatttattttatgctaggttatattaagttgaaatagtctgtgattaaatgtcctcatccatgcacagaatatgaatggcagcaaatctttgtgcaagaaatttgaaacttattgggaaaagcctcccagtagattaattgttcatatcaggagatttagggtaagtcatgggttgaggtgtcagatagtaatatctatttgttttgtacatgtatatatctaggaactttgtaacaacacatctttaataatgttaaaggttttttcatttttaatattttaaactaaaaactgtacttcaatctcagtttctaaaattaaaaataatttatactgatctatatattttttctttttgaaagatttcattaagactgatgggtaactttcaaatgagggtcatgtacaaatattgggatgcatgagatcccatgatcttgtgtattgagcttattgttgaaagggatttttgaaggacagaacaattactccatgatgaatcttcctttctctgccttctgagcaccgtctttaatttccatatcttcaagtcttgaagaagttgatgttaattgaagaattcacttgtctggttgaaataaagcctgtttctgttgtg

SEQ ID NO: 21597 - DNA, 2780 bp, Homo sapiens
  source 1..2780: mol_type = unassigned DNA
gaagtcgcgcggcctggggatcaggggaaggcgggcggcgggagccccggctgggggtgcgcggggggcagggcgcagaggaggtgggggagtcggcaggaggaggggaggagcgccgggttcgccatccccaggcgccggctctgcggctgctgaatcggaagccgcagggaggatccggggaaataaagacgccggagaatgacctccagcgaggccgcctgagccggggcccgcgcacagccccgccagcccccggcatgggcgaccgcagcgggcagcaggagcgctcggtcccgcactctccaggggcccccgtgggcaccagcgccgccgctgtgaacgggctgctgcacaacggcttccatccgccgccagtccagccgccgcacgtctgcagccggggtccagtgggcggcagcgacgcggcgccccagcgcctcccgctcctgccggagctgcagccgcagccactgctccctcagcatgactccccggccaagaaatgccggctgcggaggaggatggactcggggagaaagaacaggccgccattcccatggtttggcatggacatcggtggaacgctggttaaattggtgtatttcgagccgaaggatattacagccgaagaggagcaagaggaagtggagaacctgaagagcatccggaagtatttgacttctaatactgcttatgggaaaactgggatccgagacgtccacctggaactgaaaaacctgaccatgtgtggacgcaaagggaacctgcacttcatccgctttcccagctgtgctatgcacaggttcattcagatgggcagcgagaagaacttctctagccttcacaccaccctctgtgccacaggaggcggggctttcaaattcgaagaggacttcagaatgattgctgacctgcagctgcataaactggatgaactggactgtctgattcagggcctgctttatgtcgactctgttggcttcaacggcaagccagaatgttactattttgaaaatcccacaaatcctgaattgtgtcaaaaaaagccgtactgccttgataacccataccctatgttgctggttaacatgggctcaggtgtcagcattctagccgtgtactccaaggacaactataaaagagttacagggaccagtcttggaggtggaacattcctaggcctatgttgcttgctgactggttgtgagacctttgaagaagctctggaaatggcagctaaaggcgacagcaccaatgttgataaactggtgaaggacatttacggaggagactatgaacgatttggccttcaaggatctgctgtagcatcaagctttggcaacatgatgagtaaagaaaagcgagattccatcagcaaggaagacctcgcccgggccacattggtcaccatcaccaacaacattggctccattgctcggatgtgcgcgttgaatgagaacatagacagagttgtgtttgttggaaattttctcagaatcaatatggtctccatgaagctgctggcatatgccatggatttttggtccaaaggacaactgaaagctctgtttttggaacatgagggttattttggagccgttggggcactgttggaactgttcaaaatgactgatgacaagtagagacgagcagtggaggaaacagcctcccaaaaggacagagaactaaaaaattgctgctggagaaggtgaaagtcgctttgggacggaagccaagccattatggcagatgaacctgctggatttgtaaataatttaaaatccttccagatgatcttttactcttaggttttgagctaatgattcaaaacgggggaatataaaaggttttttttctgtatactgtatttttttaaaaaaatggtgcagcgtggccaaacctaccaattgtatgcattaactttgaaaagttgtttgatgtttaagaaggacctgatatgtaagcgctggtcatttttcttctggggtttactgatcagtgtggtgattttaacttcatttagtaattactctaggagattttaccttgacttatatttttcatgacgtttcatgatttgctgttggtttcaaatgaaactacaaatctggcatgttttactgtgaacacttttgttatttgttttgtacccttttttgtcttgtttttctgttttagttgtcttctgaaaaaagagtcgttccctctgtttctgtcctcagatgatgtccctccccctacctgtaacctttctttgacataattgttcatatcaatgaaggtgctgaccagctcaatacaaagttaagcacaagatctaaagctcttgaaaatgcccgtgaagagaagactgaatgtgttaatgaatttaatgagtctggcaaaagttgcaaattatatgcaagtttgtcctatcgcttataaatgtagtgtttcattggatttattttatgctaggttatattaagttgaaatagtctgtgattaaatgtcctcatccatgcacagaatatgaatggcagcaaatctttgtgcaagaaatttgaaacttattgggaaaagcctcccagtagattaattgttcatatcaggagatttagggtaagtcatgggttgaggtgtcagatagtaatatctatttgttttgtacatgtatatatctaggaactttgtaacaacacatctttaataatgttaaaggttttttcatttttaatattttaaactaaaaactgtacttcaatctcagtttctaaaattaaaaataatttatactg

SEQ ID NO: 21598 - DNA, 2280 bp, Homo sapiens
  source 1..2280: mol_type = unassigned DNA
gggtggatgaggaggctcgggcccttccacccacgcgtccattgggcggcgccgccatcactctcttctgggctacaccgccttctcttcctccgcggaacccggatcccctcctccaccaccctctccccgccccgtcacgatagcctctcattggacggaggcacggtcaatcctcctcgagttagggagccgactggacgcgaggcctttgggccgtccccagcctcgtcggattggcttcctgcgcgttggcgcaacggaagaggcggccggccgagggcgcgcctctgctctggctggactgccgcggaggaggcgagaaggaatccgacgctggggggcttgctcgggcggcagcgactgctgctgcggatgggagggggccggctcggcgcgcccatggagcgccacggcagggcttccgccacctccgtctcgtcggctggggagcaggcggccggggaccccgaagggcggcggcaggagccactgcggcgccgggcgagcagcgcgtcggtgcccgcggtcggggcctcggctgagggcacgaggcgggatcgactgggctcttacagcggccccacctcggtctcccgccagcgcgtcgaaagcctgaggaaaaagcggccgctttttccatggtttggactggatatcggtggaactctggtcaagctggtatattttgaacccaaagacatcactgctgaagaagaagaggaagaagtggaaagtcttaaaagcattcggaagtacctgacctccaatgtggcttatgggtctacaggcattcgggacgtgcacctcgagctgaaggacctgactctgtgtggacgcaaaggcaatctgcactttatacgctttcccactcatgacatgcctgcttttattcaaatgggcagagataaaaacttctcgagtctccacactgtcttttgtgccactggaggtggagcgtacaaatttgagcaggattttctcacaataggtgatcttcagctttgcaaactggatgaactagattgcttgatcaaaggaattttatacattgactcagtcggattcaatggacggtcacagtgctattactttgaaaaccctgctgattctgaaaagtgtcagaagttaccatttgatttgaaaaatccgtatcctctgcttctggtgaacattggctcaggggttagcatcttagcagtatattccaaagataattacaaacgggtcacaggtactagtcttggaggaggaactttttttggtctctgctgtcttcttactggctgtaccacttttgaagaagctcttgaaatggcatctcgtggagatagcaccaaagtggataaactagtacgagatatttatggaggggactatgagaggtttggactgccaggctgggctgtggcttcaagctttggaaacatgatgagcaaggagaagcgagaggctgtcagtaaagaggacctggccagagcgactttgatcaccatcaccaacaacattggctcaatagcaagaatgtgtgcccttaatgaaaacattaaccaggtggtatttgttggaaatttcttgagaattaatacgatcgccatgcggcttttggcatatgctttggattattggtccaaggggcagttgaaagcacttttttcggaacacgagggttattttggagctgttggagcactccttgagctgttgaagatcccgtgatcattacctggggaggggttcctgaaaccttccacaatgggatctgtggactttcatttttttaagagacttactcaatttcatgactgtactacctgaaacaaagtgagaaaggacaggtgtatttttctaagtcatcaagataaatccttaagaattcagtctaaattagcaaccaggaaggaaaaatatattaaaaacaacaaaaaagtggcacatgtccaggcagtgtgaggatttgctgtatataagttgcctgctttgtatttttgaaatctctgcatcactcattggaagtgcttctgaagagagctgctctgtgttcagttgactggttttgtgtcctgtttgaacttgctgaatgtaaggcaggctactatgcgttataatctaatcacaatttgtcaatatggtcttggcaatcatctgtgcattactctggtttgcattaagcctgtgtgtgaacttactgtaaaacatgttttatttcaaggttctgcaaaattaattgggcaggttaattgtgtacctgaaacttaacaagcagtttttggaagggca

SEQ ID NO: 21599 - DNA, 1567 bp, Homo sapiens
  source 1..1567: mol_type = unassigned DNA
agcggccgcgtaaatccggctggaggcctcgggtgctccgaaagcggtaccttcgggggcccccccgcacccattgtttttccatggtttggactggatatcggtggaactctggtcaagctggtatattttgaacccaaagacatcactgctgaagaagaagaggaagaagtggaaagtcttaaaagcattcggaagtacctgacctccaatgtggcttatgggtctacaggcattcgggacgtgcacctcgagctgaaggacctgactctgtgtggacgcaaaggcaatctgcactttatacgctttcccactcatgacatgcctgcttttattcaaatgggcagagataaaaacttctcgagtctccacactgtcttttgtgccactggaggtggagcgtacaaatttgagcaggattttctcacaataggtgatcttcagctttgcaaactggatgaactagattgcttgatcaaaggaattttatacattgactcagtcggattcaatggacggtcacagtgctattactttgaaaaccctgctgattctgaaaagtgtcagaagttaccatttgatttgaaaaatccgtatcctctgcttctggtgaacattggctcaggggttagcatcttagcagtatattccaaagataattacaaacgggtcacaggtactagtcttggaggaggaactttttttggtctctgctgtcttcttactggctgtaccacttttgaagaagctcttgaaatggcatctcgtggagatagcaccaaagtggataaactagtacgagatatttatggaggggactatgagaggtttggactgccaggctgggctgtggcttcaagctttggaaacatgatgagcaaggagaagcgagaggctgtcagtaaagaggacctggccagagcgactttgatcaccatcaccaacaacattggctcaatagcaagaatgtgtgcccttaatgaaaacattaaccaggtggtatttgttggaaatttcttgagaattaatacgatcgccatgcggcttttggcatatgctttggattattggtccaaggggcagttgaaagcacttttttcggaacacgagggttattttggagctgttggagcactccttgagctgttgaagatcccgtgatcattacctggggaggggttcctgaaaccttccacaatgggatctgtggactttcatttttttaagagacttactcaatttcatgactgtactacctgaaacaaagtgagaaaggacaggtgtatttttctaagtcatcaagataaatccttaagaattcagtctaaattagcaaccaggaaggaaaaatatattaaaaacaacaaaaaagtggcacatgtccaggcagtgtgaggatttgctgtatataagttgcctgctttgtatttttgaaatctctgcatcactcattggaagtgcttctgaagagagctgctctgtgttcagttgactggttttgtgtcctgtttgaacttgctgaatgtaaggcaggctactatgcgttataatctaatcacaatttgtc

SEQ ID NO: 21600 - DNA, 4815 bp, Homo sapiens
  source 1..4815: mol_type = unassigned DNA
atgctgggggaggggctggcggcctcgacggcagctgcggaactaggccgagggacaaaggctaagtttttccatggtttggactggatatcggtggaactctggtcaagctggtatattttgaacccaaagacatcactgctgaagaagaagaggaagaagtggaaagtcttaaaagcattcggaagtacctgacctccaatgtggcttatgggtctacaggcattcgggacgtgcacctcgagctgaaggacctgactctgtgtggacgcaaaggcaatctgcactttatacgctttcccactcatgacatgcctgcttttattcaaatgggcagagataaaaacttctcgagtctccacactgtcttttgtgccactggaggtggagcgtacaaatttgagcaggattttctcacaataggtgatcttcagctttgcaaactggatgaactagattgcttgatcaaaggaattttatacattgactcagtcggattcaatggacggtcacagtgctattactttgaaaaccctgctgattctgaaaagtgtcagaagttaccatttgatttgaaaaatccgtatcctctgcttctggtgaacattggctcaggggttagcatcttagcagtatattccaaagataattacaaacgggtcacaggtactagtcttggaggaggaactttttttggtctctgctgtcttcttactggctgtaccacttttgaagaagctcttgaaatggcatctcgtggagatagcaccaaagtggataaactagtacgagatatttatggaggggactatgagaggtttggactgccaggctgggctgtggcttcaagctttggaaacatgatgagcaaggagaagcgagaggctgtcagtaaagaggacctggccagagcgactttgatcaccatcaccaacaacattggctcaatagcaagaatgtgtgcccttaatgaaaacattaaccaggtggtatttgttggaaatttcttgagaattaatacgatcgccatgcggcttttggcatatgctttggattattggtccaaggggcagttgaaagcacttttttcggaacacgagggttattttggagctgttggagcactccttgagctgttgaagatcccgtgatcattacctggggaggggttcctgaaaccttccacaatgggatctgtggactttcatttttttaagagacttactcaatttcatgactgtactacctgaaacaaagtgagaaaggacaggtgtatttttctaagtcatcaagataaatccttaagaattcagtctaaattagcaaccaggaaggaaaaatatattaaaaacaacaaaaaagtggcacatgtccaggcagtgtgaggatttgctgtatataagttgcctgctttgtatttttgaaatctctgcatcactcattggaagtgcttctgaagagagctgctctgtgttcagttgactggttttgtgtcctgtttgaacttgctgaatgtaaggcaggctactatgcgttataatctaatcacaatttgtcaatatggtcttggcaatcatctgtgcattactctggtttgcattaagcctgtgtgtgaacttactgtaaaacatgttttatttcaaggttctgcaaaattaattgggcaggttaattgtgtacctgaaacttaacaagcagtttttggaagggcagttccacgttactttacactaaatcctgggaatgaatgtctggagagacagggcttcttttcttggcagaatttccttgggtagtgggcggactgttctgatgcaagtgggtacactggcagaagcagcacaatctggaggactaacatgagtcagcagggccactagaattgacaccccctcaggggatcagggagaatctggtttttctttcaggctaagtagaaaaggaagaactgaagtgtctgtcaaagaactcatggggagtggggggtccttcagggcactgtggcacttgggaggtgagtctcagaagactgcctgaggagagtgccaggctgcaggtgctcttggtaggggctgaagcttttctttctgctttgcagaataatttcaaaagcctttcccaaggagagaatgcaccttttatatctgaggtcttaagtggtgcccatattgctgttgaaggcaaggatgggcctgtacaaagcagccttggaccaggagggaaaaccccaaggctctgcagcctccctgctcccctccgtttaaggctgtggtcagggagggatgggcagggtgccagccgcatggaggcagcagagacacccgtgttccagctggggcaaggggaactgatatgtgggctgtgggctgttccactaggcgtggccacctctgcacatgggccttggcacttaggaaatatgggtgctgctgcattgggaccttgtgtgggtgcagagcaggatggctgctgcgtggagggtaattttgtcccctggagagtgattggtgaccctcttccctgctgctgctgtttgcaggctcctggcctatactacctctgacgccctgatcctgagttcctctgccctcctctgctgccagcagcgctgttggtggcctcaccctcctccagtacccaggcaccaaagatggcaccaccatcctcctgcttgtaccacagggtgctgctccctgggccaactcctgtgaacttgctcacttcccatggagaccgaggccagggcctgcccctctgaggcccctgttttgtggtcctgctgcctctgctgtgctgcgttcaggaggttgtccactgctcgacgtgggtcaccatgcagcccttgctgttcccacaatttaacagaaaaggaaactgaacggatgagtaaggctgcccagggtcactcagctggaaaagagtagagctggactcaaacccgggactgtctgtctctggtgcctgagttgggaagacgctgttgatgtccccttctgcctcgctttgagcttcctcctccgtgggccctccccctactctagagaaactagtccattccctcatgttccaccttgtgctcagtaaaccctgtcactccacagcagggtttttgagacagtctcgctgtgtcacccaggtggagtgcagtggggcgatctcagctcactgcaacctctgccttccaggctcaagcaattctcctgccttagcctcctgcgtagctgagactacaggcatgtgccaccatggctggctaatttttatatttttagtagagatggggtttcaccatgatggccaggctggtctcgaactccagaccccaggtgatccgcctgccttggcctcccaaagtgctgggaatacaggtgtgagcccctgcgcccggctcacagcagggttcttgataggccaccagtgaatcccatgccaccgaatctggcattcatttcacagcctcatctcagttctcactcagcagagccctcttgcctgtcctgccacccaggctactaatgttctggttcattctctgctgacagttagctgtggctgtcctcagcctcagtcctgggtctccccaagcagtcattagcatcaccttgactgatttccagggaacacttcaaccaccccttacctctgagctccagccccgagacactgccttctctctgcatttgttgatctctgtgcagcagtgcccacatcctcatcccagcttactgccgtctcaccaccttcaggttgtgaggtgcccataaactctgctgttaccattgccacttccctgtcttagcagctgtccctttcagtctgccctccactagtggccatgaagggggctgtgaccgtggtccaggtgagaaaggaaggcctgaactaagatgggaggtgggtggccagaatggagaggggagaagtggatggccagaatggagagatgcttagagggctgtgttgggaagtggtgactggatacaggggagggaggagagatacaagagggcacctgggctcatttgtggactacgtgattttgagactccaaataagcactgggtatttgggttggagatacagagctgagaatgatatgcatgtaggtgggcaaagcaagggggatttcatgagttctaaggtagggtgagaaaaataaccgagagttgagcagtgacggaggaagctgcaaagaaaacgactgctcagggagaggctggccaggggcctgtggctcaggggactgagaagaggagctctctaggcatctgaattgaggttgcccacaattggttgcaagatcgtggctggccttgatggaagctgggaagccactcggtcctagtgaggggtggtgaggagagcagcaacggccacacaggaaggctttggacgttttttctcctgacactagttatttccaggcctgggatatagctaggggcttggggtgggggcaactctttgcagggtggtgtggcctgtggaggaaacaggctcagttccactactttggccaggtgcaatggctcatgcctgtaatcccagcactttggaaggccaaggcgggtggatcacctgaggtcaggagttcaagaccagcctggacaacatggtgaaaccccgtctctactgaaaatacaaaaataattagccgggaatggtggtgcgtgcctgtaatcccaggtactcgagaggctgaggcagacagttgcttgaacctgggaggcagaggttgctgcagtgagccgagattgctgcactgcactccagcctgggtgacagcaagactgtctcaaaaaaaaaaaaaaaaaa

SEQ ID NO: 21601 - DNA, 10506 bp, Homo sapiens
  source 1..10506: mol_type = unassigned DNA
gcggcggcggcggcggtggcggcggctccggggaccggggccttttgtttggagcggctgcgggggggccccggagcggcgaggccggcggccttccccagcttgctcggtcccggccacccctcgcgggggtggggggccgccccctgggccgggcatctcctcaggcgccgccgccccgccctaggccggccccgcccggcctgaggggaggaaccggccgggcctcgccgcgcggcccagccacctccggagtcgccgcctctgctctcagtgccccggatcggaggccgtccatcgcccctcgggccgacgccatgaagatcaaagatgccaagaaaccctctttcccatggtttggcatggacattgggggaactctagtaaagctctcgtactttgaacctattgatatcacagcagaggaagagcaagaagaagttgagagtttaaaaagtattcggaaatatttgacttctaacgtggcatatggatccaccggcattcgggatgtacaccttgaactgaaagatttaacactttttggccgaagagggaacttgcactttatcaggtttccaacccaggacctgcctacttttatccaaatgggaagagataaaaacttctcaacattgcagacggtgctatgtgctacaggaggtggtgcttacaagtttgaaaaagattttcgcacaattggaaacctccacctgcacaaactggatgaacttgactgccttgtaaagggcttgctgtatatagactctgtcagtttcaatggacaagccgagtgctattattttgctaatgcctcagaacctgagcgatgccaaaagatgccttttaacctggatgatccctatccactgcttgtagtgaacattggctcaggagtcagtattttagcagtccattccaaagacaactataaacgagtgactgggacaagccttggagggggtacctttctgggtttatgcagtttattgactggctgtgaaagttttgaagaggctcttgaaatggcatccaaaggtgatagcacacaagctgacaagctggtccgtgatatttatggaggagattatgaaagatttggtttgccaggttgggctgtagcatctagttttgggaatatgatttataaggagaagcgagaatctgttagtaaagaagatctggcaagagctactttagttactatcaccaataacattggttctgtggcacgaatgtgtgctgttaatgagaaaataaacagagttgtctttgttggaaactttttacgtgtcaataccctctcaatgaaacttttggcatatgcactggattactggtcaaaaggtcaactaaaagcattgtttctagaacatgagggttactttggagcagttggtgcacttcttgggctgccaaatttcagctaaagcatcaggtctctctctctgctaataaatgtcatccaagaggaactaaaaccagaggcattattactgcattgtttgtcactgggaaccaaaggataaaagagtagcataagctgctgaatgttgccatattaaaggagagaacttggtaacgtgaagtatttctcattgaaatgctttcccttttgtatatagccagtgttaaatccttaaatgcaatacagcctctgattattgagcttcctcttaaaaagatttttttattttatgtagccaacattgcagtactgtatgctcaaacacaaatcttaaagtatcggaactgtttagcttatgaaaataatcgactctgaatatttgttacaagtctgttttatgtgttttgattactagtgagcagaaaataacataccctgtattcaaaattactgaaatggcaatcaaagatgatcatttttatgtgattttagaaatgttaaggcaatactactaattattgtaggtttttttaacgtatcacccaaagcatgtatgtgatctttccccattagtatctttttctcaaatgccataattaactgaaatactattattaaattttcatgagaattctaaaatgaatcctgggaaatgcacgtttggtgatgttgcactttctgtattttacaggaattagtcaatacatgttgaaatgtttaacattttaagattggaggcttaattactgggagtctgtctaatgaagtcctgggactattgtaatggaatatgatttgagttcactgtgctctttttgtttgtttgttttggtcatatatacattcagaacttttattttaaaacaaccacaataacattaataatagaaaattcatctgtaaatattcacagtctagtcactgaaaaatgggaaaacctctaccatgccttattattaccctttgctgtttgaggagccagaaatagaggtgcagttagaggacggtcactttttccaacaaaacccactccatagccatgtggatttttatccaaaggctcaacaaccagagggaatggtgagacctgataactaaaatactgttattggcaagggtttgaaatgtgtaagaacctaggagggaaaggaagattgagcaacataggaaaaggggaagagaggctgagtgtcaccaaggtccaaactccatttataaaaatactgcaaaaccaggagttgatggtagaaatgcatatgatccatggcaggagtaaatctctccacctcctctaactctctgaaaactctagagttggagcaagtcttccatttgcttcttatccccttaaaagaatgccttccacttcccaacagcccccatcaagggaccccaagaggccaccatgctcttatctcgcactttctttcctattccccttgcctgaatctggagtggggttgagccctctgccttcaaccttaagatttaggaagttctttccccaactgtctaacttggaaaggtagatgagtctgaattttgaagtaacgaatgcaaattccactcagcagaggcaatgttatttatgtacatagggatagtggaatgagttttaatagattctgtccaaaaggggtttgttcctcttatttcctctatgtaggaagttgtgtcttaggcaactttatcagtatcaatggaaaaatgataggcactacaatgaaatggcaggatgccaatatgagatatttcaggaataataagaaatacagtttgtttgtataaaataaactatctcaagaaagttttcaacgacagtgatagtgttcatttgtaagagagagttctagaacttcgatgtccagtgcagtagccactacccatatgtagctgttgagcatttgaaatatggttagtccaaattgagatgtgctctaaaggacaataaaaggttaaatatctcctaattttttgtattgattacatgttgaaatgttaacattggaaatattgggttaaagaaaaatacacaattaaaatgaatcttggccaggcgcagtggctcacgcctctaatcccagcactttgagaggccagggtgggcaggtcacctgaggtcaggagttcgagaccagcctggccagtgtggcaaaaccctgcctactaaaaatacaaaaattagccaggcatggtggtgcgcacctgtagtcccagctacttgggaggctgaggcaggagaattgcttgaacccaggaggaggaggctgcagtgagctgagattgtgccactgcactccagcctgggcgacagagtgagactctgtctcaaaaaaaagaatcatctgtttccaattatttttaaatgtgcttactagaaaagataaaatcacacatggtttacattttatttctattaagacagcaccgttaagaacatagagctttgaggaattgtggtattagaaccaaatctatttaccacagtgagcttacagggagttactcgagatcttaataaaaaattataatctttggcagccttcattatgattttgtgttcttattattccagtacctctagattacatatgggaaaagctaaagagccacagtggtgagatggttgctcactctagcaggtaatttcagtttgaaaggataaaatatatgaatcatagttcacattaaccaaagtacagtgatgaaataacttagactctgaccattccattttttcttaaagattgccctaaatctatagatgctaatacagtatttgccacaggtataaaacttgtagttactgtcattcaattaagattcttatctgtacagatatacaaatcagaaacttttaaaataaattgaactaatggaattttggctccaatatttagtcactacaatggaaatattaaagcaaggaacatgaagtcattgtagggttttaaaatggctactgactgacatgaattcagagtttcaaacagtctaaattctaaaaacttaactttacacgcttttcctcctaaataaccactctaataattcatacattcatatcttcaggtaaagaaaactgaattttaaacaattgaggctgggtgcagtggctcatgcctgtaatcgaatataaggacttgagtataaaatttgaaaactacatggggaaatgtctttatcatgcatctcttgatagtctactgaaaactattaagtaaacctgcggtctgtaaacaaaaaaacccatagtgatacttaccttgtgtaatgtaaacaattttttaagctctttaaagtacatctagatttactggtaatgtatagaagtcaattttatccccaagcatttctacttcctaaaccattagcaagagtctcaaaacaacttcactaaactattggacctccagtgttaacttgccaacataaaaatctgaaaaactttgtaatcactatcaaaaatacaaaagagagaataaattcccaggtaaaaggctttacaaattttggaactattatgcttttgtttactaaacactgatccttttagtaattctgcagtattgcctcagactcccacaaagtttcaaaatagctcatctattagattcctgtaacatttatttgggataaacgtggttttgttgccgttgttcataatagaataaaatatttagctttgatggttcagatgtaatacaaagaaataactaagtttgggcctgagataaatgtggtaaagcaagaatgcagagatgctgtaatgatgagtgagttttatagcattactgaggacctgaaaacttgctgccaaggacactttgaaggttttgttggctggaagaagtgtctctggaatcccactcctagctcttcttgaatatttgaaaagaattagataagggccatggggacccaggtcaccccacctcttcttttcagtttggctacaacattggagtcatcagtgctcctgagacagtcatacaggactttctcagttacactttgaaagagaggtcagaagactctccctctgaggttttgctcatgtccccctggcccttgtctgtggccatcttccccaatggtgatatgattggctcctttctgttgcactctttgtcaaccactttggcaggtgcagttcaatgcttatcataatttgttggctattactggttgccttatgggattctgcagacaagctgagttggttgaaatgctgatcctgggccactagattactggcttgtaatgcggactctgcacaagttttgtgcccatgtacattggagagatctcgcctactcccctttggggtacctttagtgctctcaaccagctggacgtcgttggtattctggagatccagatctttggtctggagttcatcttggggtctgaagagctatgcccagtgatactgggctttaccatccttccagctgtcctataaagtgtagcccttccattttgccctggaagtcgtaagtttttgctcattaacagaaaggaagagtactaatgagatccttcagcaattgtaggggactcaggatgtgtcccaggacatctaggagataagagtgctaggatgatacaagaaaagcaagtcactacactggcgctctttagagtacccagctaccaacaacccactgtcatttccatcatgctccagctctctcagtagctctctggaatcaatgttgtcttctattactcaatgagaatcttcaaggatgcaggtgttgagaagccaatctatagattagtgcaggagtggttaatattatcttcttgactgtagtctctctgtttgtggttgaaagggcaggaaggactttacatatgataggtcttgaggcatggcgttttgttctgtcctcatgattgtttctttgttattaaaggatgagtatggtgggatgagctttgtctgtagtggggctatcttggtctttgtggccttctctgaagttggaccagactccgttccctggaatactgtggccacactcttcagtttgcaatagcagtggctggttgctccaactggacctccaactttctagttggattgctcttcctgaacaattattatctagtttaagtgtgttgttgctttagggtcatggcatgcttatgtatttctgttaccatctgaccatggtactatgccaagttctcttaggggacctgaatctttccagtagaccacatttgagagagtatgagtcaactgggcatagttcccaacaacccaaaatacatacgtacttcactgaagcagatctcatgattccattgacttcatttctaaaattggactttgagcagccaatttctaaggattaaaaagaaactttaatgcattgtagacctctgtacacagaaaaatctttgtaacttttgggcttaattttcattcttaaaaaatctggtaactttttcaaatgcaaccactgtcagtttgctgtgaggctaggcaaacaacacaaggtatagaatttcccatcaccaccaccctgaccccgcgagaagattgccttttaattagagacttgtagaactagtgccttttaagttctacactcatcttttccaaagactattagtaaacttgccatgtaatttgacatggcagttccttgctcagctactctaaataaagttggaaattaggtggtctcttagtttgggtaaagtcagtactattgccagtaatatacatggtaattgaaagcccttaaagtggttcagattatttgccaaatattagactctataaaaatttctgaggttttttttcttttacctttgagtgtacatgtgattgctataatgtaaataccagtcccttaaagactgtttctataagcagaatgatgcagcacaaagtggaaaggttttcctcttattccagcagtattcttgccttcaaagagtagtccatcttgccttgatttttaaggttgttttcttggatggaaagcttaactggatagtaatttccatatgttctttataaccactctgtatattataagcaaagttttttcatattgtatctttttctgttgagcactttatgcattttagtctattgcatttgagaatgtagtttagaaattcactgtttaaagccatgtgaaaactgatagaggataatgaaaatgagtgtacattattttgaatttaacttaactgttttgtggtgggtgtgaacaaaacattagaaatatattatctttttgtgataatactctctgacctcacttaaagtgatctgccatgaggtatccatgatcaagtttatgtttattctaatacctaaggaattcagccaactttgtttctatcatcagataatctcagaaaatagtgtgttttatctatattactgcctcttttcaatatttaagagaataattgtcttctggtttctactgagcctagtaataatcactaaagacctaaaaaaggaattccttctgttaagagtatttggatagcccattcacgataatggtggtgtgaaaatcaatcatcccagcttttctgacatatctaaattttgaataattaatttccacttccaaaaaattcaaatgttttctcaaagcagtcactacttatttgcattattcctgcatattcagtgaatgtgaggtcatatttggtattgtattagaagtagtgttggtcactggtcttgcctctttgaacattatttttatttgtaaaatgagggagttggtttgttatgatgggaaatgagtcagttttcagggtcctgagaaaattgcttcattcatggctgtgtttgagataactaaagtaaattttttttcaggtatttggtgtcatgttttggagttaatatttagtgcttatataattttaagttattacataatttttattggtatatatttgataggtactaggtattggattctcaccaaaccagtagaatggtattctctcttaatatgtgattgcctgtaatggccaggtagatataccttaaagtaatatgaaaggttttatatgtatattaaaatgtttgtacttttaaatctgtaaaggttatctggaatttttactgtgttaacttcagaattatatgggcattatgactttttcattgtacaaaaaattattcataaatgttagaatacagatgttccttgacttacaatagggttatgttccagtagacccattgtaaattgaaaataccgtaagttgaaaatacatttaatacgcctaacctactgaacatcccagcttagcctagcctatcttaaatgtgttctgaacacttaacgttggcctttagctgggcaaaatcatctaatacaaaacctattttataatgaagtgtttaatatctcaaataagagtattgtaccacatatcgttatcccaggataatatcagagtacaaaatttgaagtacagtttttaactgaatgtgtattgcttttgccccattataaagttgaaaaaccataagtcaaaccattgttaagtcggactgtttgtgttacatatatttgggattttttagtggccctttttaaaaagctgtttcttatttctgatcattgtgagtggggatagatgtgggaagaaccatgtctctactaaaaatacaaaaaatagccaggcttgttggcacacacctatagtcccagctactcgggagaccgaggcaggagaatcacttgaaccgggaggcagagggcagatcatgccactgtattccagcctgggcaacagagtaagactctgtctcaaaaatgaatgaatgaatgaatgaacgaatgaatgtactatgagctgatactgggatttcaggtaccgcagtttgtgctgaatgatatgtttggggtaaatcagtttttttcttatagaatttcggcgtttttgctgcaactgccactaattttgcatttaaaagaacaaaagaggaatgtatttttcaaaggagtgaatgaggttaaaatcaagattttgaatggtataaatatgcaactaattcagttgtaggatattattaaattttttattgctaaatatgtttctttcatacgttgcagtgcttacagttccaacagctttccaagaaaacatttccatatttgtgttatttgtaaagtatacataaataatgtaaaataatttgggattatttcaactttacattgtatgtctgaatttcatcgatgttgtacctggctcagtcaatagttgtcacaggtattaagccattttggaatttgccacttttttctgggtaacctgttttagtttagtttacagcatttagaaacagaaggtaactttatagaagtaacaccaatatcctagtctgcttgccccgaatataactaatagtattaggatgtaagcaatattaagatggtttttattattttttatacactgtgtgcttttactttttatttaaactacagcaaaaaactgattttttaactaaaattgaatggcgtttatcttaatgaccagttattgaccaaagtgtactcagaagatgttattatgtcccaatctaaggaatcctttaatttggggattaattttacttacacatgccatttcagtttcagttgcctcattctattacatcattcttgtcaagtctaagctttatcatgtctgaattcttttaacactgaatctgtgatgtaaaaatgtatgatgtgccataaattttattcataataaactaagttatagcctattgtaatctgtaaaacatttcttgtaaattacctaatttattttttcatttatgtacagtatcttatgtaaatttgaaaaatgtttgccatggcgcattctgtaaacattcccgtattcttttccttaatgcttatttgcatgaaggtaacttgggttttgcttgtttgtattggataaccattaagccaacttcagtttctctgcctttttttctgtagtttaaccatttctaattttgttcatattctaaatagatgttagaatcatactttttattttctactttctaaataaattatctaagttgtttacta

SEQ ID NO: 21602 - DNA, 2649 bp, Homo sapiens
  source 1..2649: mol_type = unassigned DNA
gggcactttcaaaatggcggagtgtggagcgagcggcagcgggagcagcggggacagtctggacaagagcatcacgctgccccccgacgagatcttccgcaacctggagaacgccaagcgcttcgccatcgacataggcgggtcgttaaccaagctggcctactattcaacggtacagcacaaagtcgccaaggtgcggtctttcgaccactccggaaaggacacagaacgtgaacatgagccgccctatgagatttcagttcaagaagagatcactgctcgactgcacttcattaagtttgagaatacctacatcgaagcctgcctggacttcatcaaagaccatctcgtcaacacagagaccaaggtcatccaggcgaccgggggcggggcctacaagttcaaagacctcatcgaagagaagctgcggctgaaagtcgacaaggaggacgtgatgacgtgcctgattaaggggtgcaacttcgtgctcaagaacatcccccatgaggccttcgtgtaccagaaggattccgaccctgagttccggttccagaccaaccacccccacattttcccctatcttcttgtcaatatcggctctggagtctccatcgtgaaggtggagacggaggacaggttcgagtgggtcggcggcagctccattggaggcggcaccttctgggggcttggcgctctgctcaccaaaacgaagaagtttgacgagctcctgcacctggcctcgaggggccagcacagcaatgtggacatgctggtgcgggacgtctacggcggcgcccaccagactctcgggctgagcgggaacctcatcgccagcagcttcgggaagtcggccaccgccgaccaagagttctccaaagaagacatggcgaagagcctgctgcacatgatcagcaacgacattgggcagctggcctgcctccacgcacggctgcacagcctggaccgcgtgtactttggaggcttctttatccggggccaccccgtgaccatgcgcaccatcacctatagcatcaacttcttctccaagggggaagtgcaggcgctgtttctgaggcacgaaggctacctgggagccatcggagcgttcctgaaaggagctgagcaggacaatcctaaccagtacagctggggagagaactatgcaggcagctccgggctgatgagtgcatcacccgagctcggcccggcgcagcgggcgcggagtggcacttttgacttgctggaaatggaccggctggagaggccactggttgacctgccgctcctcctggacccgccctcctacgtgcccgacacggtggacctcaccgatgacgctctggcccgaaaatactggctcacctgctttgaggaggccctggacggggtagtgaagcgcgcagtggcgagccagccagactctgtggatgcagccgagagggcggagaagttccggcagaagtactggaacaagcttcagaccctgaggcagcagcccttcgcctatgggaccctgaccgtgcgcagcctgctggacaccagggagcactgtctgaacgagttcaacttcccggatccctactccaaagtgaagcagcgggagaatggcgtggcgctgaggtgcttccccggggtcgtgcgctccctggacgcgctgggctgggaggaacggcagctggcgctggtgaaaggcctcctggcggggaatgtcttcgactggggggccaaagccgtgtctgctgtccttgaatccgacccctactttgggtttgaagaagcaaagaggaagttacaagaaagaccctggctcgtggattcctacagcgagtggcttcagagattaaaggggccccctcataaatgtgccttaattttcgcagataacagtggaatagacatcattttgggagtcttcccctttgtcagggagctactccttagagggacagaggtcatcctggcgtgcaactcaggccccgccctgaacgacgtgacccacagcgagtccctcatcgtggcagagcgtattgcgggcatggaccctgtcgtgcactctgcgctccaggaagagaggctgctgctggtgcagacgggctccagctccccgtgcctcgacctcagccgcctggataaggggctggccgcactggtgcgggagcgtggcgcggatctggtggtcatcgagggcatgggccgtgctgtccacacaaactaccacgcagccctgcgctgcgagagcctcaagctggccgtcatcaagaacgcgtggctggccgagcggctgggcggccggctcttcagcgtcatcttcaagtacgaggtcccagccgagtgaggcgctgcagctgccggactcttctgcttgtcacttgtcaggaatgtgtttttaccaccacagggaaactgcgttcaaatcaacgtatttatatggtactgctgtgacgcggcacatacaccccagccgcacagatgcgtgtgacccagaggcgagacgcagctttgtcctgggagacgttcatattggaatctatttaactgctaaagaaccttttatatatatatatatataaatagagagatctatacaggtatgtctgacgggacgcagcaccgtgggcacgcaccaaatagagtttttaaaagaggccg

SEQ ID NO: 21603 - DNA, 3129 bp, Homo sapiens
  source 1..3129: mol_type = unassigned DNA
gtgttgctcctcccctggcagccgtgaggggggttagatctcagccggagccggagctgggcctagctgtcccacgggccaccactacctcctttggttcgggagaaagctacgaccaagtacgcccagctcgggccttagaacttctgaacgggcagtgcgggtaggccctgcttagcccttcccggaggacacctgaccaaaagaggaagatagtcttgggacccttgcatggtgtttcaaagggtggtgaagaactaaggtagaagaatacatgttcacttccagtgaacaagagcatgttcccaaactcaattttgggtcgcccacccttcactccaaatcatcaacaacataataacttctttaccctgtcacctactgtttattcacaccagcagcttatagatgcacaattcaactttcagaatgcagacttgtctagagctgtgtcattacagcagctgacatatggaaatgtcagtccaatacagacctcagcttccccattatttcgaggaaggaagagattaagcgatgaaaaaaaccttcctcttgacggtaaacggcaacgtttccattcaccccaccaagagccaactgtagttaaccagatagtgcctttatcaggtgaacgaagatactcaatgccaccattgtttcatacacattatgtaccagatatagtcagatgtgttccaccttttcgagaaattgcatttttagaacctagagaaatcacactgcctgaggccaaagataagttgagtcagcagatactggagttatttgaaacatgtcagcagcaaataagtgatttaaagaagaaagaactctgtcgaacacagctgcagagagaaattcagctgttatttccacaaagcagactttttttggttgggtcctctttaaatggatttggtacccggagcagtgatggtgatttatgcctagttgttaaggaagaaccatgtttttttcaggtaaatcagaagactgaagcacggcatatactcaccttagtccataaacacttctgtactagactttcgggctacattgagagacctcagctgattcgagcaaaagtgccaattgtgaagttcagggataaagtcagttgtgtggagtttgacttgaatgtaaacaatattgttggaataagaaacacattccttctcagaacttatgcataccttgaaaatcgagttcgtccgttagtgctggtgattaagaagtgggcaagtcaccatcagataaatgatgccagtcgtggtactttaagcagctatagtcttgtattgatggttttgcactatttacaaaccctacctgaacccatccttccatccctccaaaaaatttacccagagtcttttagtcctgctatacagctgcaccttgtacatcaagctccatgtaatgttcctccttacctctcaaagaatgaatcaaaccttggggacctcttactgggctttcttaaatattatgctacagaatttgactggaatagtcaaatgatttcagttcgtgaagccaaagccattccaaggcctgatggtattgaatggagaaataaatacatctgtgtagaagaaccttttgatggaacaaatacagccagagcagtgcacgaaaagcagaaatttgatatgatcaaggatcaatttttaaagtcatggcacagattgaaaaacaagagagatttgaacagtatactacctgtaagagctgctgtcctgaaaagataactggcctctatttcttaataaattcttccaagaaataaagaacaatagtttcatcataatacattatgtttacctccatcatagttgcttttttcatagttcttgttttcatgttttatttttaaaaagacatataaagattgcatattttattatgacatttcctaataaacccctttgatttaaaaatgtatttttaaaaatgtttacattgatgatgagtaatattgcatgtgttttcaggtgatcagataaaatatattttgggaaattaactgaacaaataaaaagtttttgatataacttcaattaattgtaccacatgctaatcctgaagagatgtgtagaattttggaaagggtctaattcatacatgcttaaagtataacctacgttagatagtttgttgtcaaagtctgttctagtaaagtgaagattcaagtcagttgttcagttacttgaagcaaaacgaaatctttcatttcagtcaaatcactgcagtcatgaaatactgaacaattgccttaagtctttgcttgactcactgggatagactgaggctttgggtgtgtctgtattagcatttcattagtacttcacatgcttttgatgtactcttgagattgctttaaattttgtattgaaacaacaatacattttgcactgtagtaatgggagcactaactcttacaacagttagtgaatcgttttaaagaatcagttcagtgtagacattttgaaaagattgtttcctgtgctttacgatagcttagtgcaatgtgcacttctgttttacttgccattttcctgctctgttttctctgtgacatgaagcaacagaaactgagatcaaagttaagattatatcctgtttgtagtatcagatatttttctgtgtacaattataggattgtaatctaaactggaatttttaggcagtaagtcaccacaaaatgttttagataagacacaataaaattattataaataaaagcttaatgtttgtaaaaaatctcttttttagtatttcttttttcacatgaaagaagtggtggctgctaaaaaaaaagctacagtgtttattaagggtctttttgatttatgtaaatatttgtaaattggtcagtgcctgtaaatttaaatataaaaagtaaccttgaaaacagttttaactttttcaaaagaactatgtccaacattttttagacctgctgtagtacagttttgtacctctaacgtattttttttttgcagaccaaatgctaaaacttttgcttttctttgacttgtaaaaggtgcacattttcattttcttccttaagttcaaatttttgtatgatgtcaaatgcaataaaatttatatatggacattgtt

SEQ ID NO: 21604 - DNA, 3223 bp, Homo sapiens
  source 1..3223: mol_type = unassigned DNA
ctattctcatccggggtcacgtcggtcttccgggtgtctttgacagggttttctacgccgctttttcggcgactttttgctcttccgctttttgccaccgcccccaaccttctatatccttgcagcccctaccttttcttgtgttgctcctcccctggcagccgtgaggggggttagatctcagccggagccggagctgggcctagctgtcccacgggccaccactacctcctttggttcgggagaaagctacgaccaagtacgcccagctcgggccttagaacttctgaacgggcagtgcgggaccaaaagaggaagatagtcttgggacccttgcatggtgtttcaaagggtggtgaagaactaaggtagaagaatacatgttcacttccagtgaacaagagcatgttcccaaactcaattttgggtcgcccacccttcactccaaatcatcaacaacataataacttctttaccctgtcacctactgtttattcacaccagcagcttatagatgcacaattcaactttcagaatgcagacttgtctagagctgtgtcattacagcagctgacatatggaaatgtcagtccaatacagacctcagcttccccattatttcgaggaaggaagagattaagcgatgaaaaaaaccttcctcttgacggtaaacggcaacgtttccattcaccccaccaagagccaactgtagttaaccagatagtgcctttatcaggtgaacgaagatactcaatgccaccattgtttcatacacattatgtaccagatatagtcagatgtgttccaccttttcgagaaattgcatttttagaacctagagaaatcacactgcctgaggccaaagataagttgagtcagcagatactggagttatttgaaacatgtcagcagcaaataagtgatttaaagaagaaagaactctgtcgaacacagctgcagagagaaattcagctgttatttccacaaagcagactttttttggttgggtcctctttaaatggatttggtacccggagcagtgatggtgatttatgcctagttgttaaggaagaaccagtaaatcagaagactgaagcacggcatatactcaccttagtccataaacacttctgtactagactttcgggctacattgagagacctcagctgattcgagcaaaagtgccaattgtgaagttcagggataaagtcagttgtgtggagtttgacttgaatgtaaacaatattgttggaataagaaacacattccttctcagaacttatgcataccttgaaaatcgagttcgtccgttagtgctggtgattaagaagtgggcaagtcaccatcagataaatgatgccagtcgtggtactttaagcagctatagtcttgtattgatggttttgcactatttacaaaccctacctgaacccatccttccatccctccaaaaaatttacccagagtcttttagtcctgctatacagctgcaccttgtacatcaagctccatgtaatgttcctccttacctctcaaagaatgaatcaaaccttggggacctcttactgggctttcttaaatattatgctacagaatttgactggaatagtcaaatgatttcagttcgtgaagccaaagccattccaaggcctgatggtattgaatggagaaataaatacatctgtgtagaagaaccttttgatggaacaaatacagccagagcagtgcacgaaaagcagaaatttgatatgatcaaggatcaatttttaaagtcatggcacagattgaaaaacaagagagatttgaacagtatactacctgtaagagctgctgtcctgaaaagataactggcctctatttcttaataaattcttccaagaaataaagaacaatagtttcatcataatacattatgtttacctccatcatagttgcttttttcatagttcttgttttcatgttttatttttaaaaagacatataaagattgcatattttattatgacatttcctaataaacccctttgatttaaaaatgtatttttaaaaatgtttacattgatgatgagtaatattgcatgtgttttcaggtgatcagataaaatatattttgggaaattaactgaacaaataaaaagtttttgatataacttcaattaattgtaccacatgctaatcctgaagagatgtgtagaattttggaaagggtctaattcatacatgcttaaagtataacctacgttagatagtttgttgtcaaagtctgttctagtaaagtgaagattcaagtcagttgttcagttacttgaagcaaaacgaaatctttcatttcagtcaaatcactgcagtcatgaaatactgaacaattgccttaagtctttgcttgactcactgggatagactgaggctttgggtgtgtctgtattagcatttcattagtacttcacatgcttttgatgtactcttgagattgctttaaattttgtattgaaacaacaatacattttgcactgtagtaatgggagcactaactcttacaacagttagtgaatcgttttaaagaatcagttcagtgtagacattttgaaaagattgtttcctgtgctttacgatagcttagtgcaatgtgcacttctgttttacttgccattttcctgctctgttttctctgtgacatgaagcaacagaaactgagatcaaagttaagattatatcctgtttgtagtatcagatatttttctgtgtacaattataggattgtaatctaaactggaatttttaggcagtaagtcaccacaaaatgttttagataagacacaataaaattattataaataaaagcttaatgtttgtaaaaaatctcttttttagtatttcttttttcacatgaaagaagtggtggctgctaaaaaaaaagctacagtgtttattaagggtctttttgatttatgtaaatatttgtaaattggtcagtgcctgtaaatttaaatataaaaagtaaccttgaaaacagttttaactttttcaaaagaactatgtccaacattttttagacctgctgtagtacagttttgtacctctaacgtattttttttttgcagaccaaatgctaaaacttttgcttttctttgacttgtaaaaggtgcacattttcattttcttccttaagttcaaatttttgtatgatgtcaaatgcaataaaatttatatatggacattgtt

SEQ ID NO: 21605 - DNA, 2204 bp, Homo sapiens
  source 1..2204: mol_type = unassigned DNA
ctacgccgctttttcggcgactttttgctcttccgctttttgccaccgcccccaaccttctatatccttgcagcccctaccttttcttgtgttgctcctcccctggcagccgtgaggggggttagatctcagccggagccggagctgggcctagctgtcccacgggccaccactacctcctttggttcgggagaaagctacgaccaagtacgcccagctcgggccttagaacttctgaacgggcagtgcgggaccaaaagaggaagatagtcttgggacccttgcatggtgtttcaaagggtggtgaagaactaaggggctccagagcttgatatatttctgggaatttggaatatgctaaactagatttctgccctagactaaacatctggctgtggactcaatgtagaagaatacatgttcacttccagtgaacaagagcatgttcccaaactcaattttgggtcgcccacccttcactccaaatcatcaacaacataataacttctttaccctgtcacctactgtttattcacaccagcagcttatagatgcacaattcaactttcagaatgcagacttgtctagagctgtgtcattacagcagctgacatatggaaatgtcagtccaatacagacctcagcttccccattatttcgaggaaggaagagattaagcgatgaaaaaaaccttcctcttgacggtaaacggcaacgtttccattcaccccaccaagagccaactgtagttaaccagatagtgcctttatcaggtgaacgaagatactcaatgccaccattgtttcatacacattatgtaccagatatagtcagatgtgttccaccttttcgagaaattgcatttttagaacctagagaaatcacactgcctgaggccaaagataagttgagtcagcagatactggagttatttgaaacatgtcagcagcaaataagtgatttaaagaagaaagaactctgtcgaacacagctgcagagagaaattcagctgttatttccacaaagcagactttttttggttgggtcctctttaaatggatttggtacccggagcagtgatggtgatttatgcctagttgttaaggaagaaccatgtttttttcaggtaaatcagaagactgaagcacggcatatactcaccttagtccataaacacttctgtactagactttcgggctacattgagagacctcagctgattcgagcaaaagtgccaattgtgaagttcagggataaagtcagttgtgtggagtttgacttgaatgtaaacaatattgttggaataagaaacacattccttctcagaacttatgcataccttgaaaatcgagttcgtccgttagtgctggtgattaagaagtgggcaagtcaccatcagataaatgatgccagtcgtggtactttaagcagctatagtcttgtattgatggttttgcactatttacaaaccctacctgaacccatccttccatccctccaaaaaatttacccagagtcttttagtcctgctatacagctgcaccttgtacatcaagctccatgtaatgttcctccttacctctcaaagaatgaatcaaaccttggggacctcttactgggctttcttaaatattatgctacagaatttgactggaatagtcaaatgatttcagttcgtgaagccaaagccattccaaggcctgatggtattgaatggagaaataaatacatctgtgtagaagaaccttttgatggaacaaatacagccagagcagtgcacgaaaagcagaaatttgatatgatcaaggatcaatttttaaagtcatggcacagattgaaaaacaagagagatttgaacagtatactacctgtaagagctgctgtcctgaaaagataactggcctctatttcttaataaattcttccaagaaataaagaacaatagtttcatcataatacattatgtttacctccatcatagttgcttttttcatagttcttgttttcatgttttatttttaaaaagacatataaagattgcatattttattatgacatttcctaataaacccctttgatttaaaaatgtatttttaaaaatgtttacattgatgatgagtaatattgcatgtgttttcaggtgatcagataaaatatattttgggaaattaactgaacaaataaaaagtttttgatataacttc

SEQ ID NO: 21606 - DNA, 3523 bp, Homo sapiens
  source 1..3523: mol_type = unassigned DNA
cgctccccgctgcctattctcatccggggtcacgtcggtcttccgggtgtctttgacagggttttctacgccgctttttcggcgactttttgctcttccgctttttgccaccgcccccaaccttctatatccttgcagcccctaccttttcttgtgttgctcctcccctggcagccgtgaggggggttagatctcagccggagccggagctgggcctagctgtcccacgggccaccactacctcctttggttcgggagaaagctacgaccaagtacgcccagctcgggccttagaacttctgaacgggcagtgcgggtaggccctgcttagcccttcccggaggacacctgtgagtttagggggtttcggagaggaacgcagcagtgtaggcccaggtcggcggcggggcacgggaaacttttccgaaacggtagcgttttgttttgcgtgggaggttccagcagtatctcttggttattccaaatttatgggcggcatctgggctgctgtacattttgaagaatcttaggaccgcttactttgcttactcgttttctattcctcgcgtactgcctcgtccaccactccaggaccaaaagaggaagatagtcttgggacccttgcatggtgtttcaaagggtggtgaagaactaaggtagaagaatacatgttcacttccagtgaacaagagcatgttcccaaactcaattttgggtcgcccacccttcactccaaatcatcaacaacataataacttctttaccctgtcacctactgtttattcacaccagcagcttatagatgcacaattcaactttcagaatgcagacttgtctagagctgtgtcattacagcagctgacatatggaaatgtcagtccaatacagacctcagcttccccattatttcgaggaaggaagagattaagcgatgaaaaaaaccttcctcttgacggtaaacggcaacgtttccattcaccccaccaagagccaactgtagttaaccagatagtgcctttatcaggtgaacgaagatactcaatgccaccattgtttcatacacattatgtaccagatatagtcagatgtgttccaccttttcgagaaattgcatttttagaacctagagaaatcacactgcctgaggccaaagataagttgagtcagcagatactggagttatttgaaacatgtcagcagcaaataagtgatttaaagaagaaagaactctgtcgaacacagctgcagagagaaattcagctgttatttccacaaagcagactttttttggttgggtcctctttaaatggatttggtacccggagcagtgatggtgatttatgcctagttgttaaggaagaaccatgtttttttcaggtaaatcagaagactgaagcacggcatatactcaccttagtccataaacacttctgtactagactttcgggctacattgagagacctcagctgattcgagcaaaagtgccaattgtgaagttcagggataaagtcagttgtgtggagtttgacttgaatgtaaacaatattgttggaataagaaacacattccttctcagaacttatgcataccttgaaaatcgagttcgtccgttagtgctggtgattaagaagtgggcaagtcaccatcagataaatgatgccagtcgtggtactttaagcagctatagtcttgtattgatggttttgcactatttacaaaccctacctgaacccatccttccatccctccaaaaaatttacccagagtcttttagtcctgctatacagctgcaccttgtacatcaagctccatgtaatgttcctccttacctctcaaagaatgaatcaaaccttggggacctcttactgggctttcttaaatattatgctacagaatttgactggaatagtcaaatgatttcagttcgtgaagccaaagccattccaaggcctgatggtattgaatggagaaataaatacatctgtgtagaagaaccttttgatggaacaaatacagccagagcagtgcacgaaaagcagaaatttgatatgatcaaggatcaatttttaaagtcatggcacagattgaaaaacaagagagatttgaacagtatactacctgtaagagctgctgtcctgaaaagataactggcctctatttcttaataaattcttccaagaaataaagaacaatagtttcatcataatacattatgtttacctccatcatagttgcttttttcatagttcttgttttcatgttttatttttaaaaagacatataaagattgcatattttattatgacatttcctaataaacccctttgatttaaaaatgtatttttaaaaatgtttacattgatgatgagtaatattgcatgtgttttcaggtgatcagataaaatatattttgggaaattaactgaacaaataaaaagtttttgatataacttcaattaattgtaccacatgctaatcctgaagagatgtgtagaattttggaaagggtctaattcatacatgcttaaagtataacctacgttagatagtttgttgtcaaagtctgttctagtaaagtgaagattcaagtcagttgttcagttacttgaagcaaaacgaaatctttcatttcagtcaaatcactgcagtcatgaaatactgaacaattgccttaagtctttgcttgactcactgggatagactgaggctttgggtgtgtctgtattagcatttcattagtacttcacatgcttttgatgtactcttgagattgctttaaattttgtattgaaacaacaatacattttgcactgtagtaatgggagcactaactcttacaacagttagtgaatcgttttaaagaatcagttcagtgtagacattttgaaaagattgtttcctgtgctttacgatagcttagtgcaatgtgcacttctgttttacttgccattttcctgctctgttttctctgtgacatgaagcaacagaaactgagatcaaagttaagattatatcctgtttgtagtatcagatatttttctgtgtacaattataggattgtaatctaaactggaatttttaggcagtaagtcaccacaaaatgttttagataagacacaataaaattattataaataaaagcttaatgtttgtaaaaaatctcttttttagtatttcttttttcacatgaaagaagtggtggctgctaaaaaaaaagctacagtgtttattaagggtctttttgatttatgtaaatatttgtaaattggtcagtgcctgtaaatttaaatataaaaagtaaccttgaaaacagttttaactttttcaaaagaactatgtccaacattttttagacctgctgtagtacagttttgtacctctaacgtattttttttttgcagaccaaatgctaaaacttttgcttttctttgacttgtaaaaggtgcacattttcattttcttccttaagttcaaatttttgtatgatgtcaaatgcaataaaatttatatatggacattgtt

SEQ ID NO: 21607 - DNA, 2103 bp, Homo sapiens
  source 1..2103: mol_type = unassigned DNA
attggtgaggcaaggaggaggcggagtgactcggcggccattagctgtgtgtagttgcccgggactaggagcttaagtgaagaggtacgccttgttcggtggaaatcagccgtagccatgagtttctgccggggctagccctagagtacggagcaggcggacttttcggttccccgccccgccaggtggcggggcctactaggcctccgggcatccccggtctcaagtaggcctcatctgccggcaagggcgcccgaaacgcgggaggcgccatgtcgctggttgcttacgccagcagcgatgagagcgagccggatgaggctgagcccgagccggaggaagaggaggcggtggctcctacatctgggcccgctttagggggcttgttcgcttctctccctgcgcccaagggtccggccttgctgcctccgccccctcagatgctggcgccagcctttcccccgccgctgttgcttcccccacccaccggagaccccaggcttcagcctcctccccccttgcccttcggcctgggaggcttccccccacctccaggcgtgagcccggctgaagcggcgggagttggggagggactgggattggggttgccctcgccccgaggccctggcctcaatctgccccctccaattggcggtgccggtcccccgctggggcttcccaagccaaagaagaggaaagagcccgtgaagatcgcggcgccggagttgcataagggagattcagattctgaggaagatgaacccacaaagaagaaaactatccttcagggatccagtgaggggactggtttgtctgccttgcttccccaacctaaaaacctgactgtgaaagagactaacaggttgctcctgccccatgccttctcccgcaaaccctcggatggctcccctgatactaagccctccagactggcttctaagaccaagacttcctctcttgcccctgttgtgggcaccacaaccaccactccgtcgccctctgctatcaaggctgctgccaagagtgctgccctgcaggtgacaaagcagatcacgcaggaagaagacgacagtgatgaggaagtagcccccgaaaactttttctccctccctgaaaaggctgagccacctggagttgagccatacccttaccccatccccactgtccctgaagagctgcctccaggcacggaaccagagccggctttccaggacgatgcagccaatgccccccttgaattcaagatggcagcaggttcaagtggggccccttggatgcctaagcctggggacgactacagctacaatcagttttccacatatggcgatgccaatgccgctggtgcttattatcaggattattacagtggtggctactatcctgcacaggacccggccctggtccccccccaggaaattgccccagatgcctccttcatcgatgacgaagcatttaagcggctgcagggcaagaggaaccgagggagagaagaaatcaactttgtggagatcaaaggtgatgaccagctcagtggggcccagcaatggatgactaagtcattgacagaagagaaaaccatgaagtcattcagcaaaaagaaaggtgagcagccaacaggccagcagcggcggaaacaccagatcacatatcttattcatcaggccaaggagcgggagctggaactgaagaacacctggtcagagaacaagctcagccgccgtcagacccaagccaaatatggattctagggctctggaactgattgctcccaggatctcctgccagcccagctggcctggcccccagcttcacctctgggaccccagctgctctaagcccaggatctctttccccaaggacccagccctcgcctctgcgagaatgaacatatttgatagatttttcttaacaagttagaaaattcagctcctttctgtcctggagctagcaaagacttgtgtgatgcctccgaaggggctctgagttctggggtgggagttttgctctctgtcaggtgtgataaaatgttgaaccctccccaccaccacttttttttttttaaaccagggatgtctgttgaaataaaacattcagtctgacaaa

SEQ ID NO: 21608 - DNA, 1948 bp, Homo sapiens
  source 1..1948: mol_type = unassigned DNA
ttgcccgggactaggagcttaagtgaagaggtacgccttgttcggtggaaatcagccgtagccatgagtttctgccggggctagccctagagtacggagcaggcggacttttcggttccccgccccgccaggtggcggggcctactaggcctccgggcatccccggtctcaagtaggcctcatctgccggcaagggcgcccgaaacgcgggaggcgccatgtcgctggttgcttacgccagcagcgatgagagcgagccggatgaggctgagcccgagccggaggaagaggaggcggtggctcctacatctgggcccgctttagggggcttgttcgcttctctccctgcgcccaagggtccggccttgctgcctccgccccctcagatgctggcgccagcctttcccccgccgctgttgcttcccccacccaccggagaccccaggcttcagcctcctccccccttgcccttcggcctgggaggcttccccccacctccaggcgtgagcccggctgaagcggcgggagttggggagggactgggattggggttgccctcgccccgaggccctggcctcaatctgccccctccaattggcggtgccggtcccccgctggggcttcccaagccaaagaagaggaaagagcccgtgaagatcgcggcgccggagttgcataagggagattcagattctgaggaagatgaacccacaaagaagaaaactatccttcagggatccagtgaggggactggtttgtctgccttgcttccccaacctaaaaacctgactgtgaaagagactaacaggttgctcctgccccatgccttctcccgcaaaccctcggatggctcccctgatactaagccctccagactggcttctaagaccaagacttcctctcttgcccctgttgtgggcaccacaaccaccactccgtcgccctctgctatcaaggctgctgccaagagtgctgccctgcaggtgacaaagcagatcacgcaggaagaagacgacagtgatgaggaagtagcccccgaaaactttttctccctccctgaaaaggctgagccacctggagttgagccatacccttaccccatccccactgtccctgaagagctgcctccaggcacggaaccagagccggctttccaggacgatgcagccaatgccccccttgaattcaagatggcagcaggttcaagtggggccccttggatgcctaagcctggggacgactacagctacaatcagttttccacatatggcgatgccaatgccgctggtgcttattatcagtttaagcggctgcagggcaagaggaaccgagggagagaagaaatcaactttgtggagatcaaaggtgatgaccagctcagtggggcccagcaatggatgactaagtcattgacagaagagaaaaccatgaagtcattcagcaaaaagaaaggtgagcagccaacaggccagcagcggcggaaacaccagatcacatatcttattcatcaggccaaggagcgggagctggaactgaagaacacctggtcagagaacaagctcagccgccgtcagacccaagccaaatatggattctagggctctggaactgattgctcccaggatctcctgccagcccagctggcctggcccccagcttcacctctgggaccccagctgctctaagcccaggatctctttccccaaggacccagccctcgcctctgcgagaatgaacatatttgatagatttttcttaacaagttagaaaattcagctcctttctgtcctggagctagcaaagacttgtgtgatgcctccgaaggggctctgagttctggggtgggagttttgctctctgtcaggtgtgataaaatgttgaaccctccccaccaccacttttttttttttaaaccagggatgtctgttgaaataaaacattcagtctg

SEQ ID NO: 21609 - DNA, 2140 bp, Homo sapiens
  source 1..2140: mol_type = unassigned DNA
ttgcccgggactaggagcttaagtgaagaggtacgccttgttcggtggaaatcagccgtagccatgagtttctgccggggctagccctagagtacggagcaggcggacttttcggttccccgccccgccaggtggcggggcctactaggcctccgggcatccccggtctcaagtaggcctcatctgccggcaagggcgcccgaaacgcgggaggcgccatgtcgctggttgcttacgccagcagcgatgagagcgagccggatgaggctgagcccgagccggaggaagaggaggcggtggctcctacatctgggcccgctttagggggcttgttcgcttctctccctgcgcccaagggtccggccttgctgcctccgccccctcagatgctggcgccagcctttcccccgccgctgttgcttcccccacccaccggagaccccaggcttcagcctcctccccccttgcccttcggcctgggaggcttccccccacctccaggcgtgagcccggctgaagcggcgggagttggggagggactgggattggggttgccctcgccccgaggccctggcctcaatctgccccctccaattggcggtgccggtcccccgctggggcttcccaagccaaagaagaggaaagagcccgtgaagatcgcggcgccggagttgcataagggagattcagattctgaggaagatgaacccacaaagaagaaaactatccttcagggatccagtgaggggactggtttgtctgccttgcttccccaacctaaaaacctgactgtgaaagagactaacaggttgctcctgccccatgccttctcccgcaaaccctcggatggctcccctgatactaagccctccagactggcttctaagaccaagacttcctctcttgcccctgttgtgggcaccacaaccaccactccgtcgccctctgctatcaaggctgctgccaagagtgctgccctgcaggtgacaaagcagatcacgcaggaagaagacgacagtgatgaggaagtagcccccgaaaactttttctccctccctgaaaaggctgagccacctggagttgagccatacccttaccccatccccactgtccctgaagagctgcctccaggcacggaaccagagccggctttccaggacgatgcagccaatgccccccttgaattcaagatggcagcaggttcaagtggggccccttggatgcctaagcctggggacgactacagctacaatcagttttccacatatggcgatgccaatgccgctggtgcttattatcagggtctgcagcaacatctgggccactcgcctctaaggggaatcatgagattcctgaactcaaaatctggtaaacgaacctgctttgttcccagctttgattattacagtggtggctactatcctgcacaggacccggccctggtccccccccaggaaattgccccagatgcctccttcatcgatgacgaagcatttaagcggctgcagggcaagaggaaccgagggagagaagaaatcaactttgtggagatcaaaggtgatgaccagctcagtggggcccagcaatggatgactaagtcattgacagaagagaaaaccatgaagtcattcagcaaaaagaaaggtgagcagccaacaggccagcagcggcggaaacaccagatcacatatcttattcatcaggccaaggagcgggagctggaactgaagaacacctggtcagagaacaagctcagccgccgtcagacccaagccaaatatggattctagggctctggaactgattgctcccaggatctcctgccagcccagctggcctggcccccagcttcacctctgggaccccagctgctctaagcccaggatctctttccccaaggacccagccctcgcctctgcgagaatgaacatatttgatagatttttcttaacaagttagaaaattcagctcctttctgtcctggagctagcaaagacttgtgtgatgcctccgaaggggctctgagttctggggtgggagttttgctctctgtcaggtgtgataaaatgttgaaccctccccaccaccacttttttttttttaaaccagggatgtctgttgaaataaaacattcagtctg

SEQ ID NO: 21610 - DNA, 3518 bp, Homo sapiens
  source 1..3518: mol_type = unassigned DNA
cccagcggccccgagcgagcgccagcgccacacagccccgggcagccgccggcgagcgcgccgcgacgccgaacaggtggccggaggctgcgggcgccgcggcggggagaggcgaggcaagccccgggcgaagcgaggcgaggcgagggcggccgggccgggcatgcgagctgagcggccccccggcgtcgccgccgcctgcccgcgcccctagccgcccgcgcgcccgagtccccagcggctcctccgcgcccagcgtcctcggtcccggcctcggctgctccggctgcgctcggcgaggggcgcgggcccgcccgcggcggcggcggcatgaaagtgaccgtgtgcttcggacggacccgggtggtcgtgccgtgcggggacggccacatgaaagttttcagcctcatccagcaggcggtgacccgctaccggaaggccatcgccaaggatccaaactactggatacaggtgcatcgcttggaacatggagatggaggaatactagaccttgatgacattctttgtgatgtagcagacgataaagacagactggtagcagtgtttgatgagcaggatccacatcacggaggtgatggcaccagtgccagttccacgggtacccagagcccagagatatttggtagtgagcttggcaccaacaatgtctcagcctttcagccttaccaagcaacaagtgaaattgaggtcacaccttcagtccttcgagcaaatatgcctcttcatgttcgacgcagtagtgacccagctctaattggcctctccacttctgtcagtgatagtaatttttcctctgaagagccttcaaggaaaaatcccacacgctggtcaacaacagctggcttcctcaagcagaacactgctgggagtcctaaaacctgcgacaggaagaaagatgaaaactacagaagcctcccgcgggatactagtaactggtctaaccaatttcagagagacaatgctcgctcgtctctgagtgccagtcacccaatggtgggcaagtggctggagaaacaagaacaggatgaggatgggacagaagaggataacagtcgtgttgaacctgttggacatgctgacacgggtttggagcatatacccaacttttctctggatgatatggtaaagctcgtagaagtccccaacgatggagggcctctgggaatccacgtagtgcctttcagtgctcgaggcggcagaaccctggggttattagtaaaacgattggagaaaggtggtaaagctgaacatgaaaatctttttcgtgagaatgattgcattgtcaggattaatgatggcgaccttcgaaatagaagatttgaacaagcacaacatatgtttcgccaagccatgcgtacacccatcatttggttccatgtggttcctgcagcaaataaagagcagtatgaacaactatcccaaagtgagaagaacaattactattcaagccgttttagccctgacagccagtatattgacaacaggagtgtgaacagtgcagggcttcacacggtgcagagagcaccccgactgaaccacccgcctgagcagatagactctcactcaagactacctcatagcgcacacccctcgggaaaaccaccatccgctccagcctcggcacctcagaatgtatttagtacgactgtaagcagtggttataacaccaaaaaaataggcaagaggcttaatatccagcttaagaaaggtacagaaggtttgggattcagcatcacttccagagatgtaacaataggtggctcagctccaatctatgtgaaaaacattctcccccggggggcggccattcaggatggccgacttaaggcaggagacagacttatagaggtaaatggagtagatttagtgggcaaatcccaagaggaagttgtttcgctgttgagaagcaccaagatggaaggaactgtgagccttctggtctttcgccaggaagacgccttccacccaagggaactgaatgcagagccaagccagatgcagattccaaaagaaacgaaagcagaagatgaggatattgttcttacacctgatggcaccagggaatttctgacatttgaagtcccacttaatgattcaggatctgcaggccttggtgtcagtgtcaaaggtaaccggtcaaaagagaaccacgcagatttgggaatctttgtcaagtccattattaatggaggagcagcatctaaagatggaaggcttcgggtgaatgatcaactgatagcagtaaatggagaatccctgttgggcaagacaaaccaagatgccatggaaaccctaagaaggtctatgtctactgaaggcaataaacgaggaatgatccagcttattgttgcaaggagaataagcaagtgcaatgagctgaagtcacctgggagcccccctggacctgagctgcccattgaaacagcgttggatgatagagaacgaagaatttcccattccctctacagtgggattgaggggcttgatgaatcgcccagcagaaatgctgccctcagtaggataatgggtaaataccagctgtcccctacagtgaatatgccccaagatgacactgtcattatagaagatgacaggttgccagtgcttcctccacatctctctgaccagtcctcttccagctcccatgatgatgtggggtttgtgacggcagatgctggtacttgggccaaggctgcaatcagtgattcagccgactgctctttgagtccagatgttgatccagttcttgcttttcaacgagaaggatttggacgtcagagtatgtcagaaaaacgcacaaagcaattttcagatgccagtcaattggatttcgttaaaacacgaaaatcaaaaagcatggatttaggtatagctgacgagactaaactcaatacagtggatgaccagaaagcaggttctcccagcagagatgtgggtccttccctgggtctgaagaagtcaagctcgttggagagtctgcagaccgcagttgccgaggtgactttgaatggggatattcctttccatcgtccacggccgcggataatcagaggcaggggatgcaatgagagcttcagagctgccatcgacaaatcttatgataaacccgcggtagatgatgatgatgaaggcatggagaccttggaagaagacacagaagaaagttcaagatcagggagagagtctgtatccacagccagtgatcagccttcccactctctggagagacaaatgaatggaaaccaagagaaaggtgataagactgatagaaaaaaggataaaactggaaaagaaaagaagaaagatagagataaggagaaggataaaatgaaagccaagaagggaatgctgaagggcttgggagacatgttcagccttgccaaactgaagcccgagaagagatgaacaacaaagcgattcaaaacatgtcttgaacagcacatattgcacagttgttgttttttttaaacaaacaataaatttacttttaatgaatt

SEQ ID NO: 21611 - DNA, 5894 bp, Homo sapiens
  source 1..5894: mol_type = unassigned DNA
gcggccccgagcgagcgccagcgccacacagccccgggcagccgccggcgagcgcgccgcgacgccgaacaggtggccggaggctgcgggcgccgcggcggggagaggcgaggcaagccccgggcgaagcgaggcgaggcgagggcggccgggccgggcatgcgagctgagcggccccccggcgtcgccgccgcctgcccgcgcccctagccgcccgcgcgcccgagtccccagcggctcctccgcgcccagcgtcctcggtcccggcctcggctgctccggctgcgctcggcgaggggcgcgggcccgcccgcggcggcggcggcatgaaagtgaccgtgtgcttcggacggacccgggtggtcgtgccgtgcggggacggccacatgaaagttttcagcctcatccagcaggcggtgacccgctaccggaaggccatcgccaaggatccaaactactggatacaggtgcatcgcttggaacatggagatggaggaatactagaccttgatgacattctttgtgatgtagcagacgataaagacagactggtagcagtgtttgatgagcaggatccacatcacggaggtgatggcaccagtgccagttccacgggtacccagagcccagagatatttggtagtgagcttggcaccaacaatgtctcagcctttcagccttaccaagcaacaagtgaaattgaggtcacaccttcagtccttcgagcaaatatgcctcttcatgttcgacgcagtagtgacccagctctaattggcctctccacttctgtcagtgatagtaatttttcctctgaagagccttcaaggaaaaatcccacacgctggtcaacaacagctggcttcctcaagcagaacactgctgggagtcctaaaacctgcgacaggaagaaagatgaaaactacagaagcctcccgcgggatactagtaactggtctaaccaatttcagagagacaatgctcgctcgtctctgagtgccagtcacccaatggtgggcaagtggctggagaaacaagaacaggatgaggatgggacagaagaggataacagtcgtgttgaacctgttggacatgctgacacgggtttggagcatatacccaacttttctctggatgatatggtaaagctcgtagaagtccccaacgatggagggcctctgggaatccacgtagtgcctttcagtgctcgaggcggcagaaccctggggttattagtaaaacgattggagaaaggtggtaaagctgaacatgaaaatctttttcgtgagaatgattgcattgtcaggattaatgatggcgaccttcgaaatagaagatttgaacaagcacaacatatgtttcgccaagccatgcgtacacccatcatttggttccatgtggttcctgcagcaaataaagagcagtatgaacaactatcccaaagtgagaagaacaattactattcaagccgttttagccctgacagccagtatattgacaacaggagtgtgaacagtgcagggcttcacacggtgcagagagcaccccgactgaaccacccgcctgagcagatagactctcactcaagactacctcatagcgcacacccctcgggaaaaccaccatccgctccagcctcggcacctcagaatgtatttagtacgactgtaagcagtggttataacaccaaaaaaataggcaagaggcttaatatccagcttaagaaaggtacagaaggtttgggattcagcatcacttccagagatgtaacaataggtggctcagctccaatctatgtgaaaaacattctcccccggggggcggccattcaggatggccgacttaaggcaggagacagacttatagaggtaaatggagtagatttagtgggcaaatcccaagaggaagttgtttcgctgttgagaagcaccaagatggaaggaactgtgagccttctggtctttcgccaggaagacgccttccacccaagggaactgaatgcagagccaagccagatgcagattccaaaagaaacgaaagcagaagatgaggatattgttcttacacctgatggcaccagggaatttctgacatttgaagtcccacttaatgattcaggatctgcaggccttggtgtcagtgtcaaaggtaaccggtcaaaagagaaccacgcagatttgggaatctttgtcaagtccattattaatggaggagcagcatctaaagatggaaggcttcgggtgaatgatcaactgatagcagtaaatggagaatccctgttgggcaagacaaaccaagatgccatggaaaccctaagaaggtctatgtctactgaaggcaataaacgaggaatgatccagcttattgttgcaaggagaataagcaagtgcaatgagctgaagtcacctgggagcccccctggacctgagctgcccattgaaacagcgttggatgatagagaacgaagaatttcccattccctctacagtgggattgaggggcttgatgaatcgcccagcagaaatgctgccctcagtaggataatgggtgagtcaggtaaataccagctgtcccctacagtgaatatgccccaagatgacactgtcattatagaagatgacaggttgccagtgcttcctccacatctctctgaccagtcctcttccagctcccatgatgatgtggggtttgtgacggcagatgctggtacttgggccaaggctgcaatcagtgattcagccgactgctctttgagtccagatgttgatccagttcttgcttttcaacgagaaggatttggacgtcagagtatgtcagaaaaacgcacaaagcaattttcagatgccagtcaattggatttcgttaaaacacgaaaatcaaaaagcatggatttaggtatagctgacgagactaaactcaatacagtggatgaccagaaagcaggttctcccagcagagatgtgggtccttccctgggtctgaagaagtcaagctcgttggagagtctgcagaccgcagttgccgaggtgactttgaatggggatattcctttccatcgtccacggccgcggataatcagaggcaggggatgcaatgagagcttcagagctgccatcgacaaatcttatgataaacccgcggtagatgatgatgatgaaggcatggagaccttggaagaagacacagaagaaagttcaagatcagggagagagtctgtatccacagccagtgatcagccttcccactctctggagagacaaatgaatggaaaccaagagaaaggtgataagactgatagaaaaaaggataaaactggaaaagaaaagaagaaagatagagataaggagaaggataaaatgaaagccaagaagggaatgctgaagggcttgggagacatgttcaggattcaagccaaaactcgagaatttagggaacgacaagctcgagagcgtgactatgctgaaattcaagattttcatcggacatttggctgtgatgatgagttaatgtatgggggagtttcttcttatgaaggttccatggctctcaacgctagacctcagagcccacgagaagggcatatgatggatgctttgtatgcccaagtcaagaagccgcggaattccaaaccctcacctgtagacagtaacagatcaactcctagcaatcatgatcggatacagcgtctgaggcaagaatttcagcaagcaaagcaagatgaagatgtagaagatcgtcggcggacctatagttttgagcaaccctggccgaacgcacggccggcgacgcagagcgggcgacactcggtgtccgtggaggtgcagatgcagcggcagcggcaggaggagcgcgagagctcccagcaggcccagcgccagtacagctctctgcctcggcaaagcaggaaaaatgccagctcggtctcccaggactcttgggagcagaactactcccctggggaaggcttccagagtgccaaagagaaccccaggtactccagctaccaaggctccaggaacggctacctgggaggacatggcttcaacgccagggtcatgctggaaactcaggagctccttcgccaggaacagaggcggaaggagcagcagatgaagaagcagcctccttccgaggggcccagcaactatgactcgtataagaaagtccaggaccccagttacgcccctcccaaggggcccttccggcaagatgtgcccccctccccttctcaggttgcgaggctgaacagacttcagactcctgagaaagggaggcccttctattcctgagcacgcaaataacggatgcttcatgtcgcgcaataaaagacattttcctatgaagacttgtattttgggagtttttttaaaacctcgatggtactatggagtatttctgttgttggtatcagtgcctttaagcggtgtaggcaaagaaatggaaggccttaatgtctttgccactatgtctcaagtgtctgtttcatggaaggatttcccaccctgtgacaatcatctgtttgaggtgttcatatgctctgcgcctctccacagtaccaggaatctcggccctactcatgagttgtccgcggcttggttgtaacatccctgcaccacttgcagtgacaaattcacctgaagtggaggatgacgtgcggccctgtttctccctctaagttctcttagctatgggatgacatcttagtctctggtggaggaaaagtgggcgacatacaccaaaaattggggctttctggtacttcacagcacagccatttgtcgtactttgtcatcactgtggttttctctttcctttctcagctctttgtgacgggagagtcggtcatcctattacagaagctaagccatagtccaacattgtttggtcaccatgggggtccttttgtaactgccttatgactcaacattaccaataaagtgatgatcctggtctgcgtttatacatacgcttgttcggtcctgttcctgacacgtgggttgagtcaccacagctctgtgtggggaacgtgggagacaggagtggctcctgccgggggaagctgggcctgccattggccctgtgtctatcatgaggggagagctaagaaagaaattctcctaggaagagctcatggcccagtacatcctagtaattattttaattagtttttgttctgacagcttgtcaggaagggcacagaatgggacagagataaaccagacagtcattttgatctgctctctacggtttttcaagtcagaggcaattgatgcttgtctaatgcatccacacactgcatgtctgactggcgatgccgcgctcctaagtagttctgccatgaaacataaaagacaaaggaaaagccgttacacatcacacagagaacattttcgggtcccacagcggtggtggcaggaagctcactctcgcgtcagtattagagtgtgtgtgtgggtctcggggatctcggtggctcccatcttccttcattgttctgaacatcctgtattgtaaaccatggctggggtgctaaagtgcctgtgaatcccgatgtggaaaaagctggaggtgaaagctcagcataccatgtatttactttaaaaacagaaaaaaagacatgtatggatatgtctattttttttttattggcacattgtatttttgtgttgacttgtttttagaaatgatgtgtccacacacgtacccgtgtctcttctgcatttctgtgtcatggttctgtttcttaatcacgtgcggcggtgtctaagtggtgttaccagtgtacgcgcagtgaccttggatgacagtggctctttctcacagcctcccctgagctgtgagaaacagctttctctgtacatatgcaactcctaataaaaggcatatttcttcctgtt

SEQ ID NO: 21612 - DNA, 5867 bp, Homo sapiens
  source 1..5867: mol_type = unassigned DNA
gcggccccgagcgagcgccagcgccacacagccccgggcagccgccggcgagcgcgccgcgacgccgaacaggtggccggaggctgcgggcgccgcggcggggagaggcgaggcaagccccgggcgaagcgaggcgaggcgagggcggccgggccgggcatgcgagctgagcggccccccggcgtcgccgccgcctgcccgcgcccctagccgcccgcgcgcccgagtccccagcggctcctccgcgcccagcgtcctcggtcccggcctcggctgctccggctgcgctcggcgaggggcgcgggcccgcccgcggcggcggcggcatgaaagtgaccgtgtgcttcggacggacccgggtggtcgtgccgtgcggggacggccacatgaaagttttcagcctcatccagcaggcggtgacccgctaccggaaggccatcgccaaggatccaaactactggatacaggtgcatcgcttggaacatggagatggaggaatactagaccttgatgacattctttgtgatgtagcagacgataaagacagactggtagcagtgtttgatgagcaggatccacatcacggaggtgatggcaccagtgccagttccacgggtacccagagcccagagatatttggtagtgagcttggcaccaacaatgtctcagcctttcagccttaccaagcaacaagtgaaattgaggtcacaccttcagtccttcgagcaaatatgcctcttcatgttcgacgcagtagtgacccagctctaattggcctctccacttctgtcagtgatagtaatttttcctctgaagagccttcaaggaaaaatcccacacgctggtcaacaacagctggcttcctcaagcagaacactgctgggagtcctaaaacctgcgacaggaagaaagatgaaaactacagaagcctcccgcgggatactagtaactggtctaaccaatttcagagagacaatgctcgctcgtctctgagtgccagtcacccaatggtgggcaagtggctggagaaacaagaacaggatgaggatgggacagaagaggataacagtcgtgttgaacctgttggacatgctgacacgggtttggagcatatacccaacttttctctggatgatatggtaaagctcgtagaagtccccaacgatggagggcctctgggaatccacgtagtgcctttcagtgctcgaggcggcagaaccctggggttattagtaaaacgattggagaaaggtggtaaagctgaacatgaaaatctttttcgtgagaatgattgcattgtcaggattaatgatggcgaccttcgaaatagaagatttgaacaagcacaacatatgtttcgccaagccatgcgtacacccatcatttggttccatgtggttcctgcagcaaataaagagcagtatgaacaactatcccaaagtgagaagaacaattactattcaagccgttttagccctgacagccagtatattgacaacaggagtgtgaacagtgcagggcttcacacggtgcagagagcaccccgactgaaccacccgcctgagcagatagactctcactcaagactacctcatagcgcacacccctcgggaaaaccaccatccgctccagcctcggcacctcagaatgtatttagtacgactgtaagcagtggttataacaccaaaaaaataggcaagaggcttaatatccagcttaagaaaggtacagaaggtttgggattcagcatcacttccagagatgtaacaataggtggctcagctccaatctatgtgaaaaacattctcccccggggggcggccattcaggatggccgacttaaggcaggagacagacttatagaggtaaatggagtagatttagtgggcaaatcccaagaggaagttgtttcgctgttgagaagcaccaagatggaaggaactgtgagccttctggtctttcgccaggaagacgccttccacccaagggaactgaaagcagaagatgaggatattgttcttacacctgatggcaccagggaatttctgacatttgaagtcccacttaatgattcaggatctgcaggccttggtgtcagtgtcaaaggtaaccggtcaaaagagaaccacgcagatttgggaatctttgtcaagtccattattaatggaggagcagcatctaaagatggaaggcttcgggtgaatgatcaactgatagcagtaaatggagaatccctgttgggcaagacaaaccaagatgccatggaaaccctaagaaggtctatgtctactgaaggcaataaacgaggaatgatccagcttattgttgcaaggagaataagcaagtgcaatgagctgaagtcacctgggagcccccctggacctgagctgcccattgaaacagcgttggatgatagagaacgaagaatttcccattccctctacagtgggattgaggggcttgatgaatcgcccagcagaaatgctgccctcagtaggataatgggtaaataccagctgtcccctacagtgaatatgccccaagatgacactgtcattatagaagatgacaggttgccagtgcttcctccacatctctctgaccagtcctcttccagctcccatgatgatgtggggtttgtgacggcagatgctggtacttgggccaaggctgcaatcagtgattcagccgactgctctttgagtccagatgttgatccagttcttgcttttcaacgagaaggatttggacgtcagatagctgacgagactaaactcaatacagtggatgaccagaaagcaggttctcccagcagagatgtgggtccttccctgggtctgaagaagtcaagctcgttggagagtctgcagaccgcagttgccgaggtgactttgaatggggatattcctttccatcgtccacggccgcggataatcagaggcaggggatgcaatgagagcttcagagctgccatcgacaaatcttatgataaacccgcggtagatgatgatgatgaaggcatggagaccttggaagaagacacagaagaaagttcaagatcagggagagagtctgtatccacagccagtgatcagccttcccactctctggagagacaaatgaatggaaaccaagagaaaggtgataagactgatagaaaaaaggataaaactggaaaagaaaagaagaaagatagagataaggagaaggataaaatgaaagccaagaagggaatgctgaagggcttgggagacatgttcaggtttggcaaacatcgaaaagatgacaagattgagaaaacgggtaaaataaaaatacaggaatcctttacatcagaagaggagaggatacgaatgaagcaggagcaggagaggattcaagccaaaactcgagaatttagggaacgacaagctcgagagcgtgactatgctgaaattcaagattttcatcggacatttggctgtgatgatgagttaatgtatgggggagtttcttcttatgaaggttccatggctctcaacgctagacctcagagcccacgagaagggcatatgatggatgctttgtatgcccaagtcaagaagccgcggaattccaaaccctcacctgtagacagtaacagatcaactcctagcaatcatgatcggatacagcgtctgaggcaagaatttcagcaagcaaagcaagatgaagatgtagaagatcgtcggcggacctatagttttgagcaaccctggccgaacgcacggccggcgacgcagagcgggcgacactcggtgtccgtggaggtgcagatgcagcggcagcggcaggaggagcgcgagagctcccagcaggcccagcgccagtacagctctctgcctcggcaaagcaggaaaaatgccagctcggtctcccaggactcttgggagcagaactactcccctggggaaggcttccagagtgccaaagagaaccccaggtactccagctaccaaggctccaggaacggctacctgggaggacatggcttcaacgccagggtcatgctggaaactcaggagctccttcgccaggaacagaggcggaaggagcagcagatgaagaagcagcctccttccgaggggcccagcaactatgactcgtataagaaagtccaggaccccagttacgcccctcccaaggggcccttccggcaagatgtgcccccctccccttctcaggttgcgaggctgaacagacttcagactcctgagaaagggaggcccttctattcctgagcacgcaaataacggatgcttcatgtcgcgcaataaaagacattttcctatgaagacttgtattttgggagtttttttaaaacctcgatggtactatggagtatttctgttgttggtatcagtgcctttaagcggtgtaggcaaagaaatggaaggccttaatgtctttgccactatgtctcaagtgtctgtttcatggaaggatttcccaccctgtgacaatcatctgtttgaggtgttcatatgctctgcgcctctccacagtaccaggaatctcggccctactcatgagttgtccgcggcttggttgtaacatccctgcaccacttgcagtgacaaattcacctgaagtggaggatgacgtgcggccctgtttctccctctaagttctcttagctatgggatgacatcttagtctctggtggaggaaaagtgggcgacatacaccaaaaattggggctttctggtacttcacagcacagccatttgtcgtactttgtcatcactgtggttttctctttcctttctcagctctttgtgacgggagagtcggtcatcctattacagaagctaagccatagtccaacattgtttggtcaccatgggggtccttttgtaactgccttatgactcaacattaccaataaagtgatgatcctggtctgcgtttatacatacgcttgttcggtcctgttcctgacacgtgggttgagtcaccacagctctgtgtggggaacgtgggagacaggagtggctcctgccgggggaagctgggcctgccattggccctgtgtctatcatgaggggagagctaagaaagaaattctcctaggaagagctcatggcccagtacatcctagtaattattttaattagtttttgttctgacagcttgtcaggaagggcacagaatgggacagagataaaccagacagtcattttgatctgctctctacggtttttcaagtcagaggcaattgatgcttgtctaatgcatccacacactgcatgtctgactggcgatgccgcgctcctaagtagttctgccatgaaacataaaagacaaaggaaaagccgttacacatcacacagagaacattttcgggtcccacagcggtggtggcaggaagctcactctcgcgtcagtattagagtgtgtgtgtgggtctcggggatctcggtggctcccatcttccttcattgttctgaacatcctgtattgtaaaccatggctggggtgctaaagtgcctgtgaatcccgatgtggaaaaagctggaggtgaaagctcagcataccatgtatttactttaaaaacagaaaaaaagacatgtatggatatgtctattttttttttattggcacattgtatttttgtgttgacttgtttttagaaatgatgtgtccacacacgtacccgtgtctcttctgcatttctgtgtcatggttctgtttcttaatcacgtgcggcggtgtctaagtggtgttaccagtgtacgcgcagtgaccttggatgacagtggctctttctcacagcctcccctgagctgtgagaaacagctttctctgtacatatgcaactcctaataaaaggcatatttcttcctgtt

SEQ ID NO: 21613 - DNA, 799 bp, Homo sapiens
  source 1..799: mol_type = unassigned DNA
gcagagccaagccagatgcagattccaaaagaaacgaaagcagaagatgaggatattgttcttacacctgatggcaccagggaatttctgacatttgaagtcccacttaatgattcaggatctgcaggccttggtgtcagtgtcaaaggtaaccggtcaaaagagaaccacgcagatttgggaatctttgtcaagtccattattaatggaggagcagcatctaaagatggaaggcttcgggtgaatgatcaactgatagcagtaaatggagaatccctgttgggcaagacaaaccaagatgccatggaaaccctaagaaggtctatgtctactgaaggcaataaacgaggaatgatccagcttattgttgcaaggagaataagcaagtgcaatgagctgaagtcacctgggagcccccctggacctgagctgcccattgaaacagcgttggatgatagagaacgaagaatttcccattccctctacagtgggattgaggggcttgatgaatcgcccagcagaaatgctgccctcagtaggataatgggaacataggacttgccatactgaatcagaccattggtccaccagttcctgtaacctgcgtcctgcctccaatccctgatgcttcagaggaaggcgaaaaactaaaactaaaactcaaaccaaaaaaatccctaaattcagctagtgaccttttgaaatgctgtatatatgagttgaagagtcattcattttcttcctagtctgttgccccgattttgttagctacagcttcattagtcctcttcggtttgca

SEQ ID NO: 21614 - DNA, 3420 bp, Homo sapiens
  source 1..3420: mol_type = unassigned DNA
gcggccccgagcgagcgccagcgccacacagccccgggcagccgccggcgagcgcgccgcgacgccgaacaggtggccggaggctgcgggcgccgcggcggggagaggcgaggcaagccccgggcgaagcgaggcgaggcgagggcggccgggccgggcatgcgagctgagcggccccccggcgtcgccgccgcctgcccgcgcccctagccgcccgcgcgcccgagtccccagcggctcctccgcgcccagcgtcctcggtcccggcctcggctgctccggctgcgctcggcgaggggcgcgggcccgcccgcggcggcggcggcatgaaagtgaccgtgtgcttcggacggacccgggtggtcgtgccgtgcggggacggccacatgaaagttttcagcctcatccagcaggcggtgacccgctaccggaaggccatcgccaaggatccaaactactggatacaggtgcatcgcttggaacatggagatggaggaatactagaccttgatgacattctttgtgatgtagcagacgataaagacagactggtagcagtgtttgatgagcaggatccacatcacggaggtgatggcaccagtgccagttccacgggtacccagagcccagagatatttggtagtgagcttggcaccaacaatgtctcagcctttcagccttaccaagcaacaagtgaaattgaggtcacaccttcagtccttcgagcaaatatgcctcttcatgttcgacgcagtagtgacccagctctaattggcctctccacttctgtcagtgatagtaatttttcctctgaagagccttcaaggaaaaatcccacacgctggtcaacaacagctggcttcctcaagcagaacactgctgggagtcctaaaacctgcgacaggaagaaagatgaaaactacagaagcctcccgcgggatactagtaactggtctaaccaatttcagagagacaatgctcgctcgtctctgagtgccagtcacccaatggtgggcaagtggctggagaaacaagaacaggatgaggatgggacagaagaggataacagtcgtgttgaacctgttggacatgctgacacgggtttggagcatatacccaacttttctctggatgatatggtaaagctcgtagaagtccccaacgatggagggcctctgggaatccacgtagtgcctttcagtgctcgaggcggcagaaccctggggttattagtaaaacgattggagaaaggtggtaaagctgaacatgaaaatctttttcgtgagaatgattgcattgtcaggattaatgatggcgaccttcgaaatagaagatttgaacaagcacaacatatgtttcgccaagccatgcgtacacccatcatttggttccatgtggttcctgcagcaaataaagagcagtatgaacaactatcccaaagtgagaagaacaattactattcaagccgttttagccctgacagccagtatattgacaacaggagtgtgaacagtgcagggcttcacacggtgcagagagcaccccgactgaaccacccgcctgagcagatagactctcactcaagactacctcatagcgcacacccctcgggaaaaccaccatccgctccagcctcggcacctcagaatgtatttagtacgactgtaagcagtggttataacaccaaaaaaataggcaagaggcttaatatccagcttaagaaaggtacagaaggtttgggattcagcatcacttccagagatgtaacaataggtggctcagctccaatctatgtgaaaaacattctcccccggggggcggccattcaggatggccgacttaaggcaggagacagacttatagaggtaaatggagtagatttagtgggcaaatcccaagaggaagttgtttcgctgttgagaagcaccaagatggaaggaactgtgagccttctggtctttcgccaggaagacgccttccacccaagggaactgaatgcagagccaagccagatgcagattccaaaagaaacgaaagcagaagatgaggatattgttcttacacctgatggcaccagggaatttctgacatttgaagtcccacttaatgattcaggatctgcaggccttggtgtcagtgtcaaaggtaaccggtcaaaagagaaccacgcagatttgggaatctttgtcaagtccattattaatggaggagcagcatctaaagatggaaggcttcgggtgaatgatcaactgatagcagtaaatggagaatccctgttgggcaagacaaaccaagatgccatggaaaccctaagaaggtctatgtctactgaaggcaataaacgaggaatgatccagcttattgttgcaaggagaataagcaagtgcaatgagctgaagtcacctgggagcccccctggacctgagctgcccattgaaacagcgttggatgatagagaacgaagaatttcccattccctctacagtgggattgaggggcttgatgaatcgcccagcagaaatgctgccctcagtaggataatgggtaaataccagctgtcccctacagtgaatatgccccaagatgacactgtcattatagaagatgacaggttgccagtgcttcctccacatctctctgaccagtcctcttccagctcccatgatgatgtggggtttgtgacggcagatgctggtacttgggccaaggctgcaatcagtgattcagccgactgctctttgagtccagatgttgatccagttcttgcttttcaacgagaaggatttggacgtcagatagctgacgagactaaactcaatacagtggatgaccagaaagcaggttctcccagcagagatgtgggtccttccctgggtctgaagaagtcaagctcgttggagagtctgcagaccgcagttgccgaggtgactttgaatggggatattcctttccatcgtccacggccgcggataatcagaggcaggggatgcaatgagagcttcagagctgccatcgacaaatcttatgataaacccgcggtagatgatgatgatgaaggcatggagaccttggaagaagacacagaagaaagttcaagatcagggagagagtctgtatccacagccagtgatcagccttcccactctctggagagacaaatgaatggaaaccaagagaaaggtgataagactgatagaaaaaaggataaaactggaaaagaaaagaagaaagatagagataaggagaaggataaaatgaaagccaagaagggaatgctgaagggcttgggagacatgttcagccttgccaaactgaagcccgagaagagatgaacaacaaagcgattcaaaacatgtcttgaacagcacatattgcacagttgttgttttttttaaacaaacaataaatttacttttaatg

SEQ ID NO: 21615 - DNA, 3389 bp, Homo sapiens
  source 1..3389: mol_type = unassigned DNA
gcggccccgagcgagcgccagcgccacacagccccgggcagccgccggcgagcgcgccgcgacgccgaacaggtggccggaggctgcgggcgccgcggcggggagaggcgaggcaagccccgggcgaagcgaggcgaggcgagggcggccgggccgggcatgcgagctgagcggccccccggcgtcgccgccgcctgcccgcgcccctagccgcccgcgcgcccgagtccccagcggctcctccgcgcccagcgtcctcggtcccggcctcggctgctccggctgcgctcggcgaggggcgcgggcccgcccgcggcggcggcggcatgaaagtgaccgtgtgcttcggacggacccgggtggtcgtgccgtgcggggacggccacatgaaagttttcagcctcatccagcaggcggtgacccgctaccggaaggccatcgccaaggatccaaactactggatacaggtgcatcgcttggaacatggagatggaggaatactagaccttgatgacattctttgtgatgtagcagacgataaagacagactggtagcagtgtttgatgagcaggatccacatcacggaggtgatggcaccagtgccagttccacgggtacccagagcccagagatatttggtagtgagcttggcaccaacaatgtctcagcctttcagccttaccaagcaacaagtgaaattgaggtcacaccttcagtccttcgagcaaatatgcctcttcatgttcgacgcagtagtgacccagctctaattggcctctccacttctgtcagtgatagtaatttttcctctgaagagccttcaaggaaaaatcccacacgctggtcaacaacagctggcttcctcaagcagaacactgctgggagtcctaaaacctgcgacaggaagaaagatgaaaactacagaagcctcccgcgggatactagtaactggtctaaccaatttcagagagacaatgctcgctcgtctctgagtgccagtcacccaatggtgggcaagtggctggagaaacaagaacaggatgaggatgggacagaagaggataacagtcgtgttgaacctgttggacatgctgacacgggtttggagcatatacccaacttttctctggatgatatggtaaagctcgtagaagtccccaacgatggagggcctctgggaatccacgtagtgcctttcagtgctcgaggcggcagaaccctggggttattagtaaaacgattggagaaaggtggtaaagctgaacatgaaaatctttttcgtgagaatgattgcattgtcaggattaatgatggcgaccttcgaaatagaagatttgaacaagcacaacatatgtttcgccaagccatgcgtacacccatcatttggttccatgtggttcctgcagcaaataaagagcagtatgaacaactatcccaaagtgagaagaacaattactattcaagccgttttagccctgacagccagtatattgacaacaggagtgtgaacagtgcagggcttcacacggtgcagagagcaccccgactgaaccacccgcctgagcagatagactctcactcaagactacctcatagcgcacacccctcgggaaaaccaccatccgctccagcctcggcacctcagaatgtatttagtacgactgtaagcagtggttataacaccaaaaaaataggcaagaggcttaatatccagcttaagaaaggtacagaaggtttgggattcagcatcacttccagagatgtaacaataggtggctcagctccaatctatgtgaaaaacattctcccccggggggcggccattcaggatggccgacttaaggcaggagacagacttatagaggtaaatggagtagatttagtgggcaaatcccaagaggaagttgtttcgctgttgagaagcaccaagatggaaggaactgtgagccttctggtctttcgccaggaagacgccttccacccaagggaactgaaagcagaagatgaggatattgttcttacacctgatggcaccagggaatttctgacatttgaagtcccacttaatgattcaggatctgcaggccttggtgtcagtgtcaaaggtaaccggtcaaaagagaaccacgcagatttgggaatctttgtcaagtccattattaatggaggagcagcatctaaagatggaaggcttcgggtgaatgatcaactgatagcagtaaatggagaatccctgttgggcaagacaaaccaagatgccatggaaaccctaagaaggtctatgtctactgaaggcaataaacgaggaatgatccagcttattgttgcaaggagaataagcaagtgcaatgagctgaagtcacctgggagcccccctggacctgagctgcccattgaaacagcgttggatgatagagaacgaagaatttcccattccctctacagtgggattgaggggcttgatgaatcgcccagcagaaatgctgccctcagtaggataatgggtaaataccagctgtcccctacagtgaatatgccccaagatgacactgtcattatagaagatgacaggttgccagtgcttcctccacatctctctgaccagtcctcttccagctcccatgatgatgtggggtttgtgacggcagatgctggtacttgggccaaggctgcaatcagtgattcagccgactgctctttgagtccagatgttgatccagttcttgcttttcaacgagaaggatttggacgtcagatagctgacgagactaaactcaatacagtggatgaccagaaagcaggttctcccagcagagatgtgggtccttccctgggtctgaagaagtcaagctcgttggagagtctgcagaccgcagttgccgaggtgactttgaatggggatattcctttccatcgtccacggccgcggataatcagaggcaggggatgcaatgagagcttcagagctgccatcgacaaatcttatgataaacccgcggtagatgatgatgatgaaggcatggagaccttggaagaagacacagaagaaagttcaagatcagggagagagtctgtatccacagccagtgatcagccttcccactctctggagagacaaatgaatggaaaccaagagaaaggtgataagactgatagaaaaaaggataaaactggaaaagaaaagaagaaagatagagataaggagaaggataaaatgaaagccaagaagggaatgctgaagggcttgggagacatgttcagccttgccaaactgaagcccgagaagagatgaacaacaaagcgattcaaaacatgtcttgaacagcacatattgcacagttgttgttttttttaaacaaacaataaatttacttttaatgaattctta

SEQ ID NO: 21616 - DNA, 5996 bp, Homo sapiens
  source 1..5996: mol_type = unassigned DNA
gcggccccgagcgagcgccagcgccacacagccccgggcagccgccggcgagcgcgccgcgacgccgaacaggtggccggaggctgcgggcgccgcggcggggagaggcgaggcaagccccgggcgaagcgaggcgaggcgagggcggccgggccgggcatgcgagctgagcggccccccggcgtcgccgccgcctgcccgcgcccctagccgcccgcgcgcccgagtccccagcggctcctccgcgcccagcgtcctcggtcccggcctcggctgctccggctgcgctcggcgaggggcgcgggcccgcccgcggcggcggcggcatgaaagtgaccgtgtgcttcggacggacccgggtggtcgtgccgtgcggggacggccacatgaaagttttcagcctcatccagcaggcggtgacccgctaccggaaggccatcgccaaggatccaaactactggatacaggtgcatcgcttggaacatggagatggaggaatactagaccttgatgacattctttgtgatgtagcagacgataaagacagactggtagcagtgtttgatgagcaggatccacatcacggaggtgatggcaccagtgccagttccacgggtacccagagcccagagatatttggtagtgagcttggcaccaacaatgtctcagcctttcagccttaccaagcaacaagtgaaattgaggtcacaccttcagtccttcgagcaaatatgcctcttcatgttcgacgcagtagtgacccagctctaattggcctctccacttctgtcagtgatagtaatttttcctctgaagagccttcaaggaaaaatcccacacgctggtcaacaacagctggcttcctcaagcagaacactgctgggagtcctaaaacctgcgacaggaagaaagatgaaaactacagaagcctcccgcgggatactagtaactggtctaaccaatttcagagagacaatgctcgctcgtctctgagtgccagtcacccaatggtgggcaagtggctggagaaacaagaacaggatgaggatgggacagaagaggataacagtcgtgttgaacctgttggacatgctgacacgggtttggagcatatacccaacttttctctggatgatatggtaaagctcgtagaagtccccaacgatggagggcctctgggaatccacgtagtgcctttcagtgctcgaggcggcagaaccctggggttattagtaaaacgattggagaaaggtggtaaagctgaacatgaaaatctttttcgtgagaatgattgcattgtcaggattaatgatggcgaccttcgaaatagaagatttgaacaagcacaacatatgtttcgccaagccatgcgtacacccatcatttggttccatgtggttcctgcagcaaataaagagcagtatgaacaactatcccaaagtgagaagaacaattactattcaagccgttttagccctgacagccagtatattgacaacaggagtgtgaacagtgcagggcttcacacggtgcagagagcaccccgactgaaccacccgcctgagcagatagactctcactcaagactacctcatagcgcacacccctcgggaaaaccaccatccgctccagcctcggcacctcagaatgtatttagtacgactgtaagcagtggttataacaccaaaaaaataggcaagaggcttaatatccagcttaagaaaggtacagaaggtttgggattcagcatcacttccagagatgtaacaataggtggctcagctccaatctatgtgaaaaacattctcccccggggggcggccattcaggatggccgacttaaggcaggagacagacttatagaggtaaatggagtagatttagtgggcaaatcccaagaggaagttgtttcgctgttgagaagcaccaagatggaaggaactgtgagccttctggtctttcgccaggaagacgccttccacccaagggaactgaatgcagagccaagccagatgcagattccaaaagaaacgaaagcagaagatgaggatattgttcttacacctgatggcaccagggaatttctgacatttgaagtcccacttaatgattcaggatctgcaggccttggtgtcagtgtcaaaggtaaccggtcaaaagagaaccacgcagatttgggaatctttgtcaagtccattattaatggaggagcagcatctaaagatggaaggcttcgggtgaatgatcaactgatagcagtaaatggagaatccctgttgggcaagacaaaccaagatgccatggaaaccctaagaaggtctatgtctactgaaggcaataaacgaggaatgatccagcttattgttgcaaggagaataagcaagtgcaatgagctgaagtcacctgggagcccccctggacctgagctgcccattgaaacagcgttggatgatagagaacgaagaatttcccattccctctacagtgggattgaggggcttgatgaatcgcccagcagaaatgctgccctcagtaggataatgggtaaataccagctgtcccctacagtgaatatgccccaagatgacactgtcattatagaagatgacaggttgccagtgcttcctccacatctctctgaccagtcctcttccagctcccatgatgatgtggggtttgtgacggcagatgctggtacttgggccaaggctgcaatcagtgattcagccgactgctctttgagtccagatgttgatccagttcttgcttttcaacgagaaggatttggacgtcagagtatgtcagaaaaacgcacaaagcaattttcagatgccagtcaattggatttcgttaaaacacgaaaatcaaaaagcatggatttaggtatagctgacgagactaaactcaatacagtggatgaccagaaagcaggttctcccagcagagatgtgggtccttccctgggtctgaagaagtcaagctcgttggagagtctgcagaccgcagttgccgaggtgactttgaatggggatattcctttccatcgtccacggccgcggataatcagaggcaggggatgcaatgagagcttcagagctgccatcgacaaatcttatgataaacccgcggtagatgatgatgatgaaggcatggagaccttggaagaagacacagaagaaagttcaagatcagggagagagtctgtatccacagccagtgatcagccttcccactctctggagagacaaatgaatggaaaccaagagaaaggtgataagactgatagaaaaaaggataaaactggaaaagaaaagaagaaagatagagataaggagaaggataaaatgaaagccaagaagggaatgctgaagggcttgggagacatgttcaggtttggcaaacatcgaaaagatgacaagattgagaaaacgggtaaaataaaaatacaggaatcctttacatcagaagaggagaggatacgaatgaagcaggagcaggagaggattcaagccaaaactcgagaatttagggaacgacaagctcgagagcgtgactatgctgaaattcaagattttcatcggacatttggctgtgatgatgagttaatgtatgggggagtttcttcttatgaaggttccatggctctcaacgctagacctcagagcccacgagaagggcatatgatggatgctttgtatgcccaagtcaagaagccgcggaattccaaaccctcacctgtagacagtaacagatcaactcctagcaatcatgatcggatacagcgtctgaggcaagaatttcagcaagcaaagcaagatgaagatgtagaagatcgtcggcggacctatagttttgagcaaccctggccgaacgcacggccggcgacgcagagcgggcgacactcggtgtccgtggaggtgcagatgcagcggcagcggcaggaggagcgcgagagctcccagcaggcccagcgccagtacagctctctgcctcggcaaagcaggaaaaatgccagctcggtctcccaggactcttgggagcagaactactcccctggggaaggcttccagagtgccaaagagaaccccaggtactccagctaccaaggctccaggaacggctacctgggaggacatggcttcaacgccagggtcatgctggaaactcaggagctccttcgccaggaacagaggcggaaggagcagcagatgaagaagcagcctccttccgaggggcccagcaactatgactcgtataagaaagtccaggaccccagttacgcccctcccaaggggcccttccggcaagatgtgcccccctccccttctcaggttgcgaggctgaacagacttcagactcctgagaaagggaggcccttctattcctgagcacgcaaataacggatgcttcatgtcgcgcaataaaagacattttcctatgaagacttgtattttgggagtttttttaaaacctcgatggtactatggagtatttctgttgttggtatcagtgcctttaagcggtgtaggcaaagaaatggaaggccttaatgtctttgccactatgtctcaagtgtctgtttcatggaaggatttcccaccctgtgacaatcatctgtttgaggtgttcatatgctctgcgcctctccacagtaccaggaatctcggccctactcatgagttgtccgcggcttggttgtaacatccctgcaccacttgcagtgacaaattcacctgaagtggaggatgacgtgcggccctgtttctccctctaagttctcttagctatgggatgacatcttagtctctggtggaggaaaagtgggcgacatacaccaaaaattggggctttctggtacttcacagcacagccatttgtcgtactttgtcatcactgtggttttctctttcctttctcagctctttgtgacgggagagtcggtcatcctattacagaagctaagccatagtccaacattgtttggtcaccatgggggtccttttgtaactgccttatgactcaacattaccaataaagtgatgatcctggtctgcgtttatacatacgcttgttcggtcctgttcctgacacgtgggttgagtcaccacagctctgtgtggggaacgtgggagacaggagtggctcctgccgggggaagctgggcctgccattggccctgtgtctatcatgaggggagagctaagaaagaaattctcctaggaagagctcatggcccagtacatcctagtaattattttaattagtttttgttctgacagcttgtcaggaagggcacagaatgggacagagataaaccagacagtcattttgatctgctctctacggtttttcaagtcagaggcaattgatgcttgtctaatgcatccacacactgcatgtctgactggcgatgccgcgctcctaagtagttctgccatgaaacataaaagacaaaggaaaagccgttacacatcacacagagaacattttcgggtcccacagcggtggtggcaggaagctcactctcgcgtcagtattagagtgtgtgtgtgggtctcggggatctcggtggctcccatcttccttcattgttctgaacatcctgtattgtaaaccatggctggggtgctaaagtgcctgtgaatcccgatgtggaaaaagctggaggtgaaagctcagcataccatgtatttactttaaaaacagaaaaaaagacatgtatggatatgtctattttttttttattggcacattgtatttttgtgttgacttgtttttagaaatgatgtgtccacacacgtacccgtgtctcttctgcatttctgtgtcatggttctgtttcttaatcacgtgcggcggtgtctaagtggtgttaccagtgtacgcgcagtgaccttggatgacagtggctctttctcacagcctcccctgagctgtgagaaacagctttctctgtacatatgcaactcctaataaaaggcatatttcttcctgtt

SEQ ID NO: 21617 - DNA, 6005 bp, Homo sapiens
  source 1..6005: mol_type = unassigned DNA
gcggccccgagcgagcgccagcgccacacagccccgggcagccgccggcgagcgcgccgcgacgccgaacaggtggccggaggctgcgggcgccgcggcggggagaggcgaggcaagccccgggcgaagcgaggcgaggcgagggcggccgggccgggcatgcgagctgagcggccccccggcgtcgccgccgcctgcccgcgcccctagccgcccgcgcgcccgagtccccagcggctcctccgcgcccagcgtcctcggtcccggcctcggctgctccggctgcgctcggcgaggggcgcgggcccgcccgcggcggcggcggcatgaaagtgaccgtgtgcttcggacggacccgggtggtcgtgccgtgcggggacggccacatgaaagttttcagcctcatccagcaggcggtgacccgctaccggaaggccatcgccaaggatccaaactactggatacaggtgcatcgcttggaacatggagatggaggaatactagaccttgatgacattctttgtgatgtagcagacgataaagacagactggtagcagtgtttgatgagcaggatccacatcacggaggtgatggcaccagtgccagttccacgggtacccagagcccagagatatttggtagtgagcttggcaccaacaatgtctcagcctttcagccttaccaagcaacaagtgaaattgaggtcacaccttcagtccttcgagcaaatatgcctcttcatgttcgacgcagtagtgacccagctctaattggcctctccacttctgtcagtgatagtaatttttcctctgaagagccttcaaggaaaaatcccacacgctggtcaacaacagctggcttcctcaagcagaacactgctgggagtcctaaaacctgcgacaggaagaaagatgaaaactacagaagcctcccgcgggatactagtaactggtctaaccaatttcagagagacaatgctcgctcgtctctgagtgccagtcacccaatggtgggcaagtggctggagaaacaagaacaggatgaggatgggacagaagaggataacagtcgtgttgaacctgttggacatgctgacacgggtttggagcatatacccaacttttctctggatgatatggtaaagctcgtagaagtccccaacgatggagggcctctgggaatccacgtagtgcctttcagtgctcgaggcggcagaaccctggggttattagtaaaacgattggagaaaggtggtaaagctgaacatgaaaatctttttcgtgagaatgattgcattgtcaggattaatgatggcgaccttcgaaatagaagatttgaacaagcacaacatatgtttcgccaagccatgcgtacacccatcatttggttccatgtggttcctgcagcaaataaagagcagtatgaacaactatcccaaagtgagaagaacaattactattcaagccgttttagccctgacagccagtatattgacaacaggagtgtgaacagtgcagggcttcacacggtgcagagagcaccccgactgaaccacccgcctgagcagatagactctcactcaagactacctcatagcgcacacccctcgggaaaaccaccatccgctccagcctcggcacctcagaatgtatttagtacgactgtaagcagtggttataacaccaaaaaaataggcaagaggcttaatatccagcttaagaaaggtacagaaggtttgggattcagcatcacttccagagatgtaacaataggtggctcagctccaatctatgtgaaaaacattctcccccggggggcggccattcaggatggccgacttaaggcaggagacagacttatagaggtaaatggagtagatttagtgggcaaatcccaagaggaagttgtttcgctgttgagaagcaccaagatggaaggaactgtgagccttctggtctttcgccaggaagacgccttccacccaagggaactgaatgcagagccaagccagatgcagattccaaaagaaacgaaagcagaagatgaggatattgttcttacacctgatggcaccagggaatttctgacatttgaagtcccacttaatgattcaggatctgcaggccttggtgtcagtgtcaaaggtaaccggtcaaaagagaaccacgcagatttgggaatctttgtcaagtccattattaatggaggagcagcatctaaagatggaaggcttcgggtgaatgatcaactgatagcagtaaatggagaatccctgttgggcaagacaaaccaagatgccatggaaaccctaagaaggtctatgtctactgaaggcaataaacgaggaatgatccagcttattgttgcaaggagaataagcaagtgcaatgagctgaagtcacctgggagcccccctggacctgagctgcccattgaaacagcgttggatgatagagaacgaagaatttcccattccctctacagtgggattgaggggcttgatgaatcgcccagcagaaatgctgccctcagtaggataatgggtgagtcaggtaaataccagctgtcccctacagtgaatatgccccaagatgacactgtcattatagaagatgacaggttgccagtgcttcctccacatctctctgaccagtcctcttccagctcccatgatgatgtggggtttgtgacggcagatgctggtacttgggccaaggctgcaatcagtgattcagccgactgctctttgagtccagatgttgatccagttcttgcttttcaacgagaaggatttggacgtcagagtatgtcagaaaaacgcacaaagcaattttcagatgccagtcaattggatttcgttaaaacacgaaaatcaaaaagcatggatttaggtatagctgacgagactaaactcaatacagtggatgaccagaaagcaggttctcccagcagagatgtgggtccttccctgggtctgaagaagtcaagctcgttggagagtctgcagaccgcagttgccgaggtgactttgaatggggatattcctttccatcgtccacggccgcggataatcagaggcaggggatgcaatgagagcttcagagctgccatcgacaaatcttatgataaacccgcggtagatgatgatgatgaaggcatggagaccttggaagaagacacagaagaaagttcaagatcagggagagagtctgtatccacagccagtgatcagccttcccactctctggagagacaaatgaatggaaaccaagagaaaggtgataagactgatagaaaaaaggataaaactggaaaagaaaagaagaaagatagagataaggagaaggataaaatgaaagccaagaagggaatgctgaagggcttgggagacatgttcaggtttggcaaacatcgaaaagatgacaagattgagaaaacgggtaaaataaaaatacaggaatcctttacatcagaagaggagaggatacgaatgaagcaggagcaggagaggattcaagccaaaactcgagaatttagggaacgacaagctcgagagcgtgactatgctgaaattcaagattttcatcggacatttggctgtgatgatgagttaatgtatgggggagtttcttcttatgaaggttccatggctctcaacgctagacctcagagcccacgagaagggcatatgatggatgctttgtatgcccaagtcaagaagccgcggaattccaaaccctcacctgtagacagtaacagatcaactcctagcaatcatgatcggatacagcgtctgaggcaagaatttcagcaagcaaagcaagatgaagatgtagaagatcgtcggcggacctatagttttgagcaaccctggccgaacgcacggccggcgacgcagagcgggcgacactcggtgtccgtggaggtgcagatgcagcggcagcggcaggaggagcgcgagagctcccagcaggcccagcgccagtacagctctctgcctcggcaaagcaggaaaaatgccagctcggtctcccaggactcttgggagcagaactactcccctggggaaggcttccagagtgccaaagagaaccccaggtactccagctaccaaggctccaggaacggctacctgggaggacatggcttcaacgccagggtcatgctggaaactcaggagctccttcgccaggaacagaggcggaaggagcagcagatgaagaagcagcctccttccgaggggcccagcaactatgactcgtataagaaagtccaggaccccagttacgcccctcccaaggggcccttccggcaagatgtgcccccctccccttctcaggttgcgaggctgaacagacttcagactcctgagaaagggaggcccttctattcctgagcacgcaaataacggatgcttcatgtcgcgcaataaaagacattttcctatgaagacttgtattttgggagtttttttaaaacctcgatggtactatggagtatttctgttgttggtatcagtgcctttaagcggtgtaggcaaagaaatggaaggccttaatgtctttgccactatgtctcaagtgtctgtttcatggaaggatttcccaccctgtgacaatcatctgtttgaggtgttcatatgctctgcgcctctccacagtaccaggaatctcggccctactcatgagttgtccgcggcttggttgtaacatccctgcaccacttgcagtgacaaattcacctgaagtggaggatgacgtgcggccctgtttctccctctaagttctcttagctatgggatgacatcttagtctctggtggaggaaaagtgggcgacatacaccaaaaattggggctttctggtacttcacagcacagccatttgtcgtactttgtcatcactgtggttttctctttcctttctcagctctttgtgacgggagagtcggtcatcctattacagaagctaagccatagtccaacattgtttggtcaccatgggggtccttttgtaactgccttatgactcaacattaccaataaagtgatgatcctggtctgcgtttatacatacgcttgttcggtcctgttcctgacacgtgggttgagtcaccacagctctgtgtggggaacgtgggagacaggagtggctcctgccgggggaagctgggcctgccattggccctgtgtctatcatgaggggagagctaagaaagaaattctcctaggaagagctcatggcccagtacatcctagtaattattttaattagtttttgttctgacagcttgtcaggaagggcacagaatgggacagagataaaccagacagtcattttgatctgctctctacggtttttcaagtcagaggcaattgatgcttgtctaatgcatccacacactgcatgtctgactggcgatgccgcgctcctaagtagttctgccatgaaacataaaagacaaaggaaaagccgttacacatcacacagagaacattttcgggtcccacagcggtggtggcaggaagctcactctcgcgtcagtattagagtgtgtgtgtgggtctcggggatctcggtggctcccatcttccttcattgttctgaacatcctgtattgtaaaccatggctggggtgctaaagtgcctgtgaatcccgatgtggaaaaagctggaggtgaaagctcagcataccatgtatttactttaaaaacagaaaaaaagacatgtatggatatgtctattttttttttattggcacattgtatttttgtgttgacttgtttttagaaatgatgtgtccacacacgtacccgtgtctcttctgcatttctgtgtcatggttctgtttcttaatcacgtgcggcggtgtctaagtggtgttaccagtgtacgcgcagtgaccttggatgacagtggctctttctcacagcctcccctgagctgtgagaaacagctttctctgtacatatgcaactcctaataaaaggcatatttcttcctgtt

SEQ ID NO: 21618 - DNA, 5825 bp, Homo sapiens
  source 1..5825: mol_type = unassigned DNA
gcggccccgagcgagcgccagcgccacacagccccgggcagccgccggcgagcgcgccgcgacgccgaacaggtggccggaggctgcgggcgccgcggcggggagaggcgaggcaagccccgggcgaagcgaggcgaggcgagggcggccgggccgggcatgcgagctgagcggccccccggcgtcgccgccgcctgcccgcgcccctagccgcccgcgcgcccgagtccccagcggctcctccgcgcccagcgtcctcggtcccggcctcggctgctccggctgcgctcggcgaggggcgcgggcccgcccgcggcggcggcggcatgaaagtgaccgtgtgcttcggacggacccgggtggtcgtgccgtgcggggacggccacatgaaagttttcagcctcatccagcaggcggtgacccgctaccggaaggccatcgccaaggatccaaactactggatacaggtgcatcgcttggaacatggagatggaggaatactagaccttgatgacattctttgtgatgtagcagacgataaagacagactggtagcagtgtttgatgagcaggatccacatcacggaggtgatggcaccagtgccagttccacgggtacccagagcccagagatatttggtagtgagcttggcaccaacaatgtctcagcctttcagccttaccaagcaacaagtgaaattgaggtcacaccttcagtccttcgagcaaatatgcctcttcatgttcgacgcagtagtgacccagctctaattggcctctccacttctgtcagtgatagtaatttttcctctgaagagccttcaaggaaaaatcccacacgctggtcaacaacagctggcttcctcaagcagaacactgctgggagtcctaaaacctgcgacaggaaggatgaggatgggacagaagaggataacagtcgtgttgaacctgttggacatgctgacacgggtttggagcatatacccaacttttctctggatgatatggtaaagctcgtagaagtccccaacgatggagggcctctgggaatccacgtagtgcctttcagtgctcgaggcggcagaaccctggggttattagtaaaacgattggagaaaggtggtaaagctgaacatgaaaatctttttcgtgagaatgattgcattgtcaggattaatgatggcgaccttcgaaatagaagatttgaacaagcacaacatatgtttcgccaagccatgcgtacacccatcatttggttccatgtggttcctgcagcaaataaagagcagtatgaacaactatcccaaagtgagaagaacaattactattcaagccgttttagccctgacagccagtatattgacaacaggagtgtgaacagtgcagggcttcacacggtgcagagagcaccccgactgaaccacccgcctgagcagatagactctcactcaagactacctcatagcgcacacccctcgggaaaaccaccatccgctccagcctcggcacctcagaatgtatttagtacgactgtaagcagtggttataacaccaaaaaaataggcaagaggcttaatatccagcttaagaaaggtacagaaggtttgggattcagcatcacttccagagatgtaacaataggtggctcagctccaatctatgtgaaaaacattctcccccggggggcggccattcaggatggccgacttaaggcaggagacagacttatagaggtaaatggagtagatttagtgggcaaatcccaagaggaagttgtttcgctgttgagaagcaccaagatggaaggaactgtgagccttctggtctttcgccaggaagacgccttccacccaagggaactgaaagcagaagatgaggatattgttcttacacctgatggcaccagggaatttctgacatttgaagtcccacttaatgattcaggatctgcaggccttggtgtcagtgtcaaaggtaaccggtcaaaagagaaccacgcagatttgggaatctttgtcaagtccattattaatggaggagcagcatctaaagatggaaggcttcgggtgaatgatcaactgatagcagtaaatggagaatccctgttgggcaagacaaaccaagatgccatggaaaccctaagaaggtctatgtctactgaaggcaataaacgaggaatgatccagcttattgttgcaaggagaataagcaagtgcaatgagctgaagtcacctgggagcccccctggacctgagctgcccattgaaacagcgttggatgatagagaacgaagaatttcccattccctctacagtgggattgaggggcttgatgaatcgcccagcagaaatgctgccctcagtaggataatgggtaaataccagctgtcccctacagtgaatatgccccaagatgacactgtcattatagaagatgacaggttgccagtgcttcctccacatctctctgaccagtcctcttccagctcccatgatgatgtggggtttgtgacggcagatgctggtacttgggccaaggctgcaatcagtgattcagccgactgctctttgagtccagatgttgatccagttcttgcttttcaacgagaaggatttggacgtcagagtatgtcagaaaaacgcacaaagcaattttcagatgccagtcaattggatttcgttaaaacacgaaaatcaaaaagcatggatttaggtatagctgacgagactaaactcaatacagtggatgaccagaaagcaggttctcccagcagagatgtgggtccttccctgggtctgaagaagtcaagctcgttggagagtctgcagaccgcagttgccgaggtgactttgaatggggatattcctttccatcgtccacggccgcggataatcagaggcaggggatgcaatgagagcttcagagctgccatcgacaaatcttatgataaacccgcggtagatgatgatgatgaaggcatggagaccttggaagaagacacagaagaaagttcaagatcagggagagagtctgtatccacagccagtgatcagccttcccactctctggagagacaaatgaatggaaaccaagagaaaggtgataagactgatagaaaaaaggataaaactggaaaagaaaagaagaaagatagagataaggagaaggataaaatgaaagccaagaagggaatgctgaagggcttgggagacatgttcaggtttggcaaacatcgaaaagatgacaagattgagaaaacgggtaaaataaaaatacaggaatcctttacatcagaagaggagaggatacgaatgaagcaggagcaggagaggattcaagccaaaactcgagaatttagggaacgacaagctcgagagcgtgactatgctgaaattcaagattttcatcggacatttggctgtgatgatgagttaatgtatgggggagtttcttcttatgaaggttccatggctctcaacgctagacctcagagcccacgagaagggcatatgatggatgctttgtatgcccaagtcaagaagccgcggaattccaaaccctcacctgtagacagtaacagatcaactcctagcaatcatgatcggatacagcgtctgaggcaagaatttcagcaagcaaagcaagatgaagatgtagaagatcgtcggcggacctatagttttgagcaaccctggccgaacgcacggccggcgacgcagagcgggcgacactcggtgtccgtggaggtgcagatgcagcggcagcggcaggaggagcgcgagagctcccagcaggcccagcgccagtacagctctctgcctcggcaaagcaggaaaaatgccagctcggtctcccaggactcttgggagcagaactactcccctggggaaggcttccagagtgccaaagagaaccccaggtactccagctaccaaggctccaggaacggctacctgggaggacatggcttcaacgccagggtcatgctggaaactcaggagctccttcgccaggaacagaggcggaaggagcagcagatgaagaagcagcctccttccgaggggcccagcaactatgactcgtataagaaagtccaggaccccagttacgcccctcccaaggggcccttccggcaagatgtgcccccctccccttctcaggttgcgaggctgaacagacttcagactcctgagaaagggaggcccttctattcctgagcacgcaaataacggatgcttcatgtcgcgcaataaaagacattttcctatgaagacttgtattttgggagtttttttaaaacctcgatggtactatggagtatttctgttgttggtatcagtgcctttaagcggtgtaggcaaagaaatggaaggccttaatgtctttgccactatgtctcaagtgtctgtttcatggaaggatttcccaccctgtgacaatcatctgtttgaggtgttcatatgctctgcgcctctccacagtaccaggaatctcggccctactcatgagttgtccgcggcttggttgtaacatccctgcaccacttgcagtgacaaattcacctgaagtggaggatgacgtgcggccctgtttctccctctaagttctcttagctatgggatgacatcttagtctctggtggaggaaaagtgggcgacatacaccaaaaattggggctttctggtacttcacagcacagccatttgtcgtactttgtcatcactgtggttttctctttcctttctcagctctttgtgacgggagagtcggtcatcctattacagaagctaagccatagtccaacattgtttggtcaccatgggggtccttttgtaactgccttatgactcaacattaccaataaagtgatgatcctggtctgcgtttatacatacgcttgttcggtcctgttcctgacacgtgggttgagtcaccacagctctgtgtggggaacgtgggagacaggagtggctcctgccgggggaagctgggcctgccattggccctgtgtctatcatgaggggagagctaagaaagaaattctcctaggaagagctcatggcccagtacatcctagtaattattttaattagtttttgttctgacagcttgtcaggaagggcacagaatgggacagagataaaccagacagtcattttgatctgctctctacggtttttcaagtcagaggcaattgatgcttgtctaatgcatccacacactgcatgtctgactggcgatgccgcgctcctaagtagttctgccatgaaacataaaagacaaaggaaaagccgttacacatcacacagagaacattttcgggtcccacagcggtggtggcaggaagctcactctcgcgtcagtattagagtgtgtgtgtgggtctcggggatctcggtggctcccatcttccttcattgttctgaacatcctgtattgtaaaccatggctggggtgctaaagtgcctgtgaatcccgatgtggaaaaagctggaggtgaaagctcagcataccatgtatttactttaaaaacagaaaaaaagacatgtatggatatgtctattttttttttattggcacattgtatttttgtgttgacttgtttttagaaatgatgtgtccacacacgtacccgtgtctcttctgcatttctgtgtcatggttctgtttcttaatcacgtgcggcggtgtctaagtggtgttaccagtgtacgcgcagtgaccttggatgacagtggctctttctcacagcctcccctgagctgtgagaaacagctttctctgtacatatgcaactcctaataaaaggcatatttcttcctgtt

SEQ ID NO: 21619 - DNA, 5669 bp, Homo sapiens
  source 1..5669: mol_type = unassigned DNA
gcggccccgagcgagcgccagcgccacacagccccgggcagccgccggcgagcgcgccgcgacgccgaacaggtggccggaggctgcgggcgccgcggcggggagaggcgaggcaagccccgggcgaagcgaggcgaggcgagggcggccgggccgggcatgcgagctgagcggccccccggcgtcgccgccgcctgcccgcgcccctagccgcccgcgcgcccgagtccccagcggctcctccgcgcccagcgtcctcggtcccggcctcggctgctccggctgcgctcggcgaggggcgcgggcccgcccgcggcggcggcggcatgaaagtgaccgtgtgcttcggacggacccgggtggtcgtgccgtgcggggacggccacatgaaagttttcagcctcatccagcaggcggtgacccgctaccggaaggccatcgccaaggatccaaactactggatacaggtgcatcgcttggaacatggagatggaggaatactagaccttgatgacattctttgtgatgtagcagacgataaagacagactggtagcagtgtttgatgagcaggatccacatcacggaggtgatggcaccagtgccagttccacgggtacccagagcccagagatatttggtagtgagcttggcaccaacaatgtctcagcctttcagccttaccaagcaacaagtgaaattgaggtcacaccttcagtccttcgagcaaatatgcctcttcatgttcgacgcagtagtgacccagctctaattggcctctccacttctgtcagtgatagtaatttttcctctgaagagccttcaaggaaaaatcccacacgctggtcaacaacagctggcttcctcaagcagaacactgctgggagtcctaaaacctgcgacaggaaggatgaggatgggacagaagaggataacagtcgtgttgaacctgttggacatgctgacacgggtttggagcatatacccaacttttctctggatgatatggtaaagctcgtagaagtccccaacgatggagggcctctgggaatccacgtagtgcctttcagtgctcgaggcggcagaaccctggggttattagtaaaacgattggagaaaggtggtaaagctgaacatgaaaatctttttcgtgagaatgattgcattgtcaggattaatgatggcgaccttcgaaatagaagatttgaacaagcacaacatatgtttcgccaagccatgcgtacacccatcatttggttccatgtggttcctgcagcaaataaagagcagtatgaacaactatcccaaagtgagaagaacaattactattcaagccgttttagccctgacagccagtatattgacaacaggagtgtgaacagtgcagggcttcacacggtgcagagagcaccccgactgaaccacccgcctgagcagatagactctcactcaagactacctcatagcgcacacccctcgggaaaaccaccatccgctccagcctcggcacctcagaatgtatttagtacgactgtaagcagtggttataacaccaaaaaaataggcaagaggcttaatatccagcttaagaaaggtacagaaggtttgggattcagcatcacttccagagatgtaacaataggtggctcagctccaatctatgtgaaaaacattctcccccggggggcggccattcaggatggccgacttaaggcaggagacagacttatagaggtaaatggagtagatttagtgggcaaatcccaagaggaagttgtttcgctgttgagaagcaccaagatggaaggaactgtgagccttctggtctttcgccaggaagacgccttccacccaagggaactgaaagcagaagatgaggatattgttcttacacctgatggcaccagggaatttctgacatttgaagtcccacttaatgattcaggatctgcaggccttggtgtcagtgtcaaaggtaaccggtcaaaagagaaccacgcagatttgggaatctttgtcaagtccattattaatggaggagcagcatctaaagatggaaggcttcgggtgaatgatcaactgatagcagtaaatggagaatccctgttgggcaagacaaaccaagatgccatggaaaccctaagaaggtctatgtctactgaaggcaataaacgaggaatgatccagcttattgttgcaaggagaataagcaagtgcaatgagctgaagtcacctgggagcccccctggacctgagctgcccattgaaacagcgttggatgatagagaacgaagaatttcccattccctctacagtgggattgaggggcttgatgaatcgcccagcagaaatgctgccctcagtaggataatgggtaaataccagctgtcccctacagtgaatatgccccaagatgacactgtcattatagaagatgacaggttgccagtgcttcctccacatctctctgaccagtcctcttccagctcccatgatgatgtggggtttgtgacggcagatgctggtacttgggccaaggctgcaatcagtgattcagccgactgctctttgagtccagatgttgatccagttcttgcttttcaacgagaaggatttggacgtcagagtatgtcagaaaaacgcacaaagcaattttcagatgccagtcaattggatttcgttaaaacacgaaaatcaaaaagcatggatttaggtagttctcccagcagagatgtgggtccttccctgggtctgaagaagtcaagctcgttggagagtctgcagaccgcagttgccgaggtgactttgaatggggatattcctttccatcgtccacggccgcggataatcagaggcaggggatgcaatgagagcttcagagctgccatcgacaaatcttatgataaacccgcggtagatgatgatgatgaaggcatggagaccttggaagaagacacagaagaaagttcaagatcagggagagagtctgtatccacagccagtgatcagccttcccactctctggagagacaaatgaatggaaaccaagagaaaggtgataagactgatagaaaaaaggataaaactggaaaagaaaagaagaaagatagagataaggagaaggataaaatgaaagccaagaagggaatgctgaagggcttgggagacatgttcaggattcaagccaaaactcgagaatttagggaacgacaagctcgagagcgtgactatgctgaaattcaagattttcatcggacatttggctgtgatgatgagttaatgtatgggggagtttcttcttatgaaggttccatggctctcaacgctagacctcagagcccacgagaagggcatatgatggatgctttgtatgcccaagtcaagaagccgcggaattccaaaccctcacctgtagacagtaacagatcaactcctagcaatcatgatcggatacagcgtctgaggcaagaatttcagcaagcaaagcaagatgaagatgtagaagatcgtcggcggacctatagttttgagcaaccctggccgaacgcacggccggcgacgcagagcgggcgacactcggtgtccgtggaggtgcagatgcagcggcagcggcaggaggagcgcgagagctcccagcaggcccagcgccagtacagctctctgcctcggcaaagcaggaaaaatgccagctcggtctcccaggactcttgggagcagaactactcccctggggaaggcttccagagtgccaaagagaaccccaggtactccagctaccaaggctccaggaacggctacctgggaggacatggcttcaacgccagggtcatgctggaaactcaggagctccttcgccaggaacagaggcggaaggagcagcagatgaagaagcagcctccttccgaggggcccagcaactatgactcgtataagaaagtccaggaccccagttacgcccctcccaaggggcccttccggcaagatgtgcccccctccccttctcaggttgcgaggctgaacagacttcagactcctgagaaagggaggcccttctattcctgagcacgcaaataacggatgcttcatgtcgcgcaataaaagacattttcctatgaagacttgtattttgggagtttttttaaaacctcgatggtactatggagtatttctgttgttggtatcagtgcctttaagcggtgtaggcaaagaaatggaaggccttaatgtctttgccactatgtctcaagtgtctgtttcatggaaggatttcccaccctgtgacaatcatctgtttgaggtgttcatatgctctgcgcctctccacagtaccaggaatctcggccctactcatgagttgtccgcggcttggttgtaacatccctgcaccacttgcagtgacaaattcacctgaagtggaggatgacgtgcggccctgtttctccctctaagttctcttagctatgggatgacatcttagtctctggtggaggaaaagtgggcgacatacaccaaaaattggggctttctggtacttcacagcacagccatttgtcgtactttgtcatcactgtggttttctctttcctttctcagctctttgtgacgggagagtcggtcatcctattacagaagctaagccatagtccaacattgtttggtcaccatgggggtccttttgtaactgccttatgactcaacattaccaataaagtgatgatcctggtctgcgtttatacatacgcttgttcggtcctgttcctgacacgtgggttgagtcaccacagctctgtgtggggaacgtgggagacaggagtggctcctgccgggggaagctgggcctgccattggccctgtgtctatcatgaggggagagctaagaaagaaattctcctaggaagagctcatggcccagtacatcctagtaattattttaattagtttttgttctgacagcttgtcaggaagggcacagaatgggacagagataaaccagacagtcattttgatctgctctctacggtttttcaagtcagaggcaattgatgcttgtctaatgcatccacacactgcatgtctgactggcgatgccgcgctcctaagtagttctgccatgaaacataaaagacaaaggaaaagccgttacacatcacacagagaacattttcgggtcccacagcggtggtggcaggaagctcactctcgcgtcagtattagagtgtgtgtgtgggtctcggggatctcggtggctcccatcttccttcattgttctgaacatcctgtattgtaaaccatggctggggtgctaaagtgcctgtgaatcccgatgtggaaaaagctggaggtgaaagctcagcataccatgtatttactttaaaaacagaaaaaaagacatgtatggatatgtctattttttttttattggcacattgtatttttgtgttgacttgtttttagaaatgatgtgtccacacacgtacccgtgtctcttctgcatttctgtgtcatggttctgtttcttaatcacgtgcggcggtgtctaagtggtgttaccagtgtacgcgcagtgaccttggatgacagtggctctttctcacagcctcccctgagctgtgagaaacagctttctctgtacatatgcaactcctaataaaaggcatatttcttcctgtt

SEQ ID NO: 21620 - DNA, 2475 bp, Homo sapiens
  source 1..2475: mol_type = unassigned DNA
cttttaactgtaacttattgaaggtctcctacatttttaacactgaggatgaggatgggacagaagaggataacagtcgtgttgaacctgttggacatgctgacacgggtttggagcatatacccaacttttctctggatgatatggtaaagctcgtagaagtccccaacgatggagggcctctgggaatccacgtagtgcctttcagtgctcgaggcggcagaaccctggggttattagtaaaacgattggagaaaggtggtaaagctgaacatgaaaatctttttcgtgagaatgattgcattgtcaggattaatgatggcgaccttcgaaatagaagatttgaacaagcacaacatatgtttcgccaagccatgcgtacacccatcatttggttccatgtggttcctgcagcaaataaagagcagtatgaacaactatcccaaagtgagaagaacaattactattcaagccgttttagccctgacagccagtatattgacaacaggagtgtgaacagtgcagggcttcacacggtgcagagagcaccccgactgaaccacccgcctgagcagatagactctcactcaagactacctcatagcgcacacccctcgggaaaaccaccatccgctccagcctcggcacctcagaatgtatttagtacgactgtaagcagtggttataacaccaaaaaaataggcaagaggcttaatatccagcttaagaaaggtacagaaggtttgggattcagcatcacttccagagatgtaacaataggtggctcagctccaatctatgtgaaaaacattctcccccggggggcggccattcaggatggccgacttaaggcaggagacagacttatagaggtaaatggagtagatttagtgggcaaatcccaagaggaagttgtttcgctgttgagaagcaccaagatggaaggaactgtgagccttctggtctttcgccaggaagacgccttccacccaagggaactgaaagcagaagatgaggatattgttcttacacctgatggcaccagggaatttctgacatttgaagtcccacttaatgattcaggatctgcaggccttggtgtcagtgtcaaaggtaaccggtcaaaagagaaccacgcagatttgggaatctttgtcaagtccattattaatggaggagcagcatctaaagatggaaggcttcgggtgaatgatcaactgatagcagtaaatggagaatccctgttgggcaagacaaaccaagatgccatggaaaccctaagaaggtctatgtctactgaaggcaataaacgaggaatgatccagcttattgttgcaaggagaataagcaagtgcaatgagctgaagtcacctgggagcccccctggacctgagctgcccattgaaacagcgttggatgatagagaacgaagaatttcccattccctctacagtgggattgaggggcttgatgaatcgcccagcagaaatgctgccctcagtaggataatgggtaaataccagctgtcccctacagtgaatatgccccaagatgacactgtcattatagaagatgacaggttgccagtgcttcctccacatctctctgaccagtcctcttccagctcccatgatgatgtggggtttgtgacggcagatgctggtacttgggccaaggctgcaatcagtgattcagccgactgctctttgagtccagatgttgatccagttcttgcttttcaacgagaaggatttggacgtcagagtatgtcagaaaaacgcacaaagcaattttcagatgccagtcaattggatttcgttaaaacacgaaaatcaaaaagcatggatttagtagctgacgagactaaactcaatacagtggatgaccagaaagcaggttctcccagcagagatgtgggtccttccctgggtctgaagaagtcaagctcgttggagagtctgcagaccgcagttgccgaggtgactttgaatggggatattcctttccatcgtccacggccgcggataatcagaggcaggggatgcaatgagagcttcagagctgccatcgacaaatcttatgataaacccgcggtagatgatgatgatgaaggcatggagaccttggaagaagacacagaagaaagttcaagatcagggagagagtctgtatccacagccagtgatcagccttcccactctctggagagacaaatgaatggaaaccaagagaaaggtgataagactgatagaaaaaaggataaaactggaaaagaaaagaagaaagatagagataaggagaaggataaaatgaaagccaagaagggaatgctgaagggcttgggagacatgttcagccttgccaaactgaagcccgagaagagatgaacaacaaagcgattcaaaacatgtcttgaacagcacatattgcacagttgttgttttttttaaacaaacaataaatttacttttaatg

SEQ ID NO: 21621 - DNA, 5740 bp, Homo sapiens
  source 1..5740: mol_type = unassigned DNA
cccagcggccccgagcgagcgccagcgccacacagccccgggcagccgccggcgagcgcgccgcgacgccgaacaggtggccggaggctgcgggcgccgcggcggggagaggcgaggcaagccccgggcgaagcgaggcgaggcgagggcggccgggccgggcatgcgagctgagcggccccccggcgtcgccgccgcctgcccgcgcccctagccgcccgcgcgcccgagtccccagcggctcctccgcgcccagcgtcctcggtcccggcctcggctgctccggctgcgctcggcgaggggcgcgggcccgcccgcggcggcggcggcatgaaagtgaccgtgtgcttcggacggacccgggtggtcgtgccgtgcggggacggccacatgaaagttttcagcctcatccagcaggcggtgacccgctaccggaaggccatcgccaaggatccaaactactggatacaggtgcatcgcttggaacatggagatggaggaatactagaccttgatgacattctttgtgatgtagcagacgataaagacagactggtagcagtgtttgatgagcaggatccacatcacggaggtgatggcaccagtgccagttccacgggtacccagagcccagagatatttggtagtgagcttggcaccaacaatgtctcagcctttcagccttaccaagcaacaagtgaaattgaggtcacaccttcagtccttcgagcaaatatgcctcttcatgttcgacgcagtagtgacccagctctaattggcctctccacttctgtcagtgatagtaatttttcctctgaagagccttcaaggaaaaatcccacacgctggtcaacaacagctggcttcctcaagcagaacactgctgggagtcctaaaacctgcgacaggaaggatgaggatgggacagaagaggataacagtcgtgttgaacctgttggacatgctgacacgggtttggagcatatacccaacttttctctggatgatatggtaaagctcgtagaagtccccaacgatggagggcctctgggaatccacgtagtgcctttcagtgctcgaggcggcagaaccctggggttattagtaaaacgattggagaaaggtggtaaagctgaacatgaaaatctttttcgtgagaatgattgcattgtcaggattaatgatggcgaccttcgaaatagaagatttgaacaagcacaacatatgtttcgccaagccatgcgtacacccatcatttggttccatgtggttcctgcagcaaataaagagcagtatgaacaactatcccaaagtgagaagaacaattactattcaagccgttttagccctgacagccagtatattgacaacaggagtgtgaacagtgcagggcttcacacggtgcagagagcaccccgactgaaccacccgcctgagcagatagactctcactcaagactacctcatagcgcacacccctcgggaaaaccaccatccgctccagcctcggcacctcagaatgtatttagtacgactgtaagcagtggttataacaccaaaaaaataggcaagaggcttaatatccagcttaagaaaggtacagaaggtttgggattcagcatcacttccagagatgtaacaataggtggctcagctccaatctatgtgaaaaacattctcccccggggggcggccattcaggatggccgacttaaggcaggagacagacttatagaggtaaatggagtagatttagtgggcaaatcccaagaggaagttgtttcgctgttgagaagcaccaagatggaaggaactgtgagccttctggtctttcgccaggaagacgccttccacccaagggaactgaaagcagaagatgaggatattgttcttacacctgatggcaccagggaatttctgacatttgaagtcccacttaatgattcaggatctgcaggccttggtgtcagtgtcaaaggtaaccggtcaaaagagaaccacgcagatttgggaatctttgtcaagtccattattaatggaggagcagcatctaaagatggaaggcttcgggtgaatgatcaactgatagcagtaaatggagaatccctgttgggcaagacaaaccaagatgccatggaaaccctaagaaggtctatgtctactgaaggcaataaacgaggaatgatccagcttattgttgcaaggagaataagcaagtgcaatgagctgaagtcacctgggagcccccctggacctgagctgcccattgaaacagcgttggatgatagagaacgaagaatttcccattccctctacagtgggattgaggggcttgatgaatcgcccagcagaaatgctgccctcagtaggataatgggtaaataccagctgtcccctacagtgaatatgccccaagatgacactgtcattatagaagatgacaggttgccagtgcttcctccacatctctctgaccagtcctcttccagctcccatgatgatgtggggtttgtgacggcagatgctggtacttgggccaaggctgcaatcagtgattcagccgactgctctttgagtccagatgttgatccagttcttgcttttcaacgagaaggatttggacgtcagatagctgacgagactaaactcaatacagtggatgaccagaaagcaggttctcccagcagagatgtgggtccttccctgggtctgaagaagtcaagctcgttggagagtctgcagaccgcagttgccgaggtgactttgaatggggatattcctttccatcgtccacggccgcggataatcagaggcaggggatgcaatgagagcttcagagctgccatcgacaaatcttatgataaacccgcggtagatgatgatgatgaaggcatggagaccttggaagaagacacagaagaaagttcaagatcagggagagagtctgtatccacagccagtgatcagccttcccactctctggagagacaaatgaatggaaaccaagagaaaggtgataagactgatagaaaaaaggataaaactggaaaagaaaagaagaaagatagagataaggagaaggataaaatgaaagccaagaagggaatgctgaagggcttgggagacatgttcaggtttggcaaacatcgaaaagatgacaagattgagaaaacgggtaaaataaaaatacaggaatcctttacatcagaagaggagaggatacgaatgaagcaggagcaggagaggattcaagccaaaactcgagaatttagggaacgacaagctcgagagcgtgactatgctgaaattcaagattttcatcggacatttggctgtgatgatgagttaatgtatgggggagtttcttcttatgaaggttccatggctctcaacgctagacctcagagcccacgagaagggcatatgatggatgctttgtatgcccaagtcaagaagccgcggaattccaaaccctcacctgtagacagtaacagatcaactcctagcaatcatgatcggatacagcgtctgaggcaagaatttcagcaagcaaagcaagatgaagatgtagaagatcgtcggcggacctatagttttgagcaaccctggccgaacgcacggccggcgacgcagagcgggcgacactcggtgtccgtggaggtgcagatgcagcggcagcggcaggaggagcgcgagagctcccagcaggcccagcgccagtacagctctctgcctcggcaaagcaggaaaaatgccagctcggtctcccaggactcttgggagcagaactactcccctggggaaggcttccagagtgccaaagagaaccccaggtactccagctaccaaggctccaggaacggctacctgggaggacatggcttcaacgccagggtcatgctggaaactcaggagctccttcgccaggaacagaggcggaaggagcagcagatgaagaagcagcctccttccgaggggcccagcaactatgactcgtataagaaagtccaggaccccagttacgcccctcccaaggggcccttccggcaagatgtgcccccctccccttctcaggttgcgaggctgaacagacttcagactcctgagaaagggaggcccttctattcctgagcacgcaaataacggatgcttcatgtcgcgcaataaaagacattttcctatgaagacttgtattttgggagtttttttaaaacctcgatggtactatggagtatttctgttgttggtatcagtgcctttaagcggtgtaggcaaagaaatggaaggccttaatgtctttgccactatgtctcaagtgtctgtttcatggaaggatttcccaccctgtgacaatcatctgtttgaggtgttcatatgctctgcgcctctccacagtaccaggaatctcggccctactcatgagttgtccgcggcttggttgtaacatccctgcaccacttgcagtgacaaattcacctgaagtggaggatgacgtgcggccctgtttctccctctaagttctcttagctatgggatgacatcttagtctctggtggaggaaaagtgggcgacatacaccaaaaattggggctttctggtacttcacagcacagccatttgtcgtactttgtcatcactgtggttttctctttcctttctcagctctttgtgacgggagagtcggtcatcctattacagaagctaagccatagtccaacattgtttggtcaccatgggggtccttttgtaactgccttatgactcaacattaccaataaagtgatgatcctggtctgcgtttatacatacgcttgttcggtcctgttcctgacacgtgggttgagtcaccacagctctgtgtggggaacgtgggagacaggagtggctcctgccgggggaagctgggcctgccattggccctgtgtctatcatgaggggagagctaagaaagaaattctcctaggaagagctcatggcccagtacatcctagtaattattttaattagtttttgttctgacagcttgtcaggaagggcacagaatgggacagagataaaccagacagtcattttgatctgctctctacggtttttcaagtcagaggcaattgatgcttgtctaatgcatccacacactgcatgtctgactggcgatgccgcgctcctaagtagttctgccatgaaacataaaagacaaaggaaaagccgttacacatcacacagagaacattttcgggtcccacagcggtggtggcaggaagctcactctcgcgtcagtattagagtgtgtgtgtgggtctcggggatctcggtggctcccatcttccttcattgttctgaacatcctgtattgtaaaccatggctggggtgctaaagtgcctgtgaatcccgatgtggaaaaagctggaggtgaaagctcagcataccatgtatttactttaaaaacagaaaaaaagacatgtatggatatgtctattttttttttattggcacattgtatttttgtgttgacttgtttttagaaatgatgtgtccacacacgtacccgtgtctcttctgcatttctgtgtcatggttctgtttcttaatcacgtgcggcggtgtctaagtggtgttaccagtgtacgcgcagtgaccttggatgacagtggctctttctcacagcctcccctgagctgtgagaaacagctttctctgtacatatgcaactcctaataaaaggcatatttcttcctgttc

SEQ ID NO: 21622 - DNA, 5962 bp, Homo sapiens
  source 1..5962: mol_type = unassigned DNA
cccagcggccccgagcgagcgccagcgccacacagccccgggcagccgccggcgagcgcgccgcgacgccgaacaggtggccggaggctgcgggcgccgcggcggggagaggcgaggcaagccccgggcgaagcgaggcgaggcgagggcggccgggccgggcatgcgagctgagcggccccccggcgtcgccgccgcctgcccgcgcccctagccgcccgcgcgcccgagtccccagcggctcctccgcgcccagcgtcctcggtcccggcctcggctgctccggctgcgctcggcgaggggcgcgggcccgcccgcggcggcggcggcatgaaagtgaccgtgtgcttcggacggacccgggtggtcgtgccgtgcggggacggccacatgaaagttttcagcctcatccagcaggcggtgacccgctaccggaaggccatcgccaaggatccaaactactggatacaggtgcatcgcttggaacatggagatggaggaatactagaccttgatgacattctttgtgatgtagcagacgataaagacagactggtagcagtgtttgatgagcaggatccacatcacggaggtgatggcaccagtgccagttccacgggtacccagagcccagagatatttggtagtgagcttggcaccaacaatgtctcagcctttcagccttaccaagcaacaagtgaaattgaggtcacaccttcagtccttcgagcaaatatgcctcttcatgttcgacgcagtagtgacccagctctaattggcctctccacttctgtcagtgatagtaatttttcctctgaagagccttcaaggaaaaatcccacacgctggtcaacaacagctggcttcctcaagcagaacactgctgggagtcctaaaacctgcgacaggaagaaagatgaaaactacagaagcctcccgcgggatactagtaactggtctaaccaatttcagagagacaatgctcgctcgtctctgagtgccagtcacccaatggtgggcaagtggctggagaaacaagaacaggatgaggatgggacagaagaggataacagtcgtgttgaacctgttggacatgctgacacgggtttggagcatatacccaacttttctctggatgatatggtaaagctcgtagaagtccccaacgatggagggcctctgggaatccacgtagtgcctttcagtgctcgaggcggcagaaccctggggttattagtaaaacgattggagaaaggtggtaaagctgaacatgaaaatctttttcgtgagaatgattgcattgtcaggattaatgatggcgaccttcgaaatagaagatttgaacaagcacaacatatgtttcgccaagccatgcgtacacccatcatttggttccatgtggttcctgcagcaaataaagagcagtatgaacaactatcccaaagtgagaagaacaattactattcaagccgttttagccctgacagccagtatattgacaacaggagtgtgaacagtgcagggcttcacacggtgcagagagcaccccgactgaaccacccgcctgagcagatagactctcactcaagactacctcatagcgcacacccctcgggaaaaccaccatccgctccagcctcggcacctcagaatgtatttagtacgactgtaagcagtggttataacaccaaaaaaataggcaagaggcttaatatccagcttaagaaaggtacagaaggtttgggattcagcatcacttccagagatgtaacaataggtggctcagctccaatctatgtgaaaaacattctcccccggggggcggccattcaggatggccgacttaaggcaggagacagacttatagaggtaaatggagtagatttagtgggcaaatcccaagaggaagttgtttcgctgttgagaagcaccaagatggaaggaactgtgagccttctggtctttcgccaggaagacgccttccacccaagggaactgaaagcagaagatgaggatattgttcttacacctgatggcaccagggaatttctgacatttgaagtcccacttaatgattcaggatctgcaggccttggtgtcagtgtcaaaggtaaccggtcaaaagagaaccacgcagatttgggaatctttgtcaagtccattattaatggaggagcagcatctaaagatggaaggcttcgggtgaatgatcaactgatagcagtaaatggagaatccctgttgggcaagacaaaccaagatgccatggaaaccctaagaaggtctatgtctactgaaggcaataaacgaggaatgatccagcttattgttgcaaggagaataagcaagtgcaatgagctgaagtcacctgggagcccccctggacctgagctgcccattgaaacagcgttggatgatagagaacgaagaatttcccattccctctacagtgggattgaggggcttgatgaatcgcccagcagaaatgctgccctcagtaggataatgggtaaataccagctgtcccctacagtgaatatgccccaagatgacactgtcattatagaagatgacaggttgccagtgcttcctccacatctctctgaccagtcctcttccagctcccatgatgatgtggggtttgtgacggcagatgctggtacttgggccaaggctgcaatcagtgattcagccgactgctctttgagtccagatgttgatccagttcttgcttttcaacgagaaggatttggacgtcagagtatgtcagaaaaacgcacaaagcaattttcagatgccagtcaattggatttcgttaaaacacgaaaatcaaaaagcatggatttaggtatagctgacgagactaaactcaatacagtggatgaccagaaagcaggttctcccagcagagatgtgggtccttccctgggtctgaagaagtcaagctcgttggagagtctgcagaccgcagttgccgaggtgactttgaatggggatattcctttccatcgtccacggccgcggataatcagaggcaggggatgcaatgagagcttcagagctgccatcgacaaatcttatgataaacccgcggtagatgatgatgatgaaggcatggagaccttggaagaagacacagaagaaagttcaagatcagggagagagtctgtatccacagccagtgatcagccttcccactctctggagagacaaatgaatggaaaccaagagaaaggtgataagactgatagaaaaaaggataaaactggaaaagaaaagaagaaagatagagataaggagaaggataaaatgaaagccaagaagggaatgctgaagggcttgggagacatgttcaggtttggcaaacatcgaaaagatgacaagattgagaaaacgggtaaaataaaaatacaggaatcctttacatcagaagaggagaggatacgaatgaagcaggagcaggagaggattcaagccaaaactcgagaatttagggaacgacaagctcgagagcgtgactatgctgaaattcaagattttcatcggacatttggctgtgatgatgagttaatgtatgggggagtttcttcttatgaaggttccatggctctcaacgctagacctcagagcccacgagaagggcatatgatggatgctttgtatgcccaagtcaagaagccgcggaattccaaaccctcacctgtagacagtaacagatcaactcctagcaatcatgatcggatacagcgtctgaggcaagaatttcagcaagcaaagcaagatgaagatgtagaagatcgtcggcggacctatagttttgagcaaccctggccgaacgcacggccggcgacgcagagcgggcgacactcggtgtccgtggaggtgcagatgcagcggcagcggcaggaggagcgcgagagctcccagcaggcccagcgccagtacagctctctgcctcggcaaagcaggaaaaatgccagctcggtctcccaggactcttgggagcagaactactcccctggggaaggcttccagagtgccaaagagaaccccaggtactccagctaccaaggctccaggaacggctacctgggaggacatggcttcaacgccagggtcatgctggaaactcaggagctccttcgccaggaacagaggcggaaggagcagcagatgaagaagcagcctccttccgaggggcccagcaactatgactcgtataagaaagtccaggaccccagttacgcccctcccaaggggcccttccggcaagatgtgcccccctccccttctcaggttgcgaggctgaacagacttcagactcctgagaaagggaggcccttctattcctgagcacgcaaataacggatgcttcatgtcgcgcaataaaagacattttcctatgaagacttgtattttgggagtttttttaaaacctcgatggtactatggagtatttctgttgttggtatcagtgcctttaagcggtgtaggcaaagaaatggaaggccttaatgtctttgccactatgtctcaagtgtctgtttcatggaaggatttcccaccctgtgacaatcatctgtttgaggtgttcatatgctctgcgcctctccacagtaccaggaatctcggccctactcatgagttgtccgcggcttggttgtaacatccctgcaccacttgcagtgacaaattcacctgaagtggaggatgacgtgcggccctgtttctccctctaagttctcttagctatgggatgacatcttagtctctggtggaggaaaagtgggcgacatacaccaaaaattggggctttctggtacttcacagcacagccatttgtcgtactttgtcatcactgtggttttctctttcctttctcagctctttgtgacgggagagtcggtcatcctattacagaagctaagccatagtccaacattgtttggtcaccatgggggtccttttgtaactgccttatgactcaacattaccaataaagtgatgatcctggtctgcgtttatacatacgcttgttcggtcctgttcctgacacgtgggttgagtcaccacagctctgtgtggggaacgtgggagacaggagtggctcctgccgggggaagctgggcctgccattggccctgtgtctatcatgaggggagagctaagaaagaaattctcctaggaagagctcatggcccagtacatcctagtaattattttaattagtttttgttctgacagcttgtcaggaagggcacagaatgggacagagataaaccagacagtcattttgatctgctctctacggtttttcaagtcagaggcaattgatgcttgtctaatgcatccacacactgcatgtctgactggcgatgccgcgctcctaagtagttctgccatgaaacataaaagacaaaggaaaagccgttacacatcacacagagaacattttcgggtcccacagcggtggtggcaggaagctcactctcgcgtcagtattagagtgtgtgtgtgggtctcggggatctcggtggctcccatcttccttcattgttctgaacatcctgtattgtaaaccatggctggggtgctaaagtgcctgtgaatcccgatgtggaaaaagctggaggtgaaagctcagcataccatgtatttactttaaaaacagaaaaaaagacatgtatggatatgtctattttttttttattggcacattgtatttttgtgttgacttgtttttagaaatgatgtgtccacacacgtacccgtgtctcttctgcatttctgtgtcatggttctgtttcttaatcacgtgcggcggtgtctaagtggtgttaccagtgtacgcgcagtgaccttggatgacagtggctctttctcacagcctcccctgagctgtgagaaacagctttctctgtacatatgcaactcctaataaaaggcatatttcttcctgttc

SEQ ID NO: 21623 - DNA, 4615 bp, Homo sapiens
  source 1..4615: mol_type = unassigned DNA
gagggagggagctgcttccccgcctgccgcgccaccagtccgaccctcggtcccgccgtgtgagcagctggtggagtggagctcagcgcggacgccggagctgcggccgccccctctgcaggtgcctgtgaggaggcgcccgggccgcaaccgctttccgagatccccagtcgcgcactcgctccccgcgctcctgaggggccgcccggccggaggaggccgtcgcggggctcggcgttcagcatgaaccgcagccaccggcacggggcgggcagcggctgcctgggcactatggaggtgaagagcaagtttggagctgaatttcgtcggttttcgctggaaagatcaaaacctggaaaatttgaggagttttatggattactacaacatgttcataagatccccaatgttgacgttttggtaggctatgcagacatccatggagacttactacctataaataatgatgataattatcacaaagctgtttcaacggccaatccactgcttaggatatttatacaaaagaaggaagaagcagactacagtgcctttggtacagacacgctaataaagaagaagaatgttttaaccaacgtattgcgtcctgacaaccatagaaaaaagccacatatagtcattagtatgccccaagactttagacctgtgtcttctattatagacgtggatattctcccagaaacgcatcgtagggtacgtctttacaaatacggcacggagaaacccctaggattctacatccgggatggctccagtgtcagggtaacaccacatggcttagaaaaggttccagggatctttatatccaggcttgtcccaggaggtctggctcaaagtacaggactattagctgttaatgatgaagttttagaagttaatggcatagaagtttcagggaagagccttgatcaagtaacagacatgatgattgcaaatagccgtaacctcatcataacagtgagaccggcaaaccagaggaataatgttgtgaggaacagtcggacttctggcagttccggtcagtctactgataacagccttcttggctacccacagcagattgaaccaagctttgagccagaggatgaagacagcgaagaagatgacattatcattgaagacaatggagtgccacagcagattccaaaagctgttcctaatactgagagcctggagtcattaacacagatagagctaagctttgagtctggacagaatggctttattccctctaatgaagtgagcttagcagccatagcaagcagctcaaacacggaatttgaaacacatgctccagatcaaaaactcttagaagaagatggaacaatcataacattatgaaaccgtggtttgaatgttttcagagtgaggatgccatgaggacttgtacatttggctagtttaaaagcatatatacctctgaccagtgacgtggaataggcatgagacgagtaacgttgcaagcttacaatattattaaagtagtagtttgataattgttaatataaactttggtggatcagaggtgaatttaagtccaaaacaaaggggcctttgctgatgaagttacgtgcttttgctgttttgtctgtggagaatcagatgttaaagcacattcttggaactatgtgagaagactagatcatttctgttggaagtggttgcatatttaacctgctgtgcagagcccagttaatttttcctttaactgtatttttaaaattctaatgtgaagtctgattctctcttgtggtacattggggacctcagctcttaaaggtctcatgttcccaatattttattttgattttttttttttttttttttttttttttttttagtgactgggtctcactctgttgcccacactggaatgcagtggcatgatcacagctctctgcagcctcaatcccctgggctcaagcagtcctcccacctcagcctcctgagtagctgggaccataggcacataccaccacatctgtctactttttgtattttttgtagagacagggtttcgccatgttgcccaagttggtcttgaactcctgggcttaagcagtcctgcctcggcttcccaaaatgctaggattagagccaccatgcccagcctattttgatttttgtttttttatgttcctttctaataaattgtaacaaatgatgttctcaagtacatttccagtttcttttcttttctttctttttttttttttttttttttttgagatggagtctcgctctatcgcccaggctggagtgcagtggcgcgatcttggctcactgcaagctctacctcctgggttcacaccattctcctgcctcagcctcccaagtagctgggactacaggcgcctgccaccatgcctggctaatttttagtagagacggggtttcgcagtgttagccaggaaggtctcaatctcctgacctcctgatccgcccgcctcggcctcccaaagtgctgggattacaggcgtgagccaccgcgcccagttgtgcatttctggtttctaagaatcaaaccacttggctgtttttaggagttacttcccatgttataaagctgaggaagctttttttttttttttttgagacagagtctctgtcacccaggctggagtgcagtggtgcaatctcagctcccgggttcaagcaattctcctgcctcagccttctgagtagctaagattacaggtgtgcgccaacacgtctggcttatttttttgtatttttagtagagatggagtttcaccatgttggtcaggtgggtctcaaactcctgacctcaagtgatccgcccatctcctcccaaagtgctggattgcaggcatgagcgcctagccaggaagctatcttttcttgagttatgaaactttgcaacagttgttcaaattggtgtttgtccttcctatagctttcatattttcaaattaattctgtatggctatataatttatgttttaaaaggcaattctcttgactttggaaatatggaagtctctcctttaacctattcttgttcccattcccagtctcatttgaaatcattccttttattgttagtgtgtgtatttttgttggtgtgcttttaatgcatccaagtatgcatcattttggataaaaaatacatccaaattaagatgttttaacacataggacaaacttgtgcactttttatgccaaaaaaaaaaaaaattgggttttccttcatgggatttctagaaacactgcctacactttatgaaaactacatagtattcacctgtgacaggtagagtttatcactattaattttatgaggctatttattactttccaatgcatccacttagaacaagctaagagtaaggctgctaactttaattccttgcctgattttattgtacagtgtgcacaagcacaatggtatgcttgtatatagaaactaaaaatactatgaagtacataagttccctatggcttatggagagttatttattaattaactttatggtagggctagtatgaatacctttttaacaattgtgtgctattacaacaatgaagattcaaatgactccgctttgaaggatgttttctctatatggtaaaatatatatgaagaagtcttgattacgtgaagatcacttgactcagaatacttcaatgtattttgttcacattaccactaagcatattatcagtaaactattaactgactgcacattatgtaatacgttgtactttttgttgaattcaccgaagttcttccatttatatgctatttttaatggcattccggctttaacattctgtgagtcttacaaatttgactcttgaatggcaaaataatgttagtatgtagaaggttaactttcatttataatataagtggtgcaggggttcaacattttaagtaaaaatatttttacacactacctctctctttttttttttaaagttttaacatcagaacttttgggggaaaaactacttcagggcttgactttttgtacaaattttaactgtaaaatacagatttatcttgtacgcattcatggaaatggaaatcaaagctgctattgctttttattttaattatcctgttaagggtatctatcaatggtattttcaagtagatctctgtttcttaaattattggtgaaataattgattactagatatattgtaaaaccaatagatcctggttatacgataaaatatcagctcattggtaggctgaatcaattatttcaagtgcaccttattaacaaaagtatcagtggatccaacataaaattttatagtactaaatgtcaagcctaactgtgaattttgttctgtatcttaagtaaatttatgataatgttctcgagctatcaacaaaatatatgtacttttgtgagctatgaattttctaattaaattttacatgctataacatgatttttacatgaatgatactttgtttataactatcaaatgtcagtattttactacaattttattataaagtgtacattatcactaaatgaacttcgattttaaaaatcaaattagctttagttgtatattattttttacaaataaagatagacttgtataaaggcta

SEQ ID NO: 21624 - DNA, 3868 bp, Homo sapiens
  source 1..3868: mol_type = unassigned DNA
cgctcctcccgcgcgcggcccctggagtccctgaggcgcgcggccagcccagctcgggcccgcagcaccgggagcagcccgccggccaagcgagcgcgggccggggccggggccggggcctgggggcgccgcccccgggagtctttctgcggcccctgaggagcgagggcgacggcgaggctgaccggggccgaaaccatgaaccgaagttttcacaagtctcagaccttgcgattctacgattgcagcgcagtggaagtcaagagcaagtttggggcggaattccgaaggttctctctggaccgtcataagcctgggaagtttgaagatttctacaagctggttgtgcacacccaccatatctccaacagtgatgtaactattggctatgcagatgtgcacggagacctgctgcccatcaacaatgatgacaacttctgcaaggcggtttctagtgcaaatcccctgctcagggtcttcatccagaaacgagaggaggccgagcgtggcagcctcggcgcgggctcgctgtgcaggcggaggcgggcgctgggcgcgctgcgtgatgaaggaccccggcggcgtgcacacctggacatcggcctcccgcgcgacttccgccccgtatcatccatcatcgatgtggacctggtccccgagacgcaccggcgagtgcggctgcaccggcacggctgcgagaagccgctgggcttctacatccgcgatggcgccagcgtgcgcgtgaccccgcacgggctggagaaggtgcccggcatcttcatctcgcgcatggtacccgggggcctggcggagagcaccgggctgctggctgtgaatgacgaggtcctggaggtgaacggcattgaggtggccgggaagacgctggaccaggtcacggacatgatgatcgccaacagccacaacctcatcgtcaccgtcaagcccgccaaccagcgcaacaacgtggtgcgcggcggccgcgcgttgggcagctcgggaccgccctcggacggcaccgcgggcttcgtgggtccccccgccccgcgcgtcctgcagaacttccaccccgacgaggcggagagcgatgaggacaacgacgtcgtcatcgagggcacactggagcctgcacgtcccccccagaccccgggcgcgcccgcaggcagcctctcccgggtcaatggcgcgggcctggcgcagcggctgcagcgggacctggccctggacggcggcctccagcggctgctcagctccctgcgggccgacccccgtcacagcctggcgctgccgccaggcggcgtggaggagcacgggcccgcggtcacgctctagactcccgagaggcccccaaatcctagctccagttccccggtaaggacagggacaggacctgcagactgcatccgctcattttttgttgtttttgtgaccacaaaaacaacgctgctctttgtttcaacttccggatataaaaacacaagtattgcctatttttatagaatttcgccacagaacttaaaatgaacgcctgtagagacactctataccaggcctgagtgcaggtcttggcgcctttgcaaagtgatagaaaagatctgaccaagtgcaaaaaaatgctttttaaaatttttacaaatactttgtttttaaagtgaagctttaaaattacttttttaaaatagtcaaattcatgtttttaagtaagttggcccatgcaacatatctcagcattcttgctgtgctctctgctgacttgcaggcgaggccgactgtgctgatgtacgtgacaagaggctggtttttaataacgaatgcagccaggtgcagtggctcacgtctgtaatcccagcactttgggaggcctacgtgggctgatcacgaggtcaggaggtcgagaccagcatggccaacatggtgaaaccctgtctctactaaaaatataaaaattagccaggtgtggtggcaggcgcctgtaatcccagctaccttgggaggctgaggcaggagaatcgcttgaacccgggaggcagaggttgcagtgagctgagatcgcaccactgcactccagcctgggtgacagagcaagactctgtctcgggaaaaaaaaaaaatacacccaaacctgtccatgtacaaccatggagatgaattccagattttcacactgttcatagtcataattcggttgggacaggagagctcccaccagcacacttatggcacccgcagctgtggaattgttccggggcttttttttgtttgttttgagacatagtgtcttgttctgtcatccaagctggagggatctcagctcactgcaacctccgcctcctgggttcaagcaattctcctgcctcagcctcccaaggagctgggacaggcacatgccaccatacccagctaatttttgtatttttagtagagatgggatttcaccacgttggtcaggctggtcttgaactcctgacctcaggtgatacggtcccccctcagcctccaaaaatgctaggattatagacgtgagccacagcaccagaccaggggctatttttgtgacccacataggtggcccattcagcctcaaggggaaatccagggtaggaagcagcagctctgctggactgggctcagcagtcccatttgggatgtaagcctctattgcctctaagatgacccttttcctgtgggttgactgactctgagggcgatttcggaaatgttttcagcagaaatgaaggataagcatcgcacatgtccagcaatgtctttgagaatgcagtcatttgcacgtgagttctcatctttgttttctgaaacagacgtttcttttagtaagtcacaatacatgctaattttcatttctagaatggtcactggcagttctcacttttaactataagaagtcacgtggaacttagtgatttttaacaaatactaaattcatcctcactttatgttgatcttccagcaacgtttatatatttagtaattttaaaaattcctatttgatacaattaaattttatataatgtgttttgcttgaataaaatgttacatttatactttgagaactctgaccaaatctttcatacagatacaggtaaagaaatatttttctaggttgtcggagctgcgtacctcccgctgcttctccttgtggtccagcaccacctgctggtcagtggcagaactgtcctgacttcgtgaacatggaactgctaagagggaaaactgcatctcagcattttcattttttctgaatattaagtgaaaagcaagttctatttttaagaaatagcttttgctgaggagttgtgaattcctgcacctgtgtttgatgttatttgtatgcaatggattgctggccctttgttcctaagcaagagaagaccaaagatgcttccccatgacctctccggtgaggatccgcaccccccggacttgctctctgatgaagggcatgtcgttcagtgccccagcagtcagaagcagtttttgtggaactaaaactaataatgttaccctcacaaaggaaatgttcttttactaagttattgctgattcttgaatgtctgttatataactgggtcggctatcaagaaggaaggttatatttcttatcacattttaagttgttaagcaaatgtgagtttttttttaagaaatgaggctttcactgagatttgtgtgctattcataattttaggaattactgcttagaacagctgcttgggtgtatttttctacacaggtctgtacttctgccactttctccttttaaaaaaacaaaactatgcatattatgtattaaagttttcttggttttatatatcagagaataaaaacttttttgacttttgagtaaacaaaa

SEQ ID NO: 21625 - DNA, 1332 bp, Homo sapiens
  source 1..1332: mol_type = unassigned DNA
gcgtgtgttttttctttcctctttcccctgcctgtgtgcccttctccaggatggcagaggcggaattgcacaaggaaaggctgcaagccatagcagaaaaaagaaagaggcagactgaaatagaaggcaagcgacaacagcttgacgagcagatacttctgctgcagcattccaagtccaaagtgcttcgggagaaatggctgctgcagggcatacccgctggaactgccgaagaggaggaagccaggaggcggcagtctgaagaggatgagttcagagtcaagcaacttgaagataacattcagaggctggagcaagaaatacaaacgctagaaagtgaagagtcccagatatctgccaaagagcaaatcatcctagagaaactgaaggaaacagaaaaatccttcaaggactttcagaagggtttctccagtacggatggagatgcagtaaattacatttcctcccagcttcccgacctgccaatcctctgttcacgaacagcagaaccatcacctgggcaggacgggaccagcagagcggctgctgtgtacgccatggaaattaatgtggagaaagacaaacaaacaggagagaccaagattctctctacatctaccattggcccagagggggtccatcagaaaggagtcaaagtctatgatgatggtaccaaagtagtgtatgaggtgcgctcaggaggcaccgtagtagaaaatggagtgcacaaattaagcacaaaggatgtagaagagcttattcagaaggctggacaatcaagcttaggaggagggcacgtgtctgaaaggactgtgattgcagatgggagcctcagccatcccaaggaacacatgctctgcaaagaagctaagttagaaatggtacataagtctaggaaagaccattcttccgggaacccagggcagcaggcccaagcccccagcgctgcagggccggaggcaaacttggatcagcccgtcaccatgatttttatgggctaccaaaatatcgaggatgaagaggagacgaaaaaggtgctaggctatgatgaaaccatcaaggctgaattggtcctcattgatgaagatgatgagaagtcattgagggagaagacagtgacggacgtgtccactattgacgggaacgcggctgagcttgtgtccgggaggccggtctcagacaccacagagccctcatccccagaagggaaggaagagagcctagctacagagccagccccaggtacccaaaagaaaaagcgctgtcaatgctgtgttgtcatgtgaccacttctttcttctcctttcttctgggcagcctgtactctccacc

SEQ ID NO: 21626 - DNA, 4492 bp, Homo sapiens
  source 1..4492: mol_type = unassigned DNA
gtgcactcggctccgggagaggcgagcagcgccggtgagccccgcagcagcgcacccggccgcggagccccgcgatggagatggcagaggcggaattgcacaaggaaaggctgcaagccatagcagaaaaaagaaagaggcagactgaaatagaaggcaagcgacaacagcttgacgagcagatacttctgctgcagcattccaagtccaaagtgcttcgggagaaatggctgctgcagggcatacccgctggaactgccgaagaggaggaagccaggaggcggcagtctgaagaggatgagttcagagtcaagcaacttgaagataacattcagaggctggagcaagaaatacaaacgctagaaagtgaagagtcccagatatctgccaaagagcaaatcatcctagagaaactgaaggaaacagaaaaatccttcaaggactttcagaagggtttctccagtacggatggagctgtgtacgccatggaaattaatgtggagaaagacaaacaaacaggagagaccaagattctctctacatctaccattggcccagagggggtccatcagaaaggagtcaaagtctatgatgatggtaccaaagtagtgtatgaggtgcgctcaggaggcaccgtagtagaaaatggagtgcacaaattaagcacaaaggatgtagaagagcttattcagaaggctggacaatcaagcttaggaggagggcacgtgtctgaaaggactgtgattgcagatgggagcctcagccatcccaaggaacacatgctctgcaaagaagctaagttagaaatggtacataagtctaggaaagaccattcttccgggaacccagggcagcaggcccaagcccccagcgctgcagggccggaggcaaacttggatcagcccgtcaccatgatttttatgggctaccaaaatatcgaggatgaagaggagacgaaaaaggtgctaggctatgatgaaaccatcaaggctgaattggtcctcattgatgaagatgatgagaagtcattgagggagaagacagtgacggacgtgtccactattgacgggaacgcggctgagcttgtgtccgggaggccggtctcagacaccacagagccctcatccccagaagggaaggaagagagcctagctacagagccagccccaggtacccaaaagaaaaagcgctgtcaatgctgtgttgtcatgtgaccacttctttcttctcctttcttctgggcagcctgtactctccaccactcacgtagacctcactgtaccactaactgcaatactgtgaactggaagcaaacacctgccttgccttgcagttgaattgctttgatctctctcattttttttccttttcctcacctgagagacaacgtgcatgtgtgtgcttcattctctccaagaacttgcttttcctctaaacctttccttgtgtcttcaagagtgaatcacttccttcctgctcgattggaatggactcttcgtatcagccagtgatatggtagccttaactcacttgactggaattgaacccattggcactgggggtttcattttgtagtgtgttcctgtaacgtagtcacacactgccatgtctctggtttctcacttgcctcctttgctgtggatctttgtttttatatcttgtgtggcaaaatgctgttggctctagccggttgctagtgtagccaaaagtggaccttacttagtctgtccgatctagggtgatgctttttgctgccttacataagcttccagattacagtattgtgcattcatggctttctttctgttaaaactgaaatgaagtcaatgtagaagaacccagagcttgtcacagctgaaatgtagggactgattccataacctgcccatcagcggttgtctctctttctatggtttaaccgatgaaccctttatataagaagcaccattttaaaatttctaaggacatgaaacaaacattgtttgaagcatcagtagcaattgatctccaaacttaggcaaattcacaagccttgtttctattctcttaaaaaaatgtaaatttttatattgtttcttttttctggatattttctggtcatgttaatctattttcaatgaggagatcatcttgagaagtatctttgcagtgaccatatttctaaaacagtctgtccaacctacaatggttgccatgatgctcccacttcatcatggatggtgctgtaatgcattaactgttcatctcctccccagttgattacaaagccttgcatccatactcttttctttctggccccatgagaaagagaatgttttaggtaacttcaacttgtaggtttatctgcccttcaaaaaaaaaaactttaaaaaacttttaaaaattaagaaagacctatcttctcaatgttaagcacttaatttcataacaaatattaagtggcacatagctgagcttcttagggcattgttttgtttttagcttctggagattccagaagagcaaagaatattttttatctagaacacaatgaacagtttttgaaataccttctcagcactcccccaaagcaaaaagccacatatgtagtaaaaccaaagggaaacaatttaataaaataacaatagtatagtaatgaaataaagatataacatgattactggttttaataagagttatcttaactttaagttatttgcccatttatagcattgttatgaattattcataaaattatgtcccacagtatatagttttgaaaaaacatatgatatactacatccagtctaacttctgtggaaagtagatcagaaaaaataagatagtcttgagagaattttattatagaagctgtctaatttgacctattttgcttgctcagtgctaaatctattgcttttttttaatctcctggcttgaaattatatttacttcaataggaaaggtaaaaacatcagtttttacttttcaaagttaattttctgaaataattgcattttaatgagcacaaaatgggtcattttatttttattatactcatcttgtttacacctatacataaacagaaaacgttaaagaagagaaaaataaaggagctaagttctgctgttgaagattatttcatccaaggcttggttttgaataactgagggaaatatctctaaatctcaagttcatcaaagcagctgcaatggaataaaattgctattttatcgagaaacctggtttggatgcttataaattccactactctcagcttcattttcctgagtacgtggtcactgaagcatcatttagacattacataaactggcatgcagataaacctatttacatagagggagaaaacagtttcaatgtcttggacaatctgttattttaatgatttacttaagaaagaaacaatctgaaagcttaccatagcttatcttttctactcacttggagattcaagctattcaatgtgagttttaaaaagttaagcacagttagtgagtgaaatggtagaatgtagaacctttaagcttgctggttgataaacagaatcaatcttccaggacagataattccctgaagggacctatccttgcataagtgaactagttactcatacagaaaatgatctgcacatcttactacaacactacacacaagaactaaaagattaatgattatctgtattctcttcactaattactattatgggggaataatgattagcaaattatatgaattcgagttctctctatacttttattagtaaagcttatcatttaatggactgaagtaagatgtgttacctttattcgagctatttgtagccacactaaatgaaggtgtgtttgaatatggcgcatatatttgcatatgtcccatcattttcttgtcataatggggaattcaggcttagccagtacttctatgggatgagacctataatcccacctatagcagcaagtaactacccttcatgatgatagtgtacatggagctgtgattatgaacatgctgcctttcctgctgccattggcattctctctgtaaattttattatgtgtggtatcacactctccaaaaatgcagggtatttggttacataaccaaactaattaaagaatcagtaatgaaattgcaaaaccatgatcttttttgagctaatgattagttgggctttcctttaaaataatataatcaggccgagtgcagcggctcacacctgtaatctcggcactttggaagtccgcggcgggtggttcacctgaggtcgggagttcaagaccagcctgaccaacatggagaaacccccatctctactaaaaaaaaaatacaaaattagccaggcgtgatggcgcatgcctgtaatcccagctactcgggagactgaggcaggagaatcgcttgaacctgggaggcaggggttgcaatgagccgagatgtgcactccagcctgggcaacaaagagcgaaactccatctcaaaaaaaaaaaaaaaa

SEQ ID NO: 21627 - DNA, 9292 bp, Homo sapiens
  source 1..9292: mol_type = unassigned DNA
atggagatggcagaggcggaattgcacaaggaaaggctgcaagccatagcagaaaaaagaaagaggcagactgaaatagaaggcaagcgacaacagcttgacgagcagatacttctgctgcagcattccaagtccaaagtgcttcgggagaaatggctgctgcagggcatacccgctggaactgccgaagaggaggaagccaggaggcggcagtctgaagaggatgagttcagagtcaagcaacttgaagataacattcagaggctggagcaagaaatacaaacgctagaaagtgaagagtcccagatatctgccaaagagcaaatcatcctagagaaactgaaggaaacagaaaaatccttcaaggactttcagaagggtttctccagtacggatggagatgcagtaaattacatttcctcccagcttcccgacctgccaatcctctgttcacgaacagcagaaccatcacctgggcaggacgggaccagcagagcggctgctgtgtacgccatggaaattaatgtggagaaagacaaacaaacaggagagaccaagattctctctacatctaccattggcccagagggggtccatcagaaaggagtcaaagtctatgatgatggtaccaaagtagtgtatgaggtgcgctcaggaggcaccgtagtagaaaatggagtgcacaaattaagcacaaaggatgtagaagagcttattcagaaggctggacaatcaagcttaggaggagggcacgtgtctgaaaggactgtgattgcagatgggagcctcagccatcccaaggaacacatgctctgcaaagaagctaagttagaaatggtacataagtctaggaaagaccattcttccgggaacccagggcagcaggcccaagcccccagcgctgcagggccggaggcaaacttggatcagcccgtcaccatgatttttatgggctaccaaaatatcgaggatgaagaggagacgaaaaaggtgctaggctatgatgaaaccatcaaggctgaattggtcctcattgatgaagatgatgagaagtcattgagggagaagacagtgacggacgtgtccactattgacgggaacgcggctgagcttgtgtccgggaggccggtctcagacaccacagagccctcatccccagaagggaaggaagagagcctagctacagagccagccccaggtacccaaaagaaaaagcgctgtcaatgctgtgttgtcatgtgaccacttctttcttctcctttcttctgggcagcctgtactctccaccactcacgtagacctcactgtaccactaactgcaatactgtgaactggaagcaaacacctgccttgccttgcagttgaattgctttgatctctctcattttttttccttttcctcacctgagagacaacgtgcatgtgtgtgcttcattctctccaagaacttgcttttcctctaaacctttccttgtgtcttcaagagtgaatcacttccttcctgctcgattggaatggactcttcgtatcagccagtgatatggtagccttaactcacttgactggaattgaacccattggcactgggggtttcattttgtagtgtgttcctgtaacgtagtcacacactgccatgtctctggtttctcacttgcctcctttgctgtggatctttgtttttatatcttgtgtggcaaaatgctgttggctctagccggttgctagtgtagccaaaagtggaccttacttagtctgtccgatctagggtgatgctttttgctgccttacataagcttccagattacagtattgtgcattcatggctttctttctgttaaaactgaaatgaagtcaatgtagaagaacccagagcttgtcacagctgaaatgtagggactgattccataacctgcccatcagcggttgtctctctttctatggtttaaccgatgaaccctttatataagaagcaccattttaaaatttctaaggacatgaaacaaacattgtttgaagcatcagtagcaattgatctccaaacttaggcaaattcacaagccttgtttctattctcttaaaaaaatgtaaatttttatattgtttcttttttctggatattttctggtcatgttaatctattttcaatgaggagatcatcttgagaagtatctttgcagtgaccatatttctaaaacagtctgtccaacctacaatggttgccatgatgctcccacttcatcatggatggtgctgtaatgcattaactgttcatctcctccccagttgattacaaagccttgcatccatactcttttctttctggccccatgagaaagagaatgttttaggtaacttcaacttgtaggtttatctgcccttcaaaaaaaaaaactttaaaaaacttttaaaaattaagaaagacctatcttctcaatgttaagcacttaatttcataacaaatattaagtggcacatagctgagcttcttagggcattgttttgtttttagcttctggagattccagaagagcaaagaatattttttatctagaacacaatgaacagtttttgaaataccttctcagcactcccccaaagcaaaaagccacatatgtagtaaaaccaaagggaaacaatttaataaaataacaatagtatagtaatgaaataaagatataacatgattactggttttaataagagttatcttaactttaagttatttgcccatttatagcattgttatgaattattcataaaattatgtcccacagtatatagttttgaaaaaacatatgatatactacatccagtctaacttctgtggaaagtagatcagaaaaaataagatagtcttgagagaattttattatagaagctgtctaatttgacctattttgcttgctcagtgctaaatctattgcttttttttaatctcctggcttgaaattatatttacttcaataggaaaggtaaaaacatcagtttttacttttcaaagttaattttctgaaataattgcattttaatgagcacaaaatgggtcattttatttttattatactcatcttgtttacacctatacataaacagaaaacgttaaagaagagaaaaataaaggagctaagttctgctgttgaagattatttcatccaaggcttggttttgaataactgagggaaatatctctaaatctcaagttcatcaaagcagctgcaatggaataaaattgctattttatcgagaaacctggtttggatgcttataaattccactactctcagcttcattttcctgagtacgtggtcactgaagcatcatttagacattacataaactggcatgcagataaacctatttacatagagggagaaaacagtttcaatgtcttggacaatctgttattttaatgatttacttaagaaagaaacaatctgaaagcttaccatagcttatcttttctactcacttggagattcaagctattcaatgtgagttttaaaaagttaagcacagttagtgagtgaaatggtagaatgtagaacctttaagcttgctggttgataaacagaatcaatcttccaggacagataattccctgaagggacctatccttgcataagtgaactagttactcatacagaaaatgatctgcacatcttactacaacactacacacaagaactaaaagattaatgattatctgtattctcttcactaattactattatgggggaataatgattagcaaattatatgaattcgagttctctctatacttttattagtaaagcttatcatttaatggactgaagtaagatgtgttacctttattcgagctatttgtagccacactaaatgaaggtgtgtttgaatatggcgcatatatttgcatatgtcccatcattttcttgtcataatggggaattcaggcttagccagtacttctatgggatgagacctataatcccacctatagcagcaagtaactacccttcatgatgatagtgtacatggagctgtgattatgaacatgctgcctttcctgctgccattggcattctctctgtaaattttattatgtgtggtatcacactctccaaaaatgcagggtatttggttacataaccaaactaattaaagaatcagtaatgaaattgcaaaaccatgatcttttttgagctaatgattagttgggctttcctttaaaataatataatcaggccgagtgcagcggctcacacctgtaatctcggcactttggaagtccgcggcgggtggttcacctgaggtcgggagttcaagaccagcctgaccaacatggagaaacccccatctctactaaaaaaaaaatacaaaattagccaggcgtgatggcgcatgcctgtaatcccagctactcgggagactgaggcaggagaatcgcttgaacctgggaggcaggggttgcaatgagccgagatgtgcactccagcctgggcaacaaagagcgaaactccatctcaaaaaaaaaaaaaaaaaaaaaaaaatcatataatcagttcccttttaaatagaaagaggaggaaaaaaaaaaggaaaagggggggtatctcatttgtatacaaatagattttcaatggcatttaataaaagattctttaatggttaaaatgataaagattaattctacatatcttgaaaaatcttaatgacttctgtattcttgacttcttaaaaatattttctttcttttagtgtgcaataagacaaactaaggggaattttttcagcttgtatctcttttacccatattattttccttgcataagcaaaaaaataataattgcctctaaaactgatttgacagtgttcagtgacatcatttaatattggtgatggggtggaagagaaggtagggaatgcccttatggccaaacctaaaacacagtttccttgagccttctgagcaatcttagaattattcagaagctttcaggaaactcaaattctattaatttgatttggttcctttccaaaatgttaatagacatgtatttgcttaaaacgtctacctattccatttaatttcctgctgataaatgtattttatctacaagcaagtagaatattttgttttggttaaagtcaagtttttataaaaggaggggaagtataagagagagtttcctagagatacaatatcatctctggagcaaaatgttgaggccaagtgtaaaaacagactatttctctttacttcctgcagaatttcatttcaagggaccacagcacacccttgaaaattaccatttatttaatgccagttgaaccaatgggtagcaaaagaggagggagggaacatggtcatagagacaaaatctaactactataccaggtcttcctttgtaagaaatattagccctgccaatataaaacgcagatggacatagacagaataagcatcgaggactttttcttatttacttgaaatctagaagctcagtcatctctgctcatccctggacccactggagagttttactcactaacaggtcctttcctggaagaaataacctcatctcctgccatattagtttacaataaaaatcattccaaagtgagccatttcacattgcatttttgccacatgcacatttgctattgaaaccacagattctcagcataagtaagacataggtgtttcagaaacttcataaatacacgatctttcaggtgctcctcaatttcttaatcaaggtatattgaactccagtgattaggatagaacctgaaaacatcctttgttctattggatagtacaacacagcaagagcacacagttatttgtataataaaacaacttaattaatgaggaagatgggatgtttgattcctgctaccaccagttcacttcacaaaggccttcttctggtattaccaggaaaactttcctgcattttctagggaaaaagaaaagtcgtttattaggagcacaatgcagatatgtatctgtgttttcatagcttcagcaaacttcttagtaaaattcccatttcaacaaaaaccaaaatactgattgtttgaatgtagaaaggtatagaataaagactacaaaggggaattttaccagggctccttagaccagcttccccagcataatttttatataactcaagtaagcctctgcttcccctctcctttccagtataatataagaaggtcggaactgtcgcacaaaagaacttgatttcaatatgaaaatataatatgtaattttggggactgcagactttctgcatcaaagatctggacagccttaacttttataaaaataatttttcaatgttctcttttactaaccaggaaaacaagatgttttctgaaattaatgactttttctattttgggtctgttttctaagtttttacaggttgaggtataaagggtcgtcttctcctcatattgcctcttcataatcacctggggctattttttgcaagtcactgcatttttacaaaaaataaaaataaaaagtacatctcacaaatcataaaattctccctagacttcagacagtccttctggagtgaaagaatagaaatacagaaagaaaagaattacagggtggctttctttttattttcctatggttaatgtactgtatggtatatatgtttacagaatgtatctgccttgtgatgttaacaaaatgaatgacaaaaaatagtactgatgtgccatttgacagtttgccttagcatcactgtttatgttcttcttttctgtcctttttggtaaaaaaaaacgcaggttgtattccaaagctgtattaacacaacattctcttccccactcctacccagccttcttcagagctgtgaatttcattacaggagcattgaggcagaaccttgcaggtgtggcccaaaggggctaaagtgggcataggttgggatttacttctgcccgtctaccaaccaaacacgtatctgtgttctcatataagcctgcaaaattttacaccctgcctttcagggagacaggccacatggagcgcatgacctcttgtagtcgtctcctcacagtccttcccactgtgagagaaggaaacttgcagacccccaactggatctgggagcatatttttaagcacagttggcattgcttgaaaaagcaagagagatggactcaaattctatgattgagccatgactgaggaatgtgcccattcgttatagtcgaagatgagtaggatgatatgggtgagaataggagtggctgtagaaatggaatattttacagttatgtatttttttaaggaatagtatttttataatgaaatctatatacattatggagcttgagttggaaaacacccttgactgagctatttcttcattccattaaaggtaactttctggggagtcctatagcactaggccaagccttgggggcatgaacaaagggcctgtcacttggccttgcactgccattacatgagatccagtgtttccaaataggccttggttggaagattgagctttctatacctgccattaggtagattagatagatggcttgatagctctctgggctatacttttaataatatataataatctttgggaaggagatagctattttaaatgcaagcaaagcccagaaactatcaaagtccaaatctttcacatatttaaggagtaattgccacatttgaggttaagggaccacttactatggtgcatttgagaaatatatatgaaacggtgagtcagagccctctgaccatcttcagtctacacataagcagataaaccaccaatataaatcttataggggccagacgaggtggcttatgcctgtaatcccagcactttggggggccaaggcaggaggatagtgtgagcccagaagttcaagaccaggctaggcaacatgttgagaccatgttgtttagtctctactaaaaaatataaaaattagccagcatggtggcacacacctgtagtcccagctacttgggagactgaggcaggaggatcacttgagcccaggaggtggaggctgcagggggctgagatctcaccactccattccagcctgggcaacagagcaagactctgtctcaaaaaaaaaaacaaaaaaacaattatcagttggccttctacataacacagggctacactgtatttttagagttaagtagatacaggaaaagattgtctttatccataaaggagattctgaatttttagagttcctgaatattttcccccaagtttctgtcaaattcctgaagtcccttccctatcacactcagtttcctgaagctcttcccctacacctgctcctctgtctggctaacagagttgtcatgtctcagaaactactcaccactcttgtgagactctcttcccaagcatcatccttcctcaggatgaggcctttttctactacccaagagatcaagaccctttttctaacaagacaaggttatatctactccattttcaagagaaataacccctctggttcccatgcaaatcgcttaaattccttcatcaccagaatctctccaacaggcccaactccagcccagctgtgaacactgctgtcatggagacaactccaaaatgaaagaactatgcaattgcctgaaggtgctaatggagagccagtttactctaatctcttattactaaggaacctctcggtttcgagattaagtgggcagggagacatccagtcacttagttttgcaatgacaggtcttgatatacacagaggccaccaggcaatgcctgatccaaactattctgtatgtagctccaactccaattctgtgatatcctattctggcaggtgggaagagttctattctttgcagggttctggaacattctttcctgctctcaagctcctgacttaggagagtcaaaatcatacaggggttccagaaaatgttgtgtctgatgcagcttctcagtgaatgtaggttgttggtgaaattttcagctttagcatctcactcggggtgagtgatgtctctgtaaatactttcatttgtggttggttggtgggggtgggggtgggagcctgtcgtgcttactctgaattagcttactgggctagctgctgtactttgtaacctgaagtgtactttgactgttctgtttccttcagatgaaaaacaaaataaaaaccgacttcagaaaagacactaccagcgacagctgatgctgtacttgtagcttctctctgttcctctgtacagtattaatagacaataaactgccttttcactgcatct

SEQ ID NO: 21628 - DNA, 2568 bp, Homo sapiens
  source 1..2568: mol_type = unassigned DNA
gttggaaggagcaaaatgggacttttggctgaaagtgctgagctcctgcggtgggggctgaccgcaagccacgccttctgtgcacctggtcggcccagctagctgccgacccggcggggaggggcggggcgggccaatcggcgctgccccagcagggctgcggctgcaggcaggcagagcctcctagcccgtcggtgtctgcgcccatcgatccctttgtctatccccgaccatggcgaagctgattgcgctcaccctcttggggatgggactggcactcttcaggaaccaccagtcttcttaccaaacacgacttaatgctctccgagaggtacaacccgtagaacttcctaactgtaatttagttaaaggaatcgaaactggctctgaagacttggagatactgcctaatggactggctttcattagctctggattaaagtatcctggaataaagagcttcaaccccaacagtcctggaaaaatacttctgatggacctgaatgaagaagatccaacagtgttggaattggggatcactggaagtaaatttgatgtatcttcatttaaccctcatgggattagcacattcacagatgaagataatgccatgtacctcctggtggtgaaccatccagatgccaagtccacagtggagttgtttaaatttcaagaagaagaaaaatcgcttttgcatctaaaaaccatcagacataaacttctgcctaatttgaatgatattgttgctgtgggacctgagcacttttatggcacaaatgatcactattttcttgacccctacttacaatcctgggagatgtatttgggtttagcgtggtcgtatgttgtctactatagtccaagtgaagttcgagtggtggcagaaggatttgattttgctaatggaatcaacatttcacccgatggcaagtatgtctatatagctgagttgctggctcataagattcatgtgtatgaaaagcatgctaattggactttaactccattgaagtcccttgactttaataccctcgtggataacatatctgtggatcctgagacaggagacctttgggttggatgccatcccaatggcatgaaaatcttcttctatgactcagagaatcctcctgcatcagaggtgcttcgaatccagaacattctaacagaagaacctaaagtgacacaggtttatgcagaaaatggcacagtgttgcaaggcagtacagttgcctctgtgtacaaagggaaactgctgattggcacagtgtttcacaaagctctttactgtgagctctaacagaccgatttgcacccatgccatagaaactgaggccattatttcaaccgcttgccatattccgaggacccagtgttcttagctgaacaatgaatgctgaccctaaatgtggacatcatgaagcatcaaagcactgtttaactgggagtgatatgatgtgtagggcttttttttgagaatacactatcaaatcagtcttggaatacttgaaaacctcatttaccataaaaatccttctcactaaaatggataaatcagttatgtcaattgtcagatattaaataacagtgtgtgaccccaaaagtacttaccctaaaacatgtgttgcctggaagcacatgtgtgtatcgctgccttgccatgtcttgttcagaagacacaggggagcagggttagctcacgtgtctttagaactccagtactcacccagggactccagttcacaggccagaaaacatatgcattatgaagttcccctctactccatgcacatagtaagtctgactatggcagtcagacttacttactcccattttcccttcgatatatgactttttctcagtaaatattaacctgaattattccaactccccttgtactcttgctttttcaattctcctgttgcaatgacacataggaaaatcttaaaattcttgggagtgttgtcacacctgaaaattatgagtctctatgatcttggcacaaattgtacatttgagtgtctttgacttggttaaaggaagtttgttcacttcgatgactggatacagaatgaatcccataattgacatgggcgaagctaaaagtgtccccaaagactacactgttgttgaggtggtggtagtgctggtgggtttttgtttaatatttaaacttcttgttgtggaggctgaaaagaaaaaaaataatagaaaggtaaacaaacaaataaatagaaaagatcaacaacccctttggctatctactgagacatgactaggaagaaaacatgactttatcattttgttatagaaactgatatataaaggttacacattttcatttatttgtttttctgatttgaaggtataaccttcatgatgaattacttcttcagggtgttaaggcagtgactttagaaacaaatttttttcttgtttttgttttgtttttgagaccgaatctcactctgttgcccaggctggagtgcagtggtgcgatcttggctcactgcaacttctacctccgaggttcaagagattcttgtgcctcagcctcccggatagctg

SEQ ID NO: 21629 - DNA, 1112 bp, Homo sapiens
  source 1..1112: mol_type = unassigned DNA
accccgagaccatggggaagctcgtggcgctggtcctgctgggggtcggcctgtccttagtcggggagatgttcctggcgtttagagaaagggtgaatgcctctcgagaagtggagccagtagaacctgaaaactgccaccttattgaggaacttgaaactggctctgaagacttggagatactgcctaatggactggctttcattagctctggattaaagtatcctggaataaagagcttcaaccccaacagtcctggaaaaatacttctgatggacctgaatgaagaagatccaacagtgttggaattggggatcactggaagtaaatttgatgtatcttcatttaaccctcatgggattagcacattcacagatgaagataatgccatgtacctcctggtggtgaaccatccagatgccaagtccacagtggagttgtttaaatttcaagaagaagaaaaatcgcttttgcatctaaaaaccatcagacataaacttctgcctaatttgaatgatattgttgctgtgggacctgagcacttttatggcacaaatgatcactattttcttgacccctacttacaatcctgggagatgtatttgggtttagcgtggtcgtatgttgtctactatagtccaagtgaagttcgagtggtggcagaaggatttgattttgctaatggaatcaacatttcacccgatggcaagtatgtctatatagctgagttgctggctcataagattcatgtgtatgaaaagcatgctaattggactttaactccattgaagtcccttgactttaataccctcgtggataacatatctgtggatcctgagacaggagacctttgggttggatgccatcccaatggcatgaaaatcttcttctatgactcagagaatcctcctgcatcagaggtgcttcgaatccagaacattctaacagaagaacctaaagtgacacaggtttatgcagaaaatggcacagtgttgcaaggcagtacagttgcctctgtgtacaaagggaaactgctgattggcacagtgtttcacaaagctctttactgtgagctctaacagaccgatttgcacccatgccatagaaactga

SEQ ID NO: 21630 - DNA, 1745 bp, Homo sapiens
  source 1..1745: mol_type = unassigned DNA
aagtttcacatcatgagcctaatgtaaggcgtgtccgggccgtcccgaaggtatctggggaaataggtttgtgaggacaaagaccagggccaggcccagggcggagcctccgcggccccgacgcagggactcggcctaggcggaggacggggcggagcgcggccggcaccatcgagccgggaagatggcaccgcccacggagctgctggccaggccggagcgaggcagcgcgcccggctcccgcgccatggggcggctggtggctgtgggcttgctggggatcgcgctggcgctcctgggcgagaggcttctggcactcagaaatcgacttaaagcctccagagaagtagaatctgtagaccttccacactgccacctgattaaaggaattgaagctggctctgaagatattgacatacttcccaatggtctggctttttttagtgtgggtctaaaattcccaggactccacagctttgcaccagataagcctggaggaatactaatgatggatctaaaagaagaaaaaccaagggcacgggaattaagaatcagtcgtgggtttgatttggcctcattcaatccacatggcatcagcactttcatagacaacgatgacacagtttatctctttgttgtaaaccacccagaattcaagaatacagtggaaatttttaaatttgaagaagcagaaaattctctgttgcatctgaaaacagtcaaacatgagcttcttccaagtgtgaatgacatcacagctgttggaccggcacatttctatgccacaaatgaccactacttctctgatcctttcttaaagtatttagaaacatacttgaacttacactgggcaaatgttgtttactacagtccaaatgaagttaaagtggtagcagaaggatttgattcagcaaatgggatcaatatttcacctgatgataagtatatctatgttgctgacatattggctcatgaaattcatgttttggaaaaacacactaatatgaatttaactcagttgaaggtacttgagctggatacactggtggataatttatctattgatccttcctcgggggacatctgggtaggctgtcatcctaatggccagaagctcttcgtgtatgacccgaacaatcctccctcgtcagaggttctccgcatccagaacattctatctgagaagcctacagtgactacagtttatgccaacaatgggtctgttctccaaggaagttctgtagcctcagtgtatgatgggaagctgctcataggcactttataccacagagccttgtattgtgaactctaaattgtacttttggcatgaaagtgcgataacttaacaattaattttctatgaattgctaattctgagggaatttaaccagcaacattgacccagaaatgtatggcatgtgtagttaattttattccagtaaggaacggcccttttagttcttagagcacttttaacaaaaaaggaaaatgaacaggttctttaaaatgccaagcaagggacagaaaagaaagctgctttcgaataaagtgaatacattttgcacaaagtaagcctcacctttgccttccaactgccagaacatggattccactgaaatagagtgaattatatttccttaaaatgtgagtgacctcacttctggcactgtgactactatggctgtttagaactactgataacgtattttgatgttttgtacttacatctttgtttaccattaaaa

SEQ ID NO: 21631 - DNA, 1516 bp, Homo sapiens
  source 1..1516: mol_type = unassigned DNA
ggggcggctggtggctgtgggcttgctggggatcgcgctggcctgggcgagaggcttctggcactcagaaatcgacttaaagcctccagagaagtagaatctgtagaccttccacactgccacctgattaaaggaattgaagctggctctgaagatattgacatacttcccaatggtctggctttttttagtgtgggtctaaaattcccaggactccacagctttgcaccagataagcctggaggaatactaatgatggatctaaaagaagaaaaaccaagggcacgggaattaagaatcagtcgtgggtttgatttggcctcattcaatccacatggcatcagcactttcatagacaacgatgacacagtttatctctttgttgtaaaccacccagaattcaagaatacagtggaaatttttaaatttgaagaagcagaaaattctctgttgcatctgaaaacagtcaaacatgagcttcttccaagtgtgaatgacatcacagctgttggaccggcacatttctatgccacaaatgaccactacttctctgatcctttcttaaagtatttagaaacatacttgaacttacactgggcaaatgttgtttactacagtccaaatgaagttaaagtggtagcagaaggatttgattcagcaaatgggatcaatatttcacctgatgataagtatatctatgttgctgacatattggctcatgaaattcatgttttggaaaaacacactaatatgaatttaactcagttgaaggtacttgagctggatacactggtggataatttatctattgatccttcctcgggggacatctgggtaggctgtcatcctaatggccagaagctcttcgtgtatgacccgaacaatcctccctcgtcagaggttctccgcatccagaacattctatctgagaagcctacagtgactacagtttatgccaacaatgggtctgttctccaaggaagttctgtagcctcagtgtatgatgggaagctgctcataggcactttataccacagagccttgtattgtgaactctaaattgtacttttggcatgaaagtgcgataacttaacaattaattttctatgaattgctaattctgagggaatttaaccagcaacattgacccagaaatgtatggcatgtgtagttaattttattccagtaaggaacggcccttttagttcttagagcacttttaacaaaaaaggaaaatgaacaggttctttaaaatgccaagcaagggacagaaaagaaagctgctttcgaataaagtgaatacattttgcacaaagtaagcctcacctttgccttccaactgccagaacatggattccactgaaatagagtgaattatatttccttaaaatgtgagtgacctcacttctggcactgtgactactatggctgtttagaactactgataacgtattttgatgttttgtacttacatctttgtttaccattaaaaagttggagttatattaaagactaa

SEQ ID NO: 21632 - DNA, 1779 bp, Homo sapiens
  source 1..1779: mol_type = unassigned DNA
aagtttcacatcatgagcctaatgtaaggcgtgtccgggccgtcccgaaggtatctggggaaataggtttgtgaggacaaagaccagggccaggcccagggcggagcctccgcggccccgacgcagggactcggcctaggcggaggacggggcggagcgcggccggcaccatcgagccgggaagatggcaccgcccacggagctgctggccaggccggagcgaggcagcgcgcccggctcccgcgccatggggcggctggtggctgtgggcttgctggggatcgcgctggcgctcctgggcgagaggcttctggcactcagaaatcgacttaaagcctccagagaagtagaatctgtagaccttccacactgccacctgattaaaggaattgaagctggctctgaagatattgacatacttcccaatggtctggctttttttagtgtgggtctaaaattcccaggactccacagctttgcaccagataagcctggaggaatactaatgatggatctaaaagaagaaaaaccaagggcacgggaattaagaatcagtcgtgggtttgatttggcctcattcaatccacatggcatcagcactttcatagacaacgatgacacagtttatctctttgttgtaaaccacccagaattcaagaatacagtggaaatttttaaatttgaagaagcagaaaattctctgttgcatctgaaaacagtcaaacatgagcttcttccaagtgtgaatgacatcacagctgttggaccggcacatttctatgccacaaatgaccactacttctctgatcctttcttaaagtatttagaaacatacttgaacttacactgggcaaatgttgtttactacagtccaaatgaagttaaagtggtagcagaaggatttgattcagcaaatgggatcaatatttcacctgatgataagtatatctatgttgctgacatattggctcatgaaattcatgttttggaaaaacacactaatatgaatttaactcagttgaaggtacttgagctggatacactggtggataatttatctattgatccttcctcgggggacatctgggtaggctgtcatcctaatggccagaagctcttcgtgtatgacccgaacaatcctccctcgtcagaggttctccgcatccagaacattctatctgagaagcctacagtgactacagtttatgccaacaatgggtctgttctccaaggaagttctgtagcctcagtgtatgatgggaagctgctcataggcactttataccacagagccttgtattgtgaactctaaattgtacttttggcatgaaagtgcgataacttaacaattaattttctatgaattgctaattctgagggaatttaaccagcaacattgacccagaaatgtatggcatgtgtagttaattttattccagtaaggaacggcccttttagttcttagagcacttttaacaaaaaaggaaaatgaacaggttctttaaaatgccaagcaagggacagaaaagaaagctgctttcgaataaagtgaatacattttgcacaaagtaagcctcacctttgccttccaactgccagaacatggattccactgaaatagagtgaattatatttccttaaaatgtgagtgacctcacttctggcactgtgactactatggctgtttagaactactgataacgtattttgatgttttgtacttacatctttgtttaccattaaaaagttggagttatattaaagactaactaaaatccc

SEQ ID NO: 21633 - DNA, 1726 bp, Homo sapiens
  source 1..1726: mol_type = unassigned DNA
aagtttcacatcatgagcctaatgtaaggcgtgtccgggccgtcccgaaggtatctggggaaataggtttgtgaggacaaagaccagggccaggcccagggcggagcctccgcggccccgacgcagggactcggcctaggcggaggacggggcggagcgcggccggcaccatcgagccgggaagatggcaccgcccacggagctgctggccaggccggagcgaggcagcgcgcccggctcccgcgccatggggcggctggtggctgtgggcttgctggggatcgcgctggcgctcctgggcgagaggcttctggcactcagaaatcgacttaaagcctccagagaagtagaatctgtagaccttccacactgccacctgattaaaggaattgaagctggctctgaagatattgacatacttcccaatggtctggctttttttagtgtgggtctaaaattcccaggactccacagctttgcaccagataagcctggaggaatactaatgatggatctaaaagaagaaaaaccaagggcacgggaattaagaatcagtcgtgggtttgatttggcctcattcaatccacatggcatcagcactttcatagacaacgaattcaagaatacagtggaaatttttaaatttgaagaagcagaaaattctctgttgcatctgaaaacagtcaaacatgagcttcttccaagtgtgaatgacatcacagctgttggaccggcacatttctatgccacaaatgaccactacttctctgatcctttcttaaagtatttagaaacatacttgaacttacactgggcaaatgttgtttactacagtccaaatgaagttaaagtggtagcagaaggatttgattcagcaaatgggatcaatatttcacctgatgataagtatatctatgttgctgacatattggctcatgaaattcatgttttggaaaaacacactaatatgaatttaactcagttgaaggtacttgagctggatacactggtggataatttatctattgatccttcctcgggggacatctgggtaggctgtcatcctaatggccagaagctcttcgtgtatgacccgaacaatcctccctcgtcagaggttctccgcatccagaacattctatctgagaagcctacagtgactacagtttatgccaacaatgggtctgttctccaaggaagttctgtagcctcagtgtatgatgggaagctgctcataggcactttataccacagagccttgtattgtgaactctaaattgtacttttggcatgaaagtgcgataacttaacaattaattttctatgaattgctaattctgagggaatttaaccagcaacattgacccagaaatgtatggcatgtgtagttaattttattccagtaaggaacggcccttttagttcttagagcacttttaacaaaaaaggaaaatgaacaggttctttaaaatgccaagcaagggacagaaaagaaagctgctttcgaataaagtgaatacattttgcacaaagtaagcctcacctttgccttccaactgccagaacatggattccactgaaatagagtgaattatatttccttaaaatgtgagtgacctcacttctggcactgtgactactatggctgtttagaactactgataacgtattttgatgttttgtacttacatctttgtttaccattaaaaagttggagttatattaa

SEQ ID NO: 21634 - DNA, 1105 bp, Homo sapiens
  source 1..1105: mol_type = unassigned DNA
accccgagaccatggggaagctcgtggcgctggtcctgctgggggtcggcctgtccttagtcggggagatgttcctggcgtttagagaaagggtgaatgcctctcgagaagtggagccagtagaacctgaaaactgccaccttattgaggaacttgaaagtggctctgaagatattgatatacttcctagtgggctggcttttatctccagtggattaaaatatccaggcatgccaaactttgcgccagatgaaccaggaaaaatcttcttgatggatctgaatgaacaaaacccaagggcacaagcgctagaaatcagtggtggatttgacaaagaattatttaatccacatgggatcagtattttcatcgacaaagacaatactgtgtatctttatgttgtgaatcatccccacatgaagtccactgtggagatatttaaatttgaggaacaacaacgttctctggtatacctgaaaactataaaacatgaacttctcaaaagtgtgaatgacattgtggttcttggaccagaacagttctatgccaccagagaccactattttaccaactccctcctgtcattttttgagatgatcttggatcttcgctggacttatgttcttttctacagcccaagggaggttaaagtggtggccaaaggattttgtagtgccaatgggatcacagtctcagcagaccagaagtatgtctatgtagctgatgtagcagctaagaacattcacataatggaaaaacatgataactgggatttaactcaactgaaggtgatacagttgggcaccttagtggataacctgactgtcgatcctgccacaggagacattttggcaggatgccatcctaatcctatgaagctactgaactataaccctgaggaccctccaggatcagaagtacttcgcatccagaatgttttgtctgagaagcccagggtgagcaccgtgtatgccaacaatggctctgtgcttcagggcacctctgtggcttctgtgtaccatgggaaaattctcataggcaccgtatttcacaaaactctgtactgtgagctctagactctagatagtaaaaaaaaaaaaaaaaa

SEQ ID NO: 21635 - DNA, 2407 bp, Homo sapiens
  source 1..2407: mol_type = unassigned DNA
cgtgagttgggggaggacgggttgccgactcgcctacctagcggtctcttgattgtcgatattttgttggcataggtttatgtagagacgtatacatatatatagacacactgtctataaatctaggcctgtatccggtgtccgaggcgaactcagtaagatgatgttaagaggaaacctgaagcaagtgcgcattgagaaaaacccggcccgccttcgcgccctggagtccgcggtgggcgagagcgagccggcggccgcggcagccatggcgctcgctcttgccggggagccggcaccgcccgcgcccgcgcctccagaggaccacccggacgaggagatggggttcactatcgacatcaagagtttcctcaagccgggcgagaagacgtacacgcagcgctgccgcctcttcgtgggaaatctgcccaccgacatcacggaggaggacttcaagaggctcttcgaacgctatggcgagcccagcgaagtcttcatcaaccgggaccgtggcttcggcttcatccgcttggaatccagaaccctggctgaaattgcaaaagcagagctggacggcaccattctcaagagcagacctctacggattcgcttcgctacacatggagcagccttgactgtcaagaacctttctccagttgtttccaatgagctgctagagcaagcattttctcagtttggtccagtagagaaagctgttgtggttgtggatgatcgcggtagagctacaggaaaaggttttgtagagtttgcagcaaaacctcctgcacgaaaggctctggaaagatgtggtgatggggcattcttgctaacaacgacccctcgtccagtcattgtggaacccatggagcagtttgatgatgaagatggcttgccagagaagctgatgcagaaaactcaacaatatcataaggaaagagaacaaccaccacgttttgctcaacctgggacatttgaatttgagtatgcatctcgatggaaggctcttgatgaaatggaaaagcagcagcgtgagcaggttgatagaaacatcagagaagccaaagagaaactggaggcagaaatggaagcagctaggcatgaacaccaattaatgctaatgaggcaagatctaatgaggcgtcaagaagaactcagacgcttggaagaactcagaaaccaagagttgcaaaaacggaagcaaatacaactaagacatgaagaggagcatcggcggcgtgaggaagaaatgatccgacacagagaacaggaggaactgaggcgacagcaagagggctttaagccaaactacatggaaaatagagaacaggaaatgagaatgggtgatatgggtccccgtggagcaataaacatgggagatgcgtttagcccagcccctgctggtaaccaaggtcctcctccaatgatgggtatgaatatgaacaacagagcaactatacctggcccaccaatgggtcctggtcctgccatgggaccagaaggagccgcaaatatgggaactccaatgatgccagataatggagcagtgcacaatgacagatttcctcaaggaccaccatctcagatgggttcacctatggggagtagaacaggttctgaaacccctcaagcaccaatgagtggtgtaggtcctgtgagtggtggtcctggtggctttggtagaggaagtcaagggggcaactttgaaggccctaataagcgtcgtagatattaaacattcgttcattcctggctatctagaaaaaaaaaagtcagtggtatgcctttatacttttacctgttatctggaagaaatggttttattgttaatgtatgtagacttaaaagtttttttttttttgtaaaacttgaggtttttgtatttttctttattcatgagctttgtagattagaatggtaatgatgctcatcattttgaatgttgaaatgtgtttgtgactttagctaaatataagtattccatagtactgtgaaatctatgtagttaatctcaataaagaaatcattttggataatttaaaactgttattagtggtattctcttacggtcttactaaactttgctgtaacagtaatgctttggttgctttaactaatcctatcattaaaaatgaaaatgattttgctttttaatttgcgcaagtagcactaaagatagaagcttaattaatgaaagctaatgtcaataaggggtagatagagtagtatatgtgggggtgggagggtatgggagtttaatttgtataaaccactgatgttctgtgaaatcggaatttccagctacatttcatatagcttctgaatattcaggtattctgagacagattattaaggatatctttgtcctgtgctgatttttccaaataaatctttttcatcttgaaaaaaa

SEQ ID NO: 21636 - DNA, 1645 bp, Homo sapiens
  source 1..1645: mol_type = unassigned DNA
attttgaatgtgcagctgcagcgggcgcctgtatccggtgtccgaggcgaactcagtaagatgatgttaagaggaaacctgaagcaagtgcgcattgagaaaaacccggcccgcgcctccagaggaccacccggacgaggagatggggttcactatcgacatcaagagtttcctcaagccgggcgagaagacgtacacgcagcgctgccgcctcttcgtgggaaatctgcccaccgacatcacggaggaggacttcaagaggctcttcgaacgctatggcgagcccagcgaagtcttcatcaaccgggaccgtggcttcggcttcatccgcttggaatccagaaccctggctgaaattgcaaaagcagagctggacggcaccattctcaagagcagacctctacggattcgcttcgctacacatggagcagccttgactgtcaagaacctttctccagttgtttccaatgagctgctagagcaagcattttctcagtttggtccagtagagaaagctgttgtggttgtggatgatcgcggtagagctacaggaaaaggttttgtagagtttgcagcaaaacctcctgcacgaaaggctctggaaagatgtggtgatggggcattcttgctaacaacgacccctcgtccagtcattgtggaacccatggagcagtttgatgatgaagatggcttgccagagaagctgatgcagaaaactcaacaatatcataaggaaagagaacaaccaccacgttttgctcaacctgggacatttgaatttgagtatgcatctcgatggaaggctcttgatgaaatggaaaagcagcagcgtgagcaggttgatagaaacatcagagaagccaaagagaaactggaggcagaaatggaagcagctaggcatgaacaccaattaatgctaatgaggcaagatctaatgaggcgtcaagaagaactcagacgcttggaagaactcagaaaccaagagttgcaaaaacggaagcaaatacaactaagacatgaagaggagcatcggcggcgtgaggaagaaatgatccgacacagagaacaggaggaactgaggcgacagcaagagggctttaagccaaactacatggaaaatagagaacaggaaatgagaatgggtgatatgggtccccgtggagcaataaacatgggagatgcgtttagcccagcccctgctggtaaccaaggtcctcctccaatgatgggtatgaatatgaacaacagagcaactatacctggcccaccaatgggtcctggtcctgccatgggaccagaaggagccgcaaatatgggaactccaatgatgccagataatggagcagtgcacaatgacagatttcctcaaggaccaccatctcagatgggttcacctatggggagtagaacaggttctgaaacccctcaagcaccaatgagtggtgtaggtcctgtgagtggtggtcctggtggctttggtagaggaagtcaagggggcaactttgaaggccctaataagcgtcgtagatattaaacattcgttcattcctggctatctagaaaaaaaaaagtcagtggtatgcctttatacttttacctgttatctggaagaaatggttttattgttaatgtatgtagacttaaa

SEQ ID NO: 21637 - DNA, 866 bp, Homo sapiens
  source 1..866: mol_type = unassigned DNA
ggcggaggggtgggacttgcaccggcgtctcttcttctaactgcagtttgtggcagcgccattttgaatgtgcagctgcagcgggcgcctgtatccggtgtccgaggcgaactcagtaagatgatgttaagaggaaacctgaagcaagtgcgcattgagaaaaacccggcccgccttcgcgccctggagtccgcggtgggcgagagcgagccggcggccgcggcagccatggcgctcgctcttgccggggagccggcaccgcccgcgcccgcgcctccagaggaccacccggacgaggagatggggttcactatcgacatcaagagtttcctcaagccgggcgagaagacgtacacgcagcgctgccgcctcttcgtgggaaatctgcccaccgacatcacggaggaggacttcaagaggctcttcgaacgctatggcgagcccagcgaagtcttcatcaaccgggaccgtggcttcggcttcatccgcttggaatccagaaccctggctgaaattgcaaaagcagagctggacggcaccattctcaagagcagacctctacggattcgcttcgctacacatggagcagccttgactgtcaagaacctttctccagttgtttccaatgagctgctagagcaagcattttctcagtttggtccagtagagaaagctgttgtggttgtggatgatcgcggtagagctacaggaaaaggttttgtagagtttgcagcaaaacctcctgcacgaaaggctctggaaagatgtggtgatggggcattcttgctaacaacgacccctcgtccagtcattgtggaacccatggagcagtttgatgatgaagatggcttgccagagaagctgat

SEQ ID NO: 21638 - DNA, 1139 bp, Homo sapiens
  source 1..1139: mol_type = unassigned DNA
ggcagctctgctggtgcgggggcggcgagcccgggatcgagctaccgcggccgagcgcgccggccaccgcctgcaccgcccttccgcccgccctccggacggccgcagccctgcgggtctccgctccagacccacccccgccccaccccgcgcgcctctgccgcctcttccagagacccagcttgccgagcggccgccgctgccgctgtcgccgccgccgccgccaccgcgccaggttccggccgcggccaccctccgccgtccagggcccctccgtctcggccccgggaccccggctccccgccagccccggccccggccccggcaccatgtcggagaaaagcgtggaggcagcggccgagttgagcgccaaggacctgaaggagaagaaggagaaggtggaggagaaggcaagccggaaagagcgaaagaaagaagtggtggaggaggaggagaacggggctgaggaggaagaagaagaaactgccgaggatggagaggaggaagatgaaggggaagaagaagatgaggaagaagaagaagaggatgatgaagggcccgcgctgaagagagctgccgaagaggaggatgaagcggatcccaaacggcagaagacagaaaatggggcatcggcgtgagcccctgccaacaggctggggttgggaggcctctctgggcctggaggtgggggtgggggcagccaagtccagccactcttcacctggctccctgctctgggccctgcaccagagctgccaccctcttctttctccccagccttctcatttccgcctctccagacactgcgccctccaccctcactctgccattgttccacctcctgacctgctccatctgagctctccagctggcccccaattgctcctctctctctttgctctctttctccctcccctaccagcctcattcttcctccggtagcctctcccacctaacctctgcatcccccagcctcatgtcctgccccatccctatcctgcctgatccctggatctccctcagatcccctcttctcagacagcgccaggccggggtggggccggggttggggccgagccccacagctgcccccctcccctccctttttgtataatttaataaagaaatggtcgcgcttc

SEQ ID NO: 21639 - DNA, 773 bp, Homo sapiens
  source 1..773: mol_type = unassigned DNA
gcggcagctctgctggtgcgggggcggcgagcccgggatcgagctaccgcggccgagcgcgccggccaccgcctgcaccgcccttccgcccgccctccggacggccgcagccctgcgggtctccgctccagacccacccccgccccaccccgcgcgcctctgccgcctcttccagagacccagcttgccgagcggccgccgctgccgctgtcgccgccgccgccgccaccgcgccaggttccggccgcggccaccctccgccgtccagggcccctccgtctcggccccgggaccccggctccccgccagccccggccccggccccggcaccatgtcggagaaaagcgtggaggcagcggccgagttgagcgccaaggacctgaaggagaagaaggagaaggtggaggagaaggcaagccggaaagagcgaaagaaagaagtggtggaggctccagtcccattggtggtgatggtgggcaaggcatgcagccagcctgaggctactccctctcctggtccccacaggaggaggagaacggggctgaggaggaagaagaagaaactgccgaggatggagaggaggaagatgaaggggaagaagaagatgaggaagaagaagaagaggatgatgaagggcccgcgctgaagagagctgccgaagaggaggatgaagcggatcccaaacggcagaagacagaaaatggggcatcggcgtgagcccctgccaacaggctggggttgggaggcctctctgggcctggaggtgggggtgg

SEQ ID NO: 21640 - DNA, 816 bp, Homo sapiens
  source 1..816: mol_type = unassigned DNA
tccagagacccagcttgccgagcggccgagttgagcgccaaggacctgaaggagaagaaggagaaggtggaggagaaggcaagccggaaagagcgaaagaaagaagtggtggaggaggaggagaacggggctgaggaggaagaagaagaaactgccgaggatggagaggaggaagatgaaggggaagaagaagatgaggaagaagaagaagaggatgatgaagggcccgcgctgaagagagctgccgaagaggaggatgaagcggatcccaaacggcagaagacagaaaatggggcatcggcgtgagcccctgccaacaggctggggttgggaggcctctctgggcctggaggtgggggtgggggcagccaagtccagccactcttcacctggctccctgctctgggccctgcaccagagctgccaccctcttctttctccccagccttctcatttccgcctctccagacactgcgccctccaccctcactctgccattgttccacctcctgacctgctccatctgagctctccagctggcccccaattgctcctctctctctttgctctctttctccctcccctaccagcctcattcttcctccggtagcctctcccacctaacctctgcatcccccagcctcatgtcctgccccatccctatcctgcctgatccctggatctccctcagatcccctcttctcagacagcgccaggccggggtggggccggggttggggccgagccccacagctgcccccctcccctccctttttgtataatttaataaagaaatggtcgcgcttctgtttttaa

SEQ ID NO: 21641 - DNA, 1872 bp, Homo sapiens
  source 1..1872: mol_type = unassigned DNA
cctgcatctttttggaaggattctttttataaatcagaaagtgttcgaggttcaaaggtttgcctcggagcgtgtgaacattcctccgctcggttttcaactcgcctccaacctgcgccgcccggccagcatgtctccccgcccgtgaagcggggctgccgcctccctgccgctccggctgccactaacgacccgccctcgccgccacctggccctcctgatcgacgacacacgcacttgaaacttgttctcagggtgtgtggaatcaactttccggaagcaaccagcccaccagaggaggtcccgagcgcgagcggagacgatgcagcggagactggttcagcagtggagcgtcgcggtgttcctgctgagctacgcggtgccctcctgcgggcgctcggtggagggtctcagccgccgcctcaaaagagctgtgtctgaacatcagctcctccatgacaaggggaagtccatccaagatttacggcgacgattcttccttcaccatctgatcgcagaaatccacacagctgaaatcagagctacctcggaggtgtcccctaactccaagccctctcccaacacaaagaaccaccccgtccgatttgggtctgatgatgagggcagatacctaactcaggaaactaacaaggtggagacgtacaaagagcagccgctcaagacacctgggaagaaaaagaaaggcaagcccgggaaacgcaaggagcaggaaaagaaaaaacggcgaactcgctctgcctggttagactctggagtgactgggagtgggctagaaggggaccacctgtctgacacctccacaacgtcgctggagctcgattcacggtaacaggcttctctggcccgtagcctcagcggggtgctctcagctgggttttggagcctcccttctgccttggcttggacaaacctagaattttctccctttatgtatctctatcgattgtgtagcaattgacagagaataactcagaatattgtctgccttaaagcagtacccccctaccacacacacccctgtcctccagcaccatagagaggcgctagagcccattcctctttctccaccgtcacccaacatcaatcctttaccactctaccaaataatttcatattcaagcttcagaagctagtgaccatcttcataatttgctggagaagtgtgtttcttccccttactctcacacctgggcaaactttcttcagtgtttttcatttcttacgttctttcacttcaagggagaatatagaagcatttgatattatctacaaacactgcagaacagcatcatgtcataaacgattctgagccattcacactttttatttaattaaatgtatttaattaaatctcaaatttattttaatgtaaagaacttaaattatgttttaaacacatgccttaaatttgtttaattaaatttaactctggtttctaccagctcatacaaaataaatggtttctgaaaatgtttaagtattaacttacaaggatataggtttttctcatgtatctttttgttcattggcaagatgaaataatttttctagggtaatgccgtaggaaaaataaaacttcacatttatgtggcttgtttatccttagctcacagattgaggtaataatgacactcctagactttgggatcaaataacttagggccaagtcttgggtctgaatttatttaagttcacaacctagggcaagttactctgcctttctaagactcacttacatcttctgtgaaatataattgtaccaacctcatagagtttggtgtcaactaaatgagattatatgtggactaaatatctgtcatatagtaaacactcaataaattgcaacatatt

SEQ ID NO: 21642 - DNA, 952 bp, Homo sapiens
  source 1..952: mol_type = unassigned DNA
cctgcatctttttggaaggattctttttataaatcagaaagtgttcgaggttcaaaggtttgcctcggagcgtgtgaacattcctccgctcggttttcaactcgcctccaacctgcgccgcccggccagcatgtctccccgcccgtgaagcggggctgccgcctccctgccgctccggctgccactaacgacccgccctcgccgccacctggccctcctgatcgacgacacacgcacttgaaacttgttctcagggtgtgtggaatcaactttccggaagcaaccagcccaccagaggaggtcccgagcgcgagcggagacgatgcagcggagactggttcagcagtggagcgtcgcggtgttcctgctgagctacgcggtgccctcctgcgggcgctcggtggagggtctcagccgccgcctcaaaagagctgtgtctgaacatcagctcctccatgacaaggggaagtccatccaagatttacggcgacgattcttccttcaccatctgatcgcagaaatccacacagctgaaatcagagctacctcggaggtgtcccctaactccaagccctctcccaacacaaagaaccaccccgtccgatttgggtctgatgatgagggcagatacctaactcaggaaactaacaaggtggagacgtacaaagagcagccgctcaagacacctgggaagaaaaagaaaggcaagcccgggaaacgcaaggagcaggaaaagaaaaaacggcgaactcgctctgcctggttagactctggagtgactgggagtgggctagaaggggaccacctgtctgacacctccacaacgtcgctggagctcgattcacgtacagcacttctgtggggtttgaaaaaaaaaaaggaaaacaacagaagaacacatcatatgcaactaatgatctcattatttaagagtcccctgttacttctttag

SEQ ID NO: 21643 - DNA, 1674 bp, Homo sapiens
  source 1..1674: mol_type = unassigned DNA
aagcaaccagcccaccagaggaggtagacagacagctatgtatatatatgtgggtttcgctacaagtggctctggaacgaaagggcctggttcgcaaagaagctgacttcagagggggaaactttcttcttttaggaggcggttagccctgttccacgaacccaggagaactgctggccagattaattagacattgctatgggagacgtgtaaacacactacttatcattgatgcatatataaaaccattttattttcgctattatttcagaggaagcgcctctgatttgtttcttttttccctttttgctctttctggctgtgtggtttggagaaagcacagttggagtagccggttgctaaataagtcccgagcgcgagcggagacgatgcagcggagactggttcagcagtggagcgtcgcggtgttcctgctgagctacgcggtgccctcctgcgggcgctcggtggagggtctcagccgccgcctcaaaagagctgtgtctgaacatcagctcctccatgacaaggggaagtccatccaagatttacggcgacgattcttccttcaccatctgatcgcagaaatccacacagctgaaatcagagctacctcggaggtgtcccctaactccaagccctctcccaacacaaagaaccaccccgtccgatttgggtctgatgatgagggcagatacctaactcaggaaactaacaaggtggagacgtacaaagagcagccgctcaagacacctgggaagaaaaagaaaggcaagcccgggaaacgcaaggagcaggaaaagaaaaaacggcgaactcgctctgcctggttagactctggagtgactgggagtgggctagaaggggaccacctgtctgacacctccacaacgtcgctggagctcgattcacggtaacaggcttctctggcccgtagcctcagcggggtgctctcagctgggttttggagcctcccttctgccttggcttggacaaacctagaattttctccctttatgtatctctatcgattgtgtagcaattgacagagaataactcagaatattgtctgccttaaagcagtacccccctaccacacacacccctgtcctccagcaccatagagaggcgctagagcccattcctctttctccaccgtcacccaacatcaatcctttaccactctaccaaataatttcatattcaagcttcagaagctagtgaccatcttcataatttgctggagaagtgtgtttcttccccttactctcacacctgggcaaactttcttcagtgtttttcatttcttacgttctttcacttcaagggagaatatagaagcatttgatattatctacaaacactgcagaacagcatcatgtcataaacgattctgagccattcacactttttatttaattaaatgtatttaattaaatctcaaatttattttaatgtaaagaacttaaattatgttttaaacacatgccttaaatttgtttaattaaatttaactctggtttctaccagctcatacaaaataaatggtttctgaaaatgtttaagtattaacttacaaggatataggtttttctcatgtatctttttgttcattggcaagatgaaataatttttctagggtaatgccgtaggaaaaataaaacttcacattta

SEQ ID NO: 21644 - DNA, 1318 bp, Homo sapiens
  source 1..1318: mol_type = unassigned DNA
ggaaggattctttttataaatcagaaagtgttcgaggttcaaaggtttgcctcggagcgtgtgaacattcctccgctcggttttcaactcgcctccaacctgcgccgcccggccagcatgtctccccgcccgtgaagcggggctgccgcctccctgccgctccggctgccactaacgacccgccctcgccgccacctggccctcctgatcgacgacacacgcacttgaaacttgttctcagggtgtgtggaatcaactttccggaagcaaccagcccaccagaggaggtcccgagcgcgagcggagacgatgcagcggagactggttcagcagtggagcgtcgcggtgttcctgctgagctacgcggtgccctcctgcgggcgctcggtggagggtctcagccgccgcctcaaaagagctgtgtctgaacatcagctcctccatgacaaggggaagtccatccaagatttacggcgacgattcttccttcaccatctgatcgcagaaatccacacagctgaaatcagagctacctcggaggtgtcccctaactccaagccctctcccaacacaaagaaccaccccgtccgatttgggtctgatgatgagggcagatacctaactcaggaaactaacaaggtggagacgtacaaagagcagccgctcaagacacctgggaagaaaaagaaaggcaagcccgggaaacgcaaggagcaggaaaagaaaaaacggcgaactcgctctgcctggttagactctggagtgactgggagtgggctagaaggggaccacctgtctgacacctccacaacgtcgctggagctcgattcacggaggcattgaaattttcagcagagaccttccaaggacatattgcaggattctgtaatagtgaacatatggaaagtattagaaatatttattgtctgtaaatactgtaaatgcattggaataaaactgtctcccccattgctctatgaaactgcacattggtcattgtgaatattttttttttgccaaggctaatccaattattattatcacatttaccataatttattttgtccattgatgtatttattttgtaaatgtatcttggtgctgctgaatttctatattttttgtaacataatgcactttagatatacatatcaagtatgttgataaatgacacaatgaagtgtctctattttgtggttgattttaatgaatgcctaaatataattatccaaattgattttcctttgtgcatgtaaaaataacagtattttaaatttgtaaagaatgtctaataaaatataatctaattacatcatga

SEQ ID NO: 21645 - DNA, 1891 bp, Homo sapiens
  source 1..1891: mol_type = unassigned DNA
cgccagcccgcctgcgccctcgctcgccccgcgcgcgttcctagggcgccacctctttgcgactagctcacttctccggcaggtttgcctcggagcgtgtgaacattcctccgctcggttttcaactcgcctccaacctgcgccgcccggccagcatgtctccccgcccgtgaagcggggctgccgcctccctgccgctccggctgccactaacgacccgccctcgccgccacctggccctcctgatcgacgacacacgcacttgaaacttgttctcagggtgtgtggaatcaactttccggaagcaaccagcccaccagaggaggtcccgagcgcgagcggagacgatgcagcggagactggttcagcagtggagcgtcgcggtgttcctgctgagctacgcggtgccctcctgcgggcgctcggtggagggtctcagccgccgcctcaaaagagctgtgtctgaacatcagctcctccatgacaaggggaagtccatccaagatttacggcgacgattcttccttcaccatctgatcgcagaaatccacacagctgaaatcagagctacctcggaggtgtcccctaactccaagccctctcccaacacaaagaaccaccccgtccgatttgggtctgatgatgagggcagatacctaactcaggaaactaacaaggtggagacgtacaaagagcagccgctcaagacacctgggaagaaaaagaaaggcaagcccgggaaacgcaaggagcaggaaaagaaaaaacggcgaactcgctctgcctggttagactctggagtgactgggagtgggctagaaggggaccacctgtctgacacctccacaacgtcgctggagctcgattcacggtaacaggcttctctggcccgtagcctcagcggggtgctctcagctgggttttggagcctcccttctgccttggcttggacaaacctagaattttctccctttatgtatctctatcgattgtgtagcaattgacagagaataactcagaatattgtctgccttaaagcagtacccccctaccacacacacccctgtcctccagcaccatagagaggcgctagagcccattcctctttctccaccgtcacccaacatcaatcctttaccactctaccaaataatttcatattcaagcttcagaagctagtgaccatcttcataatttgctggagaagtgtgtttcttccccttactctcacacctgggcaaactttcttcagtgtttttcatttcttacgttctttcacttcaagggagaatatagaagcatttgatattatctacaaacactgcagaacagcatcatgtcataaacgattctgagccattcacactttttatttaattaaatgtatttaattaaatctcaaatttattttaatgtaaagaacttaaattatgttttaaacacatgccttaaatttgtttaattaaatttaactctggtttctaccagctcatacaaaataaatggtttctgaaaatgtttaagtattaacttacaaggatataggtttttctcatgtatctttttgttcattggcaagatgaaataatttttctagggtaatgccgtaggaaaaataaaacttcacatttatgtggcttgtttatccttagctcacagattgaggtaataatgacactcctagactttgggatcaaataacttagggccaagtcttgggtctgaatttatttaagttcacaacctagggcaagttactctgcctttctaagactcacttacatcttctgtgaaatataattgtaccaacctcatagagtttggtgtcaactaaatgagattatatgtggactaaatatctgtcatatagtaaacactcaataaattgcaa

SEQ ID NO: 21646 - DNA, 81 bp, Homo sapiens
  source 1..81: mol_type = unassigned DNA
acagcacttctgtggggtttgaaaaaaaaaggaaaacaacagaagaacacatcatatgcaactaatgatctcattatttaa

SEQ ID NO: 21647 - DNA, 854 bp, Homo sapiens
  source 1..854: mol_type = unassigned DNA
atgcagcggagactggttcagcagtggagcgtcgcggtgttcctgctgagctacgcggtgccctcctgcgggcgctcggtggagggtctcagccgccgcctcaaaagagctgtgtctgaacatcagctcctccatgacaaggggaagtccatccaagatttacggcgacgattcttccttcaccatctgatcgcagaaatccacacagctgaaatcagagctacctcggaggtgtcccctaactccaagccctctcccaacacaaagaaccaccccgtccgatttgggtctgatgatgagggcagatacctaactcaggaaactaacaaggtggagacgtacaaagagcagccgctcaagacacctgggaagaaaaagaaaggcaagcccgggaaacgcaaggagcaggaaaagaaaaaacggcgaactcgctctgcctggttagactctggagtgactgggagtgggctagaaggggaccacctgtctgacacctccacaacgtcgctggagctcgattcacgtacagcacttctgtggggtttgaaaaaaaaaaaggaaaacaacagaagaacacatcatatgcaactaatgatctcattatttaagagtcccctgttacttctttagtcatttcctttgactctgctacagataggattataggatgatgcttcaaaggggaccttgaacctattcaccattatttgtctctttaagctggcaaacccatcattaaatagcacataaaatagcaatcatatgggataagtagtacagcttcagtaatcaatgggcagtggcactagaaaaatcttgagcacagtgaatgacctatcctgcaaacatctaat

SEQ ID NO: 21648 - DNA, 890 bp, Homo sapiens
  source 1..890: mol_type = unassigned DNA
ggagagtccagactgacactcgggtcccattcccttctgttgcaggtcccgagcgcgagcggagacgatgcagcggagactggttcagcagtggagcgtcgcggtgttcctgctgagctacgcggtgccctcctgcgggcgctcggtggagggtctcagccgccgcctcaaaagagctgtgtctgaacatcagctcctccatgacaaggggaagtccatccaagatttacggcgacgattcttccttcaccatctgatcgcagaaatccacacagctgaaatcagagctacctcggaggtgtcccctaactccaagccctctcccaacacaaagaaccaccccgtccgatttgggtctgatgatgagggcagatacctaactcaggaaactaacaaggtggagacgtacaaagagcagccgctcaagacacctgggaagaaaaagaaaggcaagcccgggaaacgcaaggagcaggaaaagaaaaaacggcgaactcgctctgcctggttagactctggagtgactgggagtgggctagaaggggaccacctgtctgacacctccacaacgtcgctggagctcgattcacggaggcattgaaattttcagcagagaccttccaaggacatattgcaggattctgtaatagtgaacatatggaaagtattagaaatatttattgtctgtaaatactgtaaatgcattggaataaaactgtctcccccattgctctatgaaactgcacattggtcattgtgaatattttttttttgccaaggctaatccaattattattatcacatttaccataatttattttgtccattgatgtatttattttgtaaatgtatcttggtgctgctgaatttctatattttttgtaacataa

SEQ ID NO: 21649 - DNA, 746 bp, Homo sapiens
  source 1..746: mol_type = unassigned DNA
tctccggcaggtttgcctcggagcgtgtgaacattcctccgctcggttttcaactcgcctccaacctgcgccgcccggccagcatgtctccccgcccgtgaagcggggctgccgcctccctgccgctccggctgccactaacgacccgccctcgccgccacctggccctcctgatcgacgacacacgcacttgaaacttgttctcagggtcccgagcgcgagcggagacgatgcagcggagactggttcagcagtggagcgtcgcggtgttcctgctgagctacgcggtgccctcctgcgggcgctcggtggagggtctcagccgccgcctcaaaagagctgtgtctgaacatcagctcctccatgacaaggggaagtccatccaagatttacggcgacgattcttccttcaccatctgatcgcagaaatccacacagctgaaatcagagctacctcggaggtgtcccctaactccaagccctctcccaacacaaagaaccaccccgtccgatttgggtctgatgatgagggcagatacctaactcaggaaactaacaaggtggagacgtacaaagagcagccgctcaagacacctgggaagaaaaagaaaggcaagcccgggaaacgcaaggagcaggaaaagaaaaaacggcgaactcgctctgcctggttagactctggagtgactgggagtgggctagaaggggaccacctgtctgacacctccacaacgtcgctggagctc

SEQ ID NO: 21650 - DNA, 1214 bp, Homo sapiens
  source 1..1214: mol_type = unassigned DNA
ctgctttctaataattgcctttagtgggaacagaagtctcctttcaagaagcttttaattcattttaagatttaattttatgttttctgaagaacaacaaaaaatatttctggaaaagactgctgagaagatttccctctttcagccagaagagcagagagaagattgtaaatcaaggaaaagatttcccccttcagatctaacgattacattagggctcctgcatctttttggaaggattctttttataaatcagaaagtgttcgaggttcaaaggtttgcctcggagcgtgtgaacattcctccgctcggttttcaactcgcctccaacctgcgccgcccggccagcatgtctccccgcccgtgaagcggggctgccgcctccctgccgctccggctgccactaacgacccgccctcgccgccacctggccctcctgatcgacgacacacgcacttgaaacttgttctcagggtgtgtggaatcaactttccggaagcaaccagcccaccagaggaggtcccgagcgcgagcggagacgatgcagcggagactggttcagcagtggagcgtcgcggtgttcctgctgagctacgcggtgccctcctgcgggcgctcggtggagggtctcagccgccgcctcaaaagagctgtgtctgaacatcagctcctccatgacaaggggaagtccatccaagatttacggcgacgattcttccttcaccatctgatcgcagaaatccacacagctgaaatcagagctacctcggaggtgtcccctaactccaagccctctcccaacacaaagaaccaccccgtccgatttgggtctgatgatgagggcagatacctaactcaggaaactaacaaggtggagacgtacaaagagcagccgctcaagacacctgggaagaaaaagaaaggcaagcccgggaaacgcaaggagcaggaaaagaaaaaacggcgaactcgctctgcctggttagactctggagtgactgggagtgggctagaaggggaccacctgtctgacacctccacaacgtcgctggagctcgattcacggaggcattgaaattttcagcagagaccttccaaggacatattgcaggattctgtaatagtgaacatatggaaagtattagaaatatttattgtctgtaaatactgtaaatgcattggaataaaactgtctcccccattgctctatgaaa

SEQ ID NO: 21651 - DNA, 1619 bp, Homo sapiens
  source 1..1619: mol_type = unassigned DNA
agatctatctggaggagtttctgtggagccagccaccctcaccaggtgccttccattagagtttaatgctttgctgcggtttcctgaaagagccccacagagagtgggtctcgatgggtcctgaaccgcaccacaaccggccagtgagacctcctgctcacatccgtaaagcccactgattcttttactacactttttatgagaacaagacattttctaggaagatggtggcagaaaaagagaccctgagcttaaacaaatgcccagacaagatgccgaagaggaccaagctgctggcacaacagccgctcccggtgcaccagcctcactctctggtttctgagggtttcacagtcaaagccatgatgaaaaactcagtcgtgagaggccctccagctgcaggggcatttaaagaaagaccaaccaagcccacagcatttcgaaaattctatgagcgaggtgacttcccaattgcccttgagcatgattcgaaaggaaacaaaatcgcctggaaggtagaaattgagaagctggattaccatcattatctgcctctgttttttgatgggctttgtgaaatgacatttccctatgagttttttgctcggcaaggaatccacgacatgctggaacacggtgggaacaagatcctacctgtccttccacagctcattatcccgataaaaaatgccttgaacctccgaaaccgacaggtcatctgtgtcactctcaaggtcctccagcatctggttgtgtcagctgagatggtgggcaaggccttggtgccttattaccgtcaaatcctccctgtcctgaacatctttaagaatatgaatgggtcttactctttgcccaggctggagtgcagtggcgcgatcatggctcgttgcaacctcgaccacctgggctcaagtgatcctcccacctcagcctctcaagtagctgagattatagtgaactccggagacggcattgactacagccagcagaagagggagaacattggggacttgatccaggagacactggaggccttcgagcgctacggaggagaaaatgcctttatcaacattaagtacgtggtcccaacctacgagtcttgcttgctaaactaacagtggcagcagctgggacttgaaacctcccgttggtgttgggatcatctgtctctgttgcttttagcatctcattccttgtgacttccacagctttcttttctacagctgctaaaatagtggcttatgggccattggactgttagccctattgagagcaaggctttccaatacataaatagtgtctgtttcttagattacaatagtgtactgtgcttatttgttctaagagaagaattgcttctttatacagctccgacagaagcaggagtccgagttaaaccttcagttgtatagacaataaactataattttcatatgcaattcagcaattgctgttctgtgtgtgcctgccctgggggtgatgtcagaggttgtaagggaagagtttatgctgactgcttactaggtgtttgtcatggaagagaagcatgggttcagcagtgcctctctagcagctgtgcggaataatgtgctttgacattcaataaaactgttgaatct

SEQ ID NO: 21652 - DNA, 1373 bp, Homo sapiens
  source 1..1373: mol_type = unassigned DNA
gtgttgaccagtcgcttagcaaccgggaggcttacctttggaagcttgttgcagctctagccaaggtcctgccctcttcccgccccgcccctagggtccagctcccttcacctaggagctgccaaacatctggatcaacctgggcactacgaggggttgaatttctaccattatcgcgccttttgatatttttttccagacctcctgctcacatccgtaaagcccactgattcttttactacactttttatgagaacaagacattttctaggaagatggtggcagaaaaagagaccctgagcttaaacaaatgcccagacaagatgccgaagaggaccaagctgctggcacaacagccgctcccggtgcaccagcctcactctctggtttctgagggtttcacagtcaaagccatgatgaaaaactcagtcgtgagaggccctccagctgcaggggcatttaaagaaagaccaaccaagcccacagcatttcgaaaattctatgagcgaggtgacttcccaattgcccttgagcatgattcgaaaggaaacaaaatcgcctggaaggtagaaattgagaagctggattaccatcattatctgcctctgttttttgatgggctttgtgaaatgacatttccctatgagttttttgctcggcaaggaatccacgacatgctggaacacggtgggaacaagatcctacctgtccttccacagctcattatcccgataaaaaatgccttgaacctccgaaaccgacaggtcatctgtgtcactctcaaggtcctccagcatctggttgtgtcagctgagatggtgggcaaggccttggtgccttattaccgtcaaatcctccctgtcctgaacatctttaagaatatgaatgtgaactccggagacggcattgactacagccagcagaagagggagaacattggggacttgatccaggagacactggaggccttcgagcgctacggaggagaaaatgcctttatcaacattaagtacgtggtcccaacctacgagtcttgcttgctaaactaacagtggcagcagctgggacttgaaacctcccgttggtgttgggatcatctgtctctgttgcttttagcatctcattccttgtgacttccacagctttcttttctacagctgctaaaatagtggcttatgggccattggactgttagccctattgagagcaaggctttccaatacataaatagtgtctgtttcttagattacaatagtgtactgtgcttatttgttctaagagaagaattgcttctttatacagctccgacagaagcaggagtccgagttaaaccttcagttgtatagacaataaactataattttcatatgcaa

SEQ ID NO: 21653 - DNA, 1503 bp, Homo sapiens
  source 1..1503: mol_type = unassigned DNA
agatctatctggaggagtttctgtggagccagccaccctcaccaggtgccttccattagagtttaatgctttgctgcggtttcctgaaagagccccacagagagtgggtctcgatgggtcctgaaccgcaccacaaccggccagtgagacctcctgctcacatccgtaaagcccactgattcttttactacactttttatgagaacaagacattttctaggaagatggtggcagaaaaagagaccctgagcttaaacaaatgcccagacaagatgccgaagaggaccaagctgctggcacaacagccgctcccggtgcaccagcctcactctctggtttctgagggtttcacagtcaaagccatgatgaaaaactcagtcgtgagaggccctccagctgcaggggcatttaaagaaagaccaaccaagcccacagcatttcgaaaattctatgagcgaggtgacttcccaattgcccttgagcatgattcgaaaggaaacaaaatcgcctggaaggtagaaattgagaagctggattaccatcattatctgcctctgttttttgatgggctttgtgaaatgacatttccctatgagttttttgctcggcaaggaatccacgacatgctggaacacggtgggaacaagatcctacctgtccttccacagctcattatcccgataaaaaatgccttgaacctccgaaaccgacaggtcatctgtgtcactctcaaggtcctccagcatctggttgtgtcagctgagatggtgggcaaggccttggtgccttattaccgtcaaatcctccctgtcctgaacatctttaagaatatgaatgtgaactccggagacggcattgactacagccagcagaagagggagaacattggggacttgatccaggagacactggaggccttcgagcgctacggaggagaaaatgcctttatcaacattaagtacgtggtcccaacctacgagtcttgcttgctaaactaacagtggcagcagctgggacttgaaacctcccgttggtgttgggatcatctgtctctgttgcttttagcatctcattccttgtgacttccacagctttcttttctacagctgctaaaatagtggcttatgggccattggactgttagccctattgagagcaaggctttccaatacataaatagtgtctgtttcttagattacaatagtgtactgtgcttatttgttctaagagaagaattgcttctttatacagctccgacagaagcaggagtccgagttaaaccttcagttgtatagacaataaactataattttcatatgcaattcagcaattgctgttctgtgtgtgcctgccctgggggtgatgtcagaggttgtaagggaagagtttatgctgactgcttactaggtgtttgtcatggaagagaagcatgggttcagcagtgcctctctagcagctgtgcggaataatgtgctttgacattcaataaaactgttgaatcta

SEQ ID NO: 21654 - DNA, 1276 bp, Homo sapiens
  source 1..1276: mol_type = unassigned DNA
atgatagtgtttgtcaggttcaactccagccatggtttcccagtggaggtcgattctgacaccagcatcttccagctcaaggaggtggttgctaagcgacagggggttccggctgaccagttgcgtgtgattttcgcagggaaggagctgaggaatgactggactgtgcagaattgtgacctggatcagcagagcattgttcacattgtgcagagaccgtggagaaaaggtcaagaaatgaatgcaactggaggcgacgaccccagaaacgcggcgggaggctgtgagcgggagccccagagcttgactcgggtggacctcagcagctcagtcctcccaggagactctgtggggctggctgtcattctgcacactgacagcaggaaggactcaccaccagctggaagtccagggtccatcttgctgggatgatgttttaattccaaaccggatgagtggtgaatgccaatccccacactgccctgggactagtgcagaatttttctttaaatgtggagcacaccccacctctgacaaggaaacatcagtagctttgcacctgatcgcaacaaatagtcggaacatcacttgcattacgtgcacagacgtcaggagccccgtcctggttttccagtgcaactcccgccacgtgatttgcttagactgtttccacttatactgtgtgacaagactcaatgatcggcagtttgttcacgaccctcaacttggctactccctgccttgtgtggctggctgtcccaactccttgattaaagagctccatcacttcaggattctgggagaagagcagtacaaccggtaccagcagtatggtgcagaggagtgtgtcctgcagatggggggcgtgttatgcccccgccctggctgtggagcggggctgctgccggagcctgaccagaggaaagtcacctgcgaagggggcaatggcctgggctgtgggtttgccttctgccgggaatgtaaagaagcgtaccatgaaggggagtgcagtgccgtatttgaagcctcaggaacaactactcaggcctacagagtcgatgaaagagccgccgagcaggctcgttgggaagcagcctccaaagaaaccatcaagaaaaccaccaagccctgtccccgctgccatgtaccagtggaaaaaaatggaggctgcatgcacatgaagtgtccgcagccccagtgcaggctcgagtggtgctggaactgtggctgcgagtggaaccgcgtctgcatgggggaccactggttcgacgtgtag

SEQ ID NO: 21655 - DNA, 1505 bp, Homo sapiens
  source 1..1505: mol_type = unassigned DNA
gatttaacccaggagagccgctggtgggaggcgcggctggcgccgctgcgcgcatgggcctgttcctggcccgcagccgccacctacccagtgaccatgatagtgtttgtcaggttcaactccagccatggtttcccagtggaggtcgattctgacaccagcatcttccagctcaaggaggtggttgctaagcgacagggggttccggctgaccagttgcgtgtgattttcgcagggaaggagctgaggaatgactggactgtgcagaattgtgacctggatcagcagagcattgttcacattgtgcagagaccgtggagaaaaggtcaagaaatgaatgcaactggaggcgacgaccccagaaacgcggcgggaggctgtgagcgggagccccagagcttgactcgggtggacctcagcagctcagtcctcccaggagactctgtggggctggctgtcattctgcacactgacagcaggaaggactcaccaccagctggaagtccagcaggtagatcaatctacaacagcttttatgtgtattgcaaaggcccctgtcaaagagtgcagccgggaaaactcagggtacagtgcagcacctgcaggcaggcaacgctcaccttgacccagggtccatcttgctgggatgatgttttaattccaaaccggatgagtggtgaatgccaatccccacactgccctgggactagtgcagaatttttctttaaatgtggagcacaccccacctctgacaaggaaacatcagtagctttgcacctgatcgcaacaaatagtcggaacatcacttgcattacgtgcacagacgtcaggagccccgtcctggttttccagtgcaactcccgccacgtgatttgcttagactgtttccacttatactgtgtgacaagactcaatgatcggcagtttgttcacgaccctcaacttggctactccctgccttgtgtggctggctgtcccaactccttgattaaagagctccatcacttcaggattctgggagaagagcagtacaaccggtaccagcagtatggtgcagaggagtgtgtcctgcagatggggggcgtgttatgcccccgccctggctgtggagcggggctgctgccggagcctgaccagaggaaagtcacctgcgaagggggcaatggcctgggctgtgggtatggacaacgaagaacaaaataagctgcctcagggagaagtgagtgcctcattcaatacatcgttcaaggaaaagtcattggtagcaaagctatagaagaattacagagttccagatgtggaaaaagccctagacgtcattaactccagtgattatcaggatgtggttcacagatttattgtaagatgcctgtgaattcacccgtgcttaatttttttttccctcaattatcaagatagaaaaagtacaactcttaccatgtgggtatgcaagaaatgttagctgttacaaaaaaaatcgcgtataaaaaagttgaaaaccaaat

SEQ ID NO: 21656 - DNA, 1157 bp, Homo sapiens
  source 1..1157: mol_type = unassigned DNA
atgatagtgtttgtcaggttcaactccagccatggtttcccagtggaggtcgattctgacaccagcatcttccagctcaaggaggtggttgctaagcgacagggggttccggctgaccagttgcgtgtgattttcgcagggaaggagctgaggaatgactggactgtgcagcaggtagatcaatctacaacagcttttatgtgtattgcaaaggcccctgtcaaagagtgcagccgggaaaactcagggtacagtgcagcacctgcaggcaggcaacgctcaccttgacccagggtccatcttgctgggatgatgttttaattccaaaccggatgagtggtgaatgccaatccccacactgccctgggactagtgcagaatttttctttaaatgtggagcacaccccacctctgacaaggaaacatcagtagctttgcacctgatcgcaacaaatagtcggaacatcacttgcattacgtgcacagacgtcaggagccccgtcctggttttccagtgcaactcccgccacgtgatttgcttagactgtttccacttatactgtgtgacaagactcaatgatcggcagtttgttcacgaccctcaacttggctactccctgccttgtgtggctggctgtcccaactccttgattaaagagctccatcacttcaggattctgggagaagagcagtacaaccggtaccagcagtatggtgcagaggagtgtgtcctgcagatggggggcgtgttatgcccccgccctggctgtggagcggggctgctgccggagcctgaccagaggaaagtcacctgcgaagggggcaatggcctgggctgtgggtttgccttctgccgggaatgtaaagaagcgtaccatgaaggggagtgcagtgccgtatttgaagcctcaggaacaactactcaggcctacagagtcgatgaaagagccgccgagcaggctcgttgggaagcagcctccaaagaaaccatcaagaaaaccaccaagccctgtccccgctgccatgtaccagtggaaaaaaatggaggctgcatgcacatgaagtgtccgcagccccagtgcaggctcgagtggtgctggaactgtggctgcgagtggaaccgcgtctgcatgggggaccactggttcgacgtgtag

SEQ ID NO: 21657 - DNA, 794 bp, Homo sapiens
  source 1..794: mol_type = unassigned DNA
gacagggggttccggctgaccagttgcgtgtgattttcgcagggaaggagctgaggaatgactggactgtgcagaattgtgacctggatcagcagagcattgttcacattgtgcagagaccgtggagaaaaggtcaagaaatgaatgcaactggaggcgacgaccccagaaacgcggcgggaggctgtgagcgggagccccagagcttgactcgggtggacctcagcagctcagtcctcccaggagactctgtggggctggctgtcattctgcacactgacagcaggaaggactcaccaccagctggaagtccagcaggtagatcaatctacaacagcttttatgtgtattgcaaaggcccctgtcaaagagtgcagccgggaaaactcagggtacagtgcagcacctgcaggcaggcaacgctcaccttgacccagggtccatcttgctgggatgatgttttaattccaaaccggatgagtggtgaatgccaatccccacactgccctgggactagtgcagaatttttctttaaatgtggagcacaccccacctctgacaaggaaacatcagtagctttgcacctgatcgcaacaaatagtcggaacatcacttgcattacgtgcacagacgtcaggagccccgtcctggttttccagtgcaactcccgccacgtgatttgcttagactgtttccacttatactgtgtgacaagactcaatgatcggcagtttgttcacgaccctcaacttggctactccctgccttgtgtggtaagccttctgccttcacaa

SEQ ID NO: 21658 - DNA, 2514 bp, Homo sapiens
  source 1..2514: mol_type = unassigned DNA
cctggaggatttaacccaggagagccgctggtgggaggcgcggctggcgccgctgcgcgcatgggcctgttcctggcccgcagccgccacctacccagtgaccatgatagtgtttgtcaggttcaactccagccatggtttcccagtggaggtcgattctgacaccagcatcttccagctcaaggaggtggttgctaagcgacagggggttccggctgaccagttgcgtgtgattttcgcagggaaggagctgaggaatgactggactgtgcaggaatttttctttaaatgtggagcacaccccacctctgacaaggaaacatcagtagctttgcacctgatcgcaacaaatagtcggaacatcacttgcattacgtgcacagacgtcaggagccccgtcctggttttccagtgcaactcccgccacgtgatttgcttagactgtttccacttatactgtgtgacaagactcaatgatcggcagtttgttcacgaccctcaacttggctactccctgccttgtgtggctggctgtcccaactccttgattaaagagctccatcacttcaggattctgggagaagagcagtacaaccggtaccagcagtatggtgcagaggagtgtgtcctgcagatggggggcgtgttatgcccccgccctggctgtggagcggggctgctgccggagcctgaccagaggaaagtcacctgcgaagggggcaatggcctgggctgtgggtttgccttctgccgggaatgtaaagaagcgtaccatgaaggggagtgcagtgccgtatttgaagcctcaggaacaactactcaggcctacagagtcgatgaaagagccgccgagcaggctcgttgggaagcagcctccaaagaaaccatcaagaaaaccaccaagccctgtccccgctgccatgtaccagtggaaaaaaatggaggctgcatgcacatgaagtgtccgcagccccagtgcaggctcgagtggtgctggaactgtggctgcgagtggaaccgcgtctgcatgggggaccactggttcgacgtgtagccagggcggccgggcgccccatcgccacatcctgggggagcatacccagtgtctaccttcattttctaattctcttttcaaacacacacacacacgcgcgcgcgcgcacacacactcttcaagtttttttcaaagtccaactacagccaaattgcagaagaaactcctggatccctttcactatgtccatgaaaaacagcagagtaaaattacagaagaagctcctgaatccctttcagtttgtccacacaagacagcagagccatctgcgacaccaccaacaggcgttctcagcctccggatgacacaaataccagagcacagattcaagtgcaatccatgtatctgtatgggtcattctcacctgaattcgagacaggcagaatcagtagctggagagagagttctcacatttaatatcctgccttttaccttcagtaaacaccatgaagatgccattgacaaggtgtttctctgtaaaatgaactgcagtgggttctccaaactagattcatggctttaacagtaatgttcttatttaaattttcagaaagcatctattcccaaagaaccccaggcaatagtcaaaaacatttgtttatccttaagaattccatctatataaatcgcattaatgaaataccaactatgcgtaaatcaacttgtcacaaagtgagaaattatgaaagttaatttgaatgttgaatgtttgaattacagggaagaaatcaagttaatgtactttcattccctttcatgatttgcaactttagaaagaaattgtttttctgaaagtatcaccaaaaaatctatagtttgattctgagtattcattttgcaacttggagattttgctaatacatttggctccactgtaaatttaatagataaagtgcctataaaggaaacacgtttagaaatgatttcaaaatgatattcaatcttaacaaaagtgaacattattaaatcagaatctttaaagaggagcctttccagaactaccaaaatgaagacacgcccgactctctccatcagaagggtttatacccctttggcacaccctctctgtccaatctgcaagtcccagggagctctgcataccaggggttccccaggagagaccttctcttaggacagtaaactcactagaatattccttatgttgacatggattggatttcagttcaatcaaactttcagcttttttttcagccattcacaacacaatcaaaagattaacaacactgcatgcggcaaaccgcatgctcttacccacactacgcagaagagaaagtacaaccactatcttttgttctacctgtattgtctgacttctcaggaagatcgtgaacataactgagggcatgagtctcactagcacatggaggcccttttggatttagagactgtaaattattaaatcggcaacagggcttctctttttagatgtagcactgaaa

SEQ ID NO: 21659 - DNA, 2877 bp, Homo sapiens
  source 1..2877: mol_type = unassigned DNA
cctggaggatttaacccaggagagccgctggtgggaggcgcggctggcgccgctgcgcgcatgggcctgttcctggcccgcagccgccacctacccagtgaccatgatagtgtttgtcaggttcaactccagccatggtttcccagtggaggtcgattctgacaccagcatcttccagctcaaggaggtggttgctaagcgacagggggttccggctgaccagttgcgtgtgattttcgcagggaaggagctgaggaatgactggactgtgcagaattgtgacctggatcagcagagcattgttcacattgtgcagagaccgtggagaaaaggtcaagaaatgaatgcaactggaggcgacgaccccagaaacgcggcgggaggctgtgagcgggagccccagagcttgactcgggtggacctcagcagctcagtcctcccaggagactctgtggggctggctgtcattctgcacactgacagcaggaaggactcaccaccagctggaagtccagcaggtagatcaatctacaacagcttttatgtgtattgcaaaggcccctgtcaaagagtgcagccgggaaaactcagggtacagtgcagcacctgcaggcaggcaacgctcaccttgacccaggaatttttctttaaatgtggagcacaccccacctctgacaaggaaacatcagtagctttgcacctgatcgcaacaaatagtcggaacatcacttgcattacgtgcacagacgtcaggagccccgtcctggttttccagtgcaactcccgccacgtgatttgcttagactgtttccacttatactgtgtgacaagactcaatgatcggcagtttgttcacgaccctcaacttggctactccctgccttgtgtggctggctgtcccaactccttgattaaagagctccatcacttcaggattctgggagaagagcagtacaaccggtaccagcagtatggtgcagaggagtgtgtcctgcagatggggggcgtgttatgcccccgccctggctgtggagcggggctgctgccggagcctgaccagaggaaagtcacctgcgaagggggcaatggcctgggctgtgggtttgccttctgccgggaatgtaaagaagcgtaccatgaaggggagtgcagtgccgtatttgaagcctcaggaacaactactcaggcctacagagtcgatgaaagagccgccgagcaggctcgttgggaagcagcctccaaagaaaccatcaagaaaaccaccaagccctgtccccgctgccatgtaccagtggaaaaaaatggaggctgcatgcacatgaagtgtccgcagccccagtgcaggctcgagtggtgctggaactgtggctgcgagtggaaccgcgtctgcatgggggaccactggttcgacgtgtagccagggcggccgggcgccccatcgccacatcctgggggagcatacccagtgtctaccttcattttctaattctcttttcaaacacacacacacacgcgcgcgcgcgcacacacactcttcaagtttttttcaaagtccaactacagccaaattgcagaagaaactcctggatccctttcactatgtccatgaaaaacagcagagtaaaattacagaagaagctcctgaatccctttcagtttgtccacacaagacagcagagccatctgcgacaccaccaacaggcgttctcagcctccggatgacacaaataccagagcacagattcaagtgcaatccatgtatctgtatgggtcattctcacctgaattcgagacaggcagaatcagtagctggagagagagttctcacatttaatatcctgccttttaccttcagtaaacaccatgaagatgccattgacaaggtgtttctctgtaaaatgaactgcagtgggttctccaaactagattcatggctttaacagtaatgttcttatttaaattttcagaaagcatctattcccaaagaaccccaggcaatagtcaaaaacatttgtttatccttaagaattccatctatataaatcgcattaatgaaataccaactatgcgtaaatcaacttgtcacaaagtgagaaattatgaaagttaatttgaatgttgaatgtttgaattacagggaagaaatcaagttaatgtactttcattccctttcatgatttgcaactttagaaagaaattgtttttctgaaagtatcaccaaaaaatctatagtttgattctgagtattcattttgcaacttggagattttgctaatacatttggctccactgtaaatttaatagataaagtgcctataaaggaaacacgtttagaaatgatttcaaaatgatattcaatcttaacaaaagtgaacattattaaatcagaatctttaaagaggagcctttccagaactaccaaaatgaagacacgcccgactctctccatcagaagggtttatacccctttggcacaccctctctgtccaatctgcaagtcccagggagctctgcataccaggggttccccaggagagaccttctcttaggacagtaaactcactagaatattccttatgttgacatggattggatttcagttcaatcaaactttcagcttttttttcagccattcacaacacaatcaaaagattaacaacactgcatgcggcaaaccgcatgctcttacccacactacgcagaagagaaagtacaaccactatcttttgttctacctgtattgtctgacttctcaggaagatcgtgaacataactgagggcatgagtctcactagcacatggaggcccttttggatttagagactgtaaattattaaatcggcaacagggcttctctttttagatgtagcactgaaa

SEQ ID NO: 21660 - DNA, 4180 bp, Homo sapiens
  source 1..4180: mol_type = unassigned DNA
cctggaggatttaacccaggagagccgctggtgggaggcgcggctggcgccgctgcgcgcatgggcctgttcctggcccgcagccgccacctacccagtgaccatgatagtgtttgtcaggttcaactccagccatggtttcccagtggaggtcgattctgacaccagcatcttccagctcaaggaggtggttgctaagcgacagggggttccggctgaccagttgcgtgtgattttcgcagggaaggagctgaggaatgactggactgtgcagaattgtgacctggatcagcagagcattgttcacattgtgcagagaccgtggagaaaaggtcaagaaatgaatgcaactggaggcgacgaccccagaaacgcggcgggaggctgtgagcgggagccccagagcttgactcgggtggacctcagcagctcagtcctcccaggagactctgtggggctggctgtcattctgcacactgacagcaggaaggactcaccaccagctggaagtccagcaggtagatcaatctacaacagcttttatgtgtattgcaaaggcccctgtcaaagagtgcagccgggaaaactcagggtacagtgcagcacctgcaggcaggcaacgctcaccttgacccagggtccatcttgctgggatgatgttttaattccaaaccggatgagtggtgaatgccaatccccacactgccctgggactagtgcagaatttttctttaaatgtggagcacaccccacctctgacaaggaaacatcagtagctttgcacctgatcgcaacaaatagtcggaacatcacttgcattacgtgcacagacgtcaggagccccgtcctggttttccagtgcaactcccgccacgtgatttgcttagactgtttccacttatactgtgtgacaagactcaatgatcggcagtttgttcacgaccctcaacttggctactccctgccttgtgtggctggctgtcccaactccttgattaaagagctccatcacttcaggattctgggagaagagcagtacaaccggtaccagcagtatggtgcagaggagtgtgtcctgcagatggggggcgtgttatgcccccgccctggctgtggagcggggctgctgccggagcctgaccagaggaaagtcacctgcgaagggggcaatggcctgggctgtgggtttgccttctgccgggaatgtaaagaagcgtaccatgaaggggagtgcagtgccgtatttgaagcctcaggaacaactactcaggcctacagagtcgatgaaagagccgccgagcaggctcgttgggaagcagcctccaaagaaaccatcaagaaaaccaccaagccctgtccccgctgccatgtaccagtggaaaaaaatggaggctgcatgcacatgaagtgtccgcagccccagtgcaggctcgagtggtgctggaactgtggctgcgagtggaaccgcgtctgcatgggggaccactggttcgacgtgtagccagggcggccgggcgccccatcgccacatcctgggggagcatacccagtgtctaccttcattttctaattctcttttcaaacacacacacacacgcgcgcgcgcgcacacacactcttcaagtttttttcaaagtccaactacagccaaattgcagaagaaactcctggatccctttcactatgtccatgaaaaacagcagagtaaaattacagaagaagctcctgaatccctttcagtttgtccacacaagacagcagagccatctgcgacaccaccaacaggcgttctcagcctccggatgacacaaataccagagcacagattcaagtgcaatccatgtatctgtatgggtcattctcacctgaattcgagacaggcagaatcagtagctggagagagagttctcacatttaatatcctgccttttaccttcagtaaacaccatgaagatgccattgacaaggtgtttctctgtaaaatgaactgcagtgggttctccaaactagattcatggctttaacagtaatgttcttatttaaattttcagaaagcatctattcccaaagaaccccaggcaatagtcaaaaacatttgtttatccttaagaattccatctatataaatcgcattaatgaaataccaactatgcgtaaatcaacttgtcacaaagtgagaaattatgaaagttaatttgaatgttgaatgtttgaattacagggaagaaatcaagttaatgtactttcattccctttcatgatttgcaactttagaaagaaattgtttttctgaaagtatcaccaaaaaatctatagtttgattctgagtattcattttgcaacttggagattttgctaatacatttggctccactgtaaatttaatagataaagtgcctataaaggaaacacgtttagaaatgatttcaaaatgatattcaatcttaacaaaagtgaacattattaaatcagaatctttaaagaggagcctttccagaactaccaaaatgaagacacgcccgactctctccatcagaagggtttatacccctttggcacaccctctctgtccaatctgcaagtcccagggagctctgcataccaggggttccccaggagagaccttctcttaggacagtaaactcactagaatattccttatgttgacatggattggatttcagttcaatcaaactttcagcttttttttcagccattcacaacacaatcaaaagattaacaacactgcatgcggcaaaccgcatgctcttacccacactacgcagaagagaaagtacaaccactatcttttgttctacctgtattgtctgacttctcaggaagatcgtgaacataactgagggcatgagtctcactagcacatggaggcccttttggatttagagactgtaaattattaaatcggcaacagggcttctctttttagatgtagcactgaaatccttgctggagggaagagaggggatgaactcaagttttccacatcctgggacacctgtccctcttttcctaactgcctaagataacccatttcttccaaccatctgaggacagtcccgtcgtctcagaggccctgcaccggggagagactgggctctgcagcagccacatcagcattcacagcttcatgtggcttcactgtctgaaaatctaccgactccaacatggccccacggtgacaacagacctgtgacaggaagcccaaagctcacatagaaatggtggacagatcaaagtctctatagtaagggaaaaaaagagaggtggcaggcatgagccccctgcacccagtggctcgtgtccatactgagtccagaccctgatcaaggcctgacttagtgtcactggcagtcccactaaattacacttccttacactggcccgatgcgacaaatcaggtggctcccttctgtcacgtggagcacacagtgttttccatcatccatagctttcttcctgatggtgtttgcattattgcgccttcccaatctgcatgctgcgttgggcttgcggtgcctgaacaaggtttgctcccatgagctcaggcaccctaggatcccctgttagactattaggctgtccagcatggtctcctttcccttcttggtggtggtcttttccctttccagaatagaacagtgattcttaaaataagttagagcaggccgggcgcggtggctcatgcctgtaatcccagcactttgggaggccgaggtgggtggatcacgaggtcaggagttcaagaccagcctggccaagatgatgaaaccccgtctctattaaaaatacaaaaattagctgggcgtggtggcaggcacctgtaatcccagcttcctgggaggctgaggcaggagaatcacttgaacccggggggcagaggttgcagtgagccgagatcacgccactgaactccagcctgggcaacagagtgagactctgtctcaaaaaaaaaaaaaaaacaaaaacaaaaaagcaagatcatccactacacatgaacatgaatcacagtattatttgcacaggaagggtgtaacaaaatatgaatgtatcaaaaaatagaaataaagtctttgcagaaaaagtctgtttttctctgaagtgtgttgagattatctgacaactctaagattgtacttaaattgtcaataaagcatcaaaa

SEQ ID NO: 21661 - DNA, 609 bp, Homo sapiens
  source 1..609: mol_type = unassigned DNA
atgagtggtgaatgccaatccccacactgccctgggactagtgcagaatttttctttaaatgtggagcacaccccacctctgacaaggaaacatcagtagctttgcacctgatcgcaacaaatagtcggaacatcacttgcattacgtgcacagacgtcaggagccccgtcctggttttccagtgcaactcccgccacgtgatttgcttagactgtttccacttatactgtgtgacaagactcaatgatcggcagtttgttcacgaccctcaacttggctactccctgccttgtgtggctggctgtcccaactccttgattaaagagctccatcacttcaggattctgggagaagagcagtacaaccggtaccagcagtatggtgcagaggagtgtgtcctgcagatggggggcgtgttatgcccccgccctggctgtggagcggggctgctgccggagcctgaccagaggaaagtcacctgcgaagggggcaatggcctgggctgtgggtttgccttctgccgggaatgtaaagaagcgtaccatgaaggggagtgcagtgccgtatttgaagcctcaggaacaactactcagcattcagggtgcacc

SEQ ID NO: 21662 - DNA, 426 bp, Homo sapiens
  source 1..426: mol_type = unassigned DNA
tcagtgtttgtcaggttcaactccagccatggtttcccagtggaggtcgattctgacaccagcatcttccagctcaaggaggtggttgctaagcgacagggggttccggctgaccagttgcgtgtgattttcgcagggaaggagctgaggaatgactggactgtgcagaattgtgacctggatcagcagagcattgttcacattgtgcagagaccgtggagaaaaggtcaagaaatgaatgcaactggaggcgacgaccccagaaacgcggcgggaggctgtgagcgggagccccagagcttgactcgggtggacctcagcagctcagtcctcccaggagactctgtggggctggctgtcattctgcacactgacagcaggaaggactcaccaccagctggaagtccaggtaattgtctgcatgga

SEQ ID NO: 21663 - DNA, 758 bp, Homo sapiens
  source 1..758: mol_type = unassigned DNA
gagtagttctcctgggtccgctctgcgggcttctgggagatgtagtttctggtctgtaggcaggacggaaggagcgggggaggccccttacgcaaactacaattcccggcggggagcgcggtgaagcgggggtgggatctgaacatggcggcggtggtagctgctacggcgctgaagggccggggggcgagaaatgcccgcgtcctccgggggattctcgcaggagccacagctaacaaggcttctcataacaggacccgggccctgcaaagccacagctccccagagggcaaggaggaacctgaacccctatccccggagctggaatacattcccagaaagaggggcaagaaccccatgaaagctgtgggactggcctgggccatcggcttcccttgtggtatcctcctcttcatcctcaccaagcgggaagtggacaaggaccgtgtgaagcagatgaaggctcggcagaacatgcggttgtccaacacgggcgagtatgagagccagaggttcagggcttcctcccagagtgccccgtcccctgatgttgggtctggggtgcagacctgaggagcgctgcgaccctcctaggctattgactgttaagtcctcaggtttggcccagattccagttcgtgcctctgaggtccaccagagggcgcatgaagcccaggctgttgccaaaccctaccctgccccacaccaaggagccagccaaaggcaaataaagttattgagtgtttagtagaaaggaa

SEQ ID NO: 21664 - DNA, 2991 bp, Homo sapiens
  source 1..2991: mol_type = unassigned DNA
cagagccggcaggcaggttccccgcggggggccggggccgggccgttgcctagcaacgccgagccccgcccggccggcgcgtgcctgcccccagcatggcttggcagggctggcccgcggcgtggcagtgggtcgccggctgctggctcctcctcgtccttgtcctcgtcctacttgtgagcccccgcggctgccgagcgcggcggggcctccgcggtctgctcatggcgcacagccagcggctgctcttccgaatcgggtacagcctgtacacccgcacctggctcgggtacctcttctaccgacagcagctgcgcagggctcggaatcgctaccctaaaggccactcgaaaacccagccccgcctcttcaatggagtgaaggtgcttcccatccctgtcctctcggacaactacagctacctcatcatcgacacccaggcccagctggctgtggctgtggacccttcagaccctcgggctgtgcaggcttccattgaaaaggaaggggtcaccttggtcgccattctgtgtactcacaagcactgggaccacagtggagggaaccgtgacctcagccggcggcaccgggactgtcgggtgtacgggagccctcaggacggcatcccctacctcacccatcccctgtgtcatcaagatgtggtcagcgtgggacggcttcagatccgggccctggctacacctggccacacacaaggccatctggtctacctactggatggggagccctacaagggtccctcctgcctcttctcaggggacctgctcttcctctctggctgtgggcggacctttgagggcaatgcagagaccatgctgagctcactggacactgtgctggggctaggggatgacacccttctgtggcctggtcatgagtatgcagaggagaacctgggctttgcaggtgtggtggagcccgagaacctggcccgggagaggaagatgcagtgggtgcagcggcagcggctggagcgcaagggcacgtgcccatctaccctgggagaggagcgctcctacaacccgttcctgagaacccactgcctggcgctacaggaggctctggggccggggccgggccccactggggatgatgactactcccgggcccagctcctggaagagctccgccggctgaaggatatgcacaagagcaagtgatgcccccagcgcccccagcccagcccactccccgcatggggaggccgccaccaccaacacctcatcatccttctcatcgctaacaccaccacctccatcggcacccaagcgggcatcatccccccacactgctcaggggaggggagggatcaggcgatgagactgtgaggccaaaagaagggggcctgttggaggctgggaaccccgcagcgcgaggctgcctcatcaacggcaagaggaaaggaggggtctcgggacatctccagaccctaccaactgggagggtcccctcctccttccctactcctgggacggcagcaaggacatgggggctgctgttagcttctccgtcaggaggcctcatctcactgtagccctggaacccagggtccatcttgcccttcccccatccatggttgggaaagaagctcagcccctcacagtggcctcaagtgtgatgccttacaaaagcaccactcagatgggcagctggactctggtgtcctgagactctgccctcttcccacagcctccctgccccacccatccctgcaaagccatttttcagacagagccattcctaagaacactgaagggctggaatgctggctggccactctctgcctcagtggcctccctacagcctggaagaaggagggtcctgattgccaaggaaacctcctcattgggctaaggagacactggagtctggagtgtggagccccacagtcttgcaggtcacatgctctccttgcacatctggcctggttgtacccactggcctctgcctctgccctgggccaaaagggcccctccttgccaggggagagacagccacggtcctctttggccgatgctgtattctcattttggcccttgttcttaggcccgtctgcccgccttcctccatctaacctttcctgttttatccgcagcccttttcttctttgagttagtaaagatttattctgtaacctgacactcatctggccctttgcagtttgccagccatattcccatgtgatttcccactggatccaggcccccatccggctggcaggagggggctctgacgtgcaggttggaaatcagaagtctgtgagagcgcgggagtgcatggcagctctgggtcccagacctggcccgacccctctgcttcacctccagctctgctgctcctctactcttgggtcgagatccctttggagccacagcgaggaaccctgtggtcctcaggcaggtgtaccttgagtcagccaggagccctcttttcctgtgtcaaagcctgccctcgggctctgctcacctctggtgaccctccaagatgcccctgccctcagtttcccctcatgatctggcctctgcccccttctctagccacagcctctagtacactttagcaataccaccagactagttagagttccccactcaccaagcaagacatgcagtttcatgcctctgtgccttcgctcatgctgtttcttccgactggaatgccttcccctgctcctcctgccttgtctgcctggcaagttcatctctcacgatcccctcaaaggccccctcctccaggaaggcaacccctgtgcccctcccctccaggctacctctgcactttgtcaatgcttctcttgtggcacttatcacactgtattttacttgtttacatgtttgtctccccttctagactgtgaatccttaagggcatggactgtatcttatgcatctctgtatttctgcgcctagcacggtgcctagcacacagtaggcgctcaataaatgttgaatgaatgaatgatttaatcaa

SEQ ID NO: 21665 - DNA, 3021 bp, Homo sapiens
  source 1..3021: mol_type = unassigned DNA
aaactacaattcccggcggggagcgcggtgaagcgggggtgggatctgaacatggcggcggtggtagctgctacggcgctgaagggccggggggcgagaaatgcccgcgtcctccgggggattctcgcaggagccacagctaacaaggcttctcataacaggacccgggccctgcaaagccacagctccccagagggcaaggaggaacctgaacccctatccccggagctggaatacattcccagaaagaggggcaagaaccccatgaaagctgtgggactggcctggtacagcctgtacacccgcacctggctcgggtacctcttctaccgacagcagctgcgcagggctcggaatcgctaccctaaaggccactcgaaaacccagccccgcctcttcaatggagtgaaggtgcttcccatccctgtcctctcggacaactacagctacctcatcatcgacacccaggcccagctggctgtggctgtggacccttcagaccctcgggctgtgcaggcttccattgaaaaggaaggggtcaccttggtcgccattctgtgtactcacaagcactgggaccacagtggagggaaccgtgacctcagccggcggcaccgggactgtcgggtgtacgggagccctcaggacggcatcccctacctcacccatcccctgtgtcatcaagatgtggtcagcgtgggacggcttcagatccgggccctggctacacctggccacacacaaggccatctggtctacctactggatggggagccctacaagggtccctcctgcctcttctcaggggacctgctcttcctctctggctgtgggcggacctttgagggcaatgcagagaccatgctgagctcactggacactgtgctggggctaggggatgacacccttctgtggcctggtcatgagtatgcagaggagaacctgggctttgcaggtgtggtggagcccgagaacctggcccgggagaggaagatgcagtgggtgcagcggcagcggctggagcgcaagggcacgtgcccatctaccctgggagaggagcgctcctacaacccgttcctgagaacccactgcctggcgctacaggaggctctggggccggggccgggccccactggggatgatgactactcccgggcccagctcctggaagagctccgccggctgaaggatatgcacaagagcaagtgatgcccccagcgcccccagcccagcccactccccgcatggggaggccgccaccaccaacacctcatcatccttctcatcgctaacaccaccacctccatcggcacccaagcgggcatcatccccccacactgctcaggggaggggagggatcaggcgatgagactgtgaggccaaaagaagggggcctgttggaggctgggaaccccgcagcgcgaggctgcctcatcaacggcaagaggaaaggaggggtctcgggacatctccagaccctaccaactgggagggtcccctcctccttccctactcctgggacggcagcaaggacatgggggctgctgttagcttctccgtcaggaggcctcatctcactgtagccctggaacccagggtccatcttgcccttcccccatccatggttgggaaagaagctcagcccctcacagtggcctcaagtgtgatgccttacaaaagcaccactcagatgggcagctggactctggtgtcctgagactctgccctcttcccacagcctccctgccccacccatccctgcaaagccatttttcagacagagccattcctaagaacactgaagggctggaatgctggctggccactctctgcctcagtggcctccctacagcctggaagaaggagggtcctgattgccaaggaaacctcctcattgggctaaggagacactggagtctggagtgtggagccccacagtcttgcaggtcacatgctctccttgcacatctggcctggttgtacccactggcctctgcctctgccctgggccaaaagggcccctccttgccaggggagagacagccacggtcctctttggccgatgctgtattctcattttggcccttgttcttaggcccgtctgcccgccttcctccatctaacctttcctgttttatccgcagcccttttcttctttgagttagtaaagatttattctgtaacctgacactcatctggccctttgcagtttgccagccatattcccatgtgatttcccactggatccaggcccccatccggctggcaggagggggctctgacgtgcaggttggaaatcagaagtctgtgagagcgcgggagtgcatggcagctctgggtcccagacctggcccgacccctctgcttcacctccagctctgctgctcctctactcttgggtcgagatccctttggagccacagcgaggaaccctgtggtcctcaggcaggtgtaccttgagtcagccaggagccctcttttcctgtgtcaaagcctgccctcgggctctgctcacctctggtgaccctccaagatgcccctgccctcagtttcccctcatgatctggcctctgcccccttctctagccacagcctctagtacactttagcaataccaccagactagttagagttccccactcaccaagcaagacatgcagtttcatgcctctgtgccttcgctcatgctgtttcttccgactggaatgccttcccctgctcctcctgccttgtctgcctggcaagttcatctctcacgatcccctcaaaggccccctcctccaggaaggcaacccctgtgcccctcccctccaggctacctctgcactttgtcaatgcttctcttgtggcacttatcacactgtattttacttgtttacatgtttgtctccccttctagactgtgaatccttaagggcatggactgtatcttatgcatctctgtatttctgcgcctagcacggtgcctagcacacagtaggcgctcaataaatgttgaatgaatgaatgatttaatcaaga

SEQ ID NO: 21666 - DNA, 595 bp, Homo sapiens
  source 1..595: mol_type = unassigned DNA
accagcccagcctttcagtgcaggctccagccctccacccccacccgagttgcaggatgtcgatgacagacttgctgaacgctgaggacatcaagaaggcggtgggagcctttagcgctaccgactccttcgaccacaaaaagttcttccaaatggtcggcctgaagaaaaagagtgcggatgatgtgaagaaggtgtttcacatgctggacaaggacaaaagtggcttcatcgaggaggatgagctgggattcatcctaaaaggcttctccccagatgccagagacctgtctgctaaagaaaccaagatgctgatggctgctggagacaaagatggggacggcaaaattggggttgacgaattctccactctggtggctgaaagctaagaagcactgactgcccctggtcttccacctctctgccctgaacacccaatctcggcccctctcgccaccctcctgcatttctgttcagttcgtttatgttattttttactcccccatcccctgtggccctctaatgacaccattcttctggaaaatgctggagaagcaataaaggttgtaccagtcagactctgcttgctcaggaa

SEQ ID NO: 21667 - DNA, 422 bp, Homo sapiens
  source 1..422: mol_type = unassigned DNA
ccgggctccctcagccctccaatggagctaccgactccttcgaccacaaaaagttcttccaaatggtcggcctgaagaaaaagagtgcggatgatgtgaagaaggtgtttcacatgctggacaaggacaaaagtggcttcatcgaggaggatgagctgggattcatcctaaaaggcttctccccagatgccagagacctgtctgctaaagaaaccaagatgctgatggctgctggagacaaagatggggacggcaaaattggggttgacgaattctccactctggtggctgaaagctaagaagcactgactgcccctggtcttccacctctctgccctgaacacccaatctcggcccctctcgccaccctcctgcatttctgttcagttcgtttatgttattttttactcccccatcccctg

SEQ ID NO: 21668 - DNA, 569 bp, Homo sapiens
  source 1..569: mol_type = unassigned DNA
acttgctctgcccgctcaaacagttgcaggatgtcgatgacagacttgctgaacgctgaggacatcaagaaggcggtgggagcctttagcgctaccgactccttcgaccacaaaaagttcttccaaatggtcggcctgaagaaaaagagtgcggatgatgtgaagaaggtgtttcacatgctggacaaggacaaaagtggcttcatcgaggaggatgagctgggattcatcctaaaaggcttctccccagatgccagagacctgtctgctaaagaaaccaagatgctgatggctgctggagacaaagatggggacggcaaaattggggttgacgaattctccactctggtggctgaaagctaagaagcactgactgcccctggtcttccacctctctgccctgaacacccaatctcggcccctctcgccaccctcctgcatttctgttcagttcgtttatgttattttttactcccccatcccctgtggccctctaatgacaccattcttctggaaaatgctggagaagcaataaaggttgtaccagtcagactctgcttgctcaggaa

SEQ ID NO: 21669 - DNA, 470 bp, Homo sapiens
  source 1..470: mol_type = unassigned DNA
aggctgaggtaggagtggagagagaaagggagcagggcctaggaggtcctgaggtgcaggctggccgctgaaggttcaggatcttcccccacgcggcaggacatccgccaaggttcccagatctgagacggcgcacctcctgcgtgtccttgacggcagttgcaggatgtcgatgacagacttgctgaacgctgaggacatcaagaaggcggtgggagcctttagcgctaccgactccttcgaccacaaaaagttcttccaaatggtcggcctgaagaaaaagagtgcggatgatgtgaagaaggtgtttcacatgctggacaaggacaaaagtggcttcatcgaggaggatgagctgggattcatcctaaaaggcttctccccagatgccagagacctgtctgctaaagaaaccaagatgctgatggctgctggagacaaagatggggacggcaaaattggggttgacg

SEQ ID NO: 21670 - DNA, 1591 bp, Homo sapiens
  source 1..1591: mol_type = unassigned DNA
ctgccacgtccctatatgaacggggtgtgtgcccgcctgccctccgacgtccgccggctgtgctggtctgcagagctgccgccagctgcaccctcctcgccatgagtgacctgcaggaagaaggcaagaatgccatcaactcaccgatgtcccccgccctggtggatgttcaccctgaagacacccagcttgaggagaacgaggagcgcacgatgattgaccccacttccaaggaagaccccaagttcaaggaactggtcaaggtcctcctcgactggattaatgacgtgctggtggaggagaggatcattgtgaagcagctggaggaagacctgtatgacggccaggtgctgcagaagctcttggaaaaactggcagggtgcaagctgaatgtggctgaggtgacacagtccgaaatagggcagaaacagaagctgcagacggtgctggaagcagtacatgacctgctgcggccccgaggctgggcgctccggtggagcgtggactcaattcacgggaagaacctggtggccatcctccacctgctggtctctctggccatgcacttcagggcccccatccgccttcctgagcatgtaacggtgcaggtggtggtcgtgcggaaacgggaaggcctgctgcattccagccacatctcggaggagctgaccacaactacagagatgatgatgggccggttcgagcgggatgccttcgacacgctgttcgaccacgccccggataagctcagcgtggtgaagaagtctctcatcacttttgtgaacaagcacctgaacaagctgaatttggaggtgacggaactggagacccagtttgcagatggcgtgtacctggttctgctcatgggccttctggaagactactttgttcctctccaccacttctacctgactccggaaagcttcgatcagaaggtccacaatgtgtccttcgcctttgagctgatgctggacggaggcctcaagaaacccaaggctcgtcctgaagacgtggttaacttggacctcaaatccaccctgagggttctttacaacctgttcaccaagtacaagaacgtggagtgacgggggagctgtggatggtggcaggagtgtcccagcaagaaaggcggcatccgtctgtgccctgtgcctttccagggagccaggcgccatgggcttctggtccaagctgtgttgactgtcatccccaccccacccctacctcacgcctgccccaccccctgcctcttttggttgttgttcttaatctcctctccatgtagttcccagtgggcaagagcctttgaaaatgcaggattctaaacactcgtgcttgcgtttgaagcctcgcgtcactcagtcgcgtgggatgatgagtccgttgttgtctgccttggccgaaagatgaaaaaaagcctgaaccccaacccccagctggttgagagcaccctgcattctgcctcatggtgcagttagcgatcacaggccttcagaagtacaacatcagctcagcaggaacgccggctccccgaggacccaggcttgacgattcaccggggatctcctgggctgggctctccttggaagtg

SEQ ID NO: 21671 - DNA, 4458 bp, Homo sapiens
  source 1..4458: mol_type = unassigned DNA
acaggcagtagtgctggggcagagcgagctcaccagccgccggctggaagaccccgggagagtagcagggttgggttggttctcagatgtgttttgcgccaggctgtgtggtggggacagagcctgggtaaatgaagctttccggctcgaccgctcccaacctgggcacacacgtcctcctgtcctgcaaggggcagttttggggcatcctccctgcttggggcaacccaggggcgcaaggcgcggccccgggagcgcagctccttccagggcagagggcggcgcgagggagggagcgagggagggagcgagggaagggaaaggcgagcgtgagctgcctcaaatgcttggaataattccgcttccgtttggaaagccgcagcctcagtcccgccgccgcccgctgcgtccgcccagcgccagctccgcgtcccgaccggcccgcggcagcctgcgccgcgccatggccacctccccgcagaagtcgccttctgtccccaagtctcccactcccaagtcgcccccgtcccgcaagaaagatgattccttcttggggaaactcggagggaccctggcccggaggaagaaagccaaggaggtgtccgagctgcaggaggagggaatgaacgccatcaacctgcccctcagcccaattccctttgagctggaccccgaggacacgatgctggaggagaatgaggtgcgaacaatggtggatccaaactcacgcagtgaccccaagcttcaagaactgatgaaggtattaattgactggattaatgatgtgttggttggagaaagaatcattgtgaaagacctagctgaagatttgtatgatggacaagtcctgcagaagcttttcgagaaactggagagtgagaagctaaatgtggctgaggtcacccagtcagagattgctcagaagcaaaaactgcagactgtcctggagaagatcaatgaaaccctgaaacttcctcccaggagcatcaagtggaatgtggattctgttcatgccaagagcctggtggccatcttacacctgctcgttgctctgtctcagtatttccgcgcaccaattcgactcccagaccatgtttccatccaagtggttgtggtccagaaacgagaaggaatcctccagtctcggcaaatccaagaggaaataactggtaacacagaggctctttccgggaggcatgaacgtgatgcctttgacaccttgttcgaccatgccccagacaagctgaatgtggtgaaaaagacactcatcactttcgtgaacaagcacctgaataaactgaacctggaggtcacagaactggaaacccagtttgcagatggggtgtacctggtgctgctcatggggctcctggagggctactttgtgcccctgcacagcttcttcctgaccccggacagctttgaacagaaggtcttgaatgtctcctttgcctttgagctcatgcaagatggagggttggaaaagccaaaaccgcggccagaagacatagtcaactgtgacctgaaatctacactacgagtgttgtacaacctcttcaccaagtaccgtaacgtggagtgaggggctgccctgggcccaccactgcccaagagttcttgctgttggcgtactggaccctcctccgaactgccttaccctgcttattcctgtctcttgcactgtgctctcccacaagtccagctgcaacccagagatagtggaaactgaaattaggaaggaaatcatcaataactcagtgggctgacccatccctcccaggcgctggggaccaacctagcaatgaaggttgggaaggttgttcccttcccggtgccaggtccagatttccctccatgatttgggaaccagcttaggcaaaagagtccccacaagatgaaaataaagatcctagttaccattcaaaggatgctaactgtgtgtcaggccccacactaagtgctctgctctgatatactcaaggccattaatcttcaggactcccattgacgtaggtgtttcattccccttttacagatgaggaaactaaggcttggaggttaaatgacttgccagaagttggaatttttttcctctttgaacataacctctcccttctccctaaaggtaaccactattctgagtccaatcatcaaggttttgcttttctttttagctaagtatgcattcctcaatagtagacagtacaacatgtttataacaagccaattacattatgttctttgcatgttctaaagttgtgtatgtgtgtgcacatctgagcacgtgcacatgtacacctgagccaaaaacacgagaacccactgatctcaccactggggcaagctaggtcagagcttagtgattcacactgaaattggcaaattggatttaacccaattaatagtgtgtgtgtggcaggagtcatgtccctcacatcctttgtacaaatgaaaattactcttaattccttcagatttataataactctgtactttggtttcagggtgacatttgggaaggattttgtttagaattaatggagtggcacattttgcagcctttttgcttgattgcatgtaatggaaatgccctatattttcctgcaaaataagtactaaattcattatcgttaagcaaatgtacaatatgctcaggcaccgcagagagctgggcacgggcccatgtgagcatcactttggaagtagggctcttcaacagggacccttgaactttaaagaaaggaacttctttttgccttctaattgatcatttagactattctggctaagtctgcccacatgtaattaccggctaattcaagcgaggaaaaatgtaagtcatttagaccaaagccaagcagtttctttgcgtgggttactcaagggcttgtggttacttgtatctcctctatgtgaacttgactttgaaagacagagctctagtgtgccagcctgctaagtcctgtaagaatagggaagggcggaggggggtgggcagtgactaggggacgagaagcatggggaaaatatttgcactctaaacatacagagatagaggtggggcttgtggtacttaacacttgtagccatcaactgactgagaccttgggctaaataatcaattgtgctgatattacatctcgttatggaatgttcctaaatatgccaggtagacaccagcccaagtaccctcctccagaagtctgtgactaccttgtcactactttaggcccattccacaaagcccatctctggtttgagaattcattttgatctgtatctacaccacccaaagttaggcctcctataatgtccaaaacattcctttcagcctttttatttcttactgtactgtctcttactgtactgtctatctgcagtaattgaggacccataaaatttagataactacatgtctttgctcttagaattgtcactcagcataatgagcatttaacatacaaaggcaatgtactgttttgtgttgatctatgtaaaagaatacaattcttttttacataattagtgaaattttattttttattaggaaacactaaatagtgtaatatttcttttgcttttaaaaaaattcctggtagcaaatcaagataaataattgcttcattttcttgagcaatactgaagcaggatgaagtaagaggaatgcattcatttaaacatgctttgctttatgaattttgtctcttttttggtctctttttcttatattcaagttacaaatgtacaagtatccttactaagagtgctccttttgtattttacatatatacagtatgaaaatacattggaacactaggaaagtttttaaataacagttctaatttatcagaaaattgtgttttgggattgagttctttgtctcagcccagaatcccaggtcctgggcctggttttctaatgctgtcatctcagttcgatattttactttagaacctggaatctcctacttaatatatgaccatgactttgaaaggcaaaagaggaatcaagaataaataaaacaaacttaatcttcatctttaaaaaaaagaaaaaagaaaccaaaatgagaatcaacacttcataggctcactgggttttcttttcttttctgttaatttaaactcagttatttttaatgcttaatacatacatggtgcaaaatttaaaaagcgcaaataggtatctagtggaaaacctaagcctccctctctcctccggcacccattacctctccctggaggcaactgttttgatccatttcttacacacactgccagagatactctaggcatgtaaagcacaaacatacatataaaatctgcgggcttcaaaaaatataagtaggatgtcatctatactgtcatacactttgttttttatcacttaatgttatatcttggatattgtattaccctgggtattaaaaagaactcctttcacattttaaaataacaa

SEQ ID NO: 21672 - DNA, 1219 bp, Homo sapiens
  source 1..1219: mol_type = unassigned DNA
acattccaagagctgccctccttgggacttagatcactccctgagaacaacaccccaaccaggctgcggaggaagaccagctgctgtttgctggcctgcatgacagggaccagtgtccgagctgcaggaggagggaatgaacgccatcaacctgcccctcagcccaattccctttgagctggaccccgaggacacgatgctggaggagaatgaggtgcgaacaatggtggatccaaactcacgcagtgaccccaagcttcaagaactgatgaaggtattaattgactggattaatgatgtgttggttggagaaagaatcattgtgaaagacctagctgaagatttgtatgatggacaagtcctgcagaagcttttcgagaaactggagagtgagaagctaaatgtggctgaggtcacccagtcagagattgctcagaagcaaaaactgcagactgtcctggagaagatcaatgaaaccctgaaacttcctcccaggagcatcaagtggaatgtggattctgttcatgccaagagcctggtggccatcttacacctgctcgttgctctgtctcagtatttccgcgcaccaattcgactcccagaccatgtttccatccaagtggttgtggtccagaaacgagaaggaatcctccagtctcggcaaatccaagaggaaataactggtaacacagaggctctttccgggaggcatgaacgtgatgcctttgacaccttgttcgaccatgccccagacaagctgaatgtggtgaaaaaggtgggaaaggggtgcctgggatggacagagggaagcgagatgcaacagaacattgggaaaacccatccctgcagcttgcgagcttcctgccagaactggtggcatcacctaacctctgcacacacagggctttcccccttgccatccatgtacctgtctgttcctcactggatgttgcacctgggccttttcccctccatcagcatgaacagcctgtcttcccacccaggctaaccccagcaatctcagccttccccactcctcacagaattccctgtctccctggcctaggcacctgtgccgaagaagggacaggaaggagagatccagtggaatcattttatttcagttcccccacccagacactggctcagacactccacctatcattctgcctcttgggacctccttgttccttacacgccctgagttgtatgggactgc

SEQ ID NO: 21673 - DNA, 1544 bp, Homo sapiens
  source 1..1544: mol_type = unassigned DNA
gcagcctcagtcccgccgccgcccgctgcgtccgcccagcgccagctccgcgtcccgaccggcccgcggcagcctgcgccgcgccatggccacctccccgcagaagtcgccttctgtccccaagtctcccactcccaagtcgcccccgtcccgcaagaaagatgattccttcttggggaaactcggagggaccctggcccggaggaagaaagccaaggaggtgtccgagctgcaggaggagggaatgaacgccatcaacctgcccctcagcccaattccctttgagctggaccccgaggacacgatgctggaggagaatgaggtgcgaacaatggtggatccaaactcacgcagtgaccccaagcttcaagaactgatgaaggtattaattgactggattaatgatgtgttggttggagaaagaatcattgtgaaagacctagctgaagatttgtatgatggacaagtcctgcagaagcttttcgagaaactggagagtgagaagctaaatgtggctgaggtcacccagtcagagattgctcagaagcaaaaactgcagactgtcctggagaagatcaatgaaaccctgaaacttcctcccaggagcatcaagtggaatgtggattctgttcatgccaagagcctggtggccatcttacacctgctcgttgctctgtctcagtatttccgcgcaccaattcgactcccagaccatgtttccatccaagtggttgtggtccagaaacgagaaggaatcctccagtctcggcaaatccaagaggaaataactggtaacacagagtatgtcagttcccggcacaaacgtgatgcctttgacaccttgttcgaccatgccccagacaagctgaatgtggtgaaaaagacactcatcactttcgtgaacaagcacctgaataaactgaacctggaggtcacagaactggaaacccagtttgcagatggggtgtacctggtgctgctcatggggctcctggagggctactttgtgcccctgcacagcttcttcctgaccccggacagctttgaacagaaggtcttgaatgtctcctttgcctttgagctcatgcaagatggagggttggaaaagccaaaaccgcggccagaagacatagtcaactgtgacctgaaatctacactacgagtgttgtacaacctcttcaccaagtaccgtaacgtggagtgaggggctgccctgggcccaccactgcccaagagttcttgctgttggcgtactggaccctcctccgaactgccttaccctgcttattcctgtctcttgcactgtgctctcccacaagtccagctgcaacccagagatagtggaaactgaaattaggaaggaaatcatcaataactcagtgggctgacccatccctcccaggcgctggggaccaacctagcaatgaaggttgggaaggttgttcccttcccggtgccaggtccagatttccctccatgatttgggaaccagcttaggcaaaagagtccccacaagatgaaaataaagatcctagttaccattc

SEQ ID NO: 21674 - DNA, 3106 bp, Homo sapiens
  source 1..3106: mol_type = unassigned DNA
cagcgccagctccgcgtcccgaccggcccgcggcagcctgcgccgcgccatggccacctccccgcagaagtcgccttctgtccccaagtctcccactcccaagtcgcccccgtcccgcaagaaagatgattccttcttggggaaactcggagggaccctggcccggaggaagaaagccaaggaggtgtccgagctgcaggaggagggaatgaacgccatcaacctgcccctcagcccaattccctttgagctggaccccgaggacacgatgctggaggagaatgaggtgcgaacaatggtggatccaaactcacgcagtgaccccaagcttcaagaactgatgaaggtattaattgactggattaatgatgtgttggttggagaaagaatcattgtgaaagacctagctgaagatttgtatgatggacaagtcctgcagaagcttttcgagaaactggagagtgagaagctaaatgtggctgaggtcacccagtcagagattgctcagaagcaaaaactgcagactgtcctggagaagatcaatgaaaccctgaaacttcctcccaggagcatcaagtggaatgtggattctgttcatgccaagagcctggtggccatcttacacctgctcgttgctctgtctcagtatttccgcgcaccaattcgactcccagaccatgtttccatccaagtggttgtggtccagaaacgagaaggaatcctccagtctcggcaaatccaagaggaaataactggtaacacagaggctctttccgggaggcatgaacgtgatgcctttgacaccttgttcgaccatgccccagacaagctgaatgtggtgaaaaagacactcatcactttcgtgaacaagcacctgaataaactgaacctggaggtcacagaactggaaacccagtttgcagatggggtgtacctggtgctgctcatggggctcctggagggctactttgtgcccctgcacagcttcttcctgaccccggacagctttgaacagaaggtcttgaatgtctcctttgcctttgagctcatgcaagatggagggttggaaaagccaaaaccgcggccagaagacatagtcaactgtgacctgaaatctacactacgagtgttgtacaacctcttcaccaagtaccgtaacgtggagtgaggggctgccctgggcccaccactgcccaagagttcttgctgttggcgtactggaccctcctccgaactgccttaccctgcttattcctgtctcttgcactgtgctctcccacaagtccagctgcaacccagagatagtggaaactgaaattaggaaggaaatcatcaataactcagtgggctgacccatccctcccaggcgctggggaccaacctagcaatgaaggttgggaaggttgttcccttcccggtgccaggtccagatttccctccatgatttgggaaccagcttaggcaaaagagtccccacaagatgaaaataaagatcctagttaccattcaaaggatgctaactgtgtgtcaggccccacactaagtgctctgctctgatatactcaaggccattaatcttcaggactcccattgacgtaggtgtttcattccccttttacagatgaggaaactaaggcttggaggttaaatgacttgccagaagttggaatttttttcctctttgaacataacctctcccttctccctaaaggtaaccactattctgagtccaatcatcaaggttttgcttttctttttagctaagtatgcattcctcaatagtagacagtacaacatgtttataacaagccaattacattatgttctttgcatgttctaaagttgtgtatgtgtgtgcacatctgagcacgtgcacatgtacacctgagccaaaaacacgagaacccactgatctcaccactggggcaagctaggtcagagcttagtgattcacactgaaattggcaaattggatttaacccaattaatagtgtgtgtgtggcaggagtcatgtccctcacatcctttgtacaaatgaaaattactcttaattccttcagatttataataactctgtactttggtttcagggtgacatttgggaaggattttgtttagaattaatggagtggcacattttgcagcctttttgcttgattgcatgtaatggaaatgccctatattttcctgcaaaataagtactaaattcattatcgttaagcaaatgtacaatatgctcaggcaccgcagagagctgggcacgggcccatgtgagcatcactttggaagtagggctcttcaacagggacccttgaactttaaagaaaggaacttctttttgccttctaattgatcatttagactattctggctaagtctgcccacatgtaattaccggctaattcaagcgaggaaaaatgtaagtcatttagaccaaagccaagcagtttctttgcgtgggttactcaagggcttgtggttacttgtatctcctctatgtgaacttgactttgaaagacagagctctagtgtgccagcctgctaagtcctgtaagaatagggaagggcggaggggggtgggcagtgactaggggacgagaagcatggggaaaatatttgcactctaaacatacagagatagaggtggggcttgtggtacttaacacttgtagccatcaactgactgagaccttgggctaaataatcaattgtgctgatattacatctcgttatggaatgttcctaaatatgccaggtagacaccagcccaagtaccctcctccagaagtctgtgactaccttgtcactactttaggcccattccacaaagcccatctctggtttgagaattcattttgatctgtatctacaccacccaaagttaggcctcctataatgtccaaaacattcctttcagcctttttatttcttactgtactgtctcttactgtactgtctatctgcagtaattgaggacccataaaatttagataactacatgtctttgctcttagaattgtcactcagcataatgagcatttaacatacaaaggcaatgtactgttttgtgttgatctatgtaaaagaatacaattcttttttacat

SEQ ID NO: 21675 - DNA, 1706 bp, Homo sapiens
  source 1..1706: mol_type = unassigned DNA
ctccccggggcgaccgggcggctccacacgcgctgcgcccgccgccggccccacgcgcggcccatgtcctccgcgccgcgctcgcccaccccgcggccccgcaggatgaagaaggacgagtcgttcctgggcaagctgggcggcaccctggccaggaagcggagggcgcgcgaggtgagtgacctgcaggaagaaggcaagaatgccatcaactcaccgatgtcccccgccctggtggatgttcaccctgaagacacccagcttgaggagaacgaggagcgcacgatgattgaccccacttccaaggaagaccccaagttcaaggaactggtcaaggtcctcctcgactggattaatgacgtgctggtggaggagaggatcattgtgaagcagctggaggaagacctgtatgacggccaggtgctgcagaagctcttggaaaaactggcagggtgcaagctgaatgtggctgaggtgacacagtccgaaatagggcagaaacagaagctgcagacggtgctggaagcagtacatgacctgctgcggccccgaggctgggcgctccggtggagcgtggactcaattcacgggaagaacctggtggccatcctccacctgctggtctctctggccatgcacttcagggcccccatccgccttcctgagcatgtaacggtgcaggtggtggtcgtgcggaaacgggaaggcctgctgcattccagccacatctcggaggagctgaccacaactacagagatgatgatgggccggttcgagcgggatgccttcgacacgctgttcgaccacgccccggataagctcagcgtggtgaagaagtctctcatcacttttgtgaacaagcacctgaacaagctgaatttggaggtgacggaactggagacccagtttgcagatggcgtgtacctggttctgctcatgggccttctggaagactactttgttcctctccaccacttctacctgactccggaaagcttcgatcagaaggtccacaatgtgtccttcgcctttgagctgatgctggacggaggcctcaagaaacccaaggctcgtcctgaagacgtggttaacttggacctcaaatccaccctgagggttctttacaacctgttcaccaagtacaagaacgtggagtgacgggggagctgtggatggtggcaggagtgtcccagcaagaaaggcggcatccgtctgtgccctgtgcctttccagggagccaggcgccatgggcttctggtccaagctgtgttgactgtcatccccaccccacccctacctcacgcctgccccaccccctgcctcttttggttgttgttcttaatctcctctccatgtagttcccagtgggcaagagcctttgaaaatgcaggattctaaacactcgtgcttgcgtttgaagcctcgcgtcactcagtcgcgtgggatgatgagtccgttgttgtctgccttggccgaaagatgaaaaaaagcctgaaccccaacccccagctggttgagagcaccctgcattctgcctcatggtgcagttagcgatcacaggccttcagaagtacaacatcagctcagcaggaacgccggctccccgaggacccaggcttgacgattcaccggggatctcctgggctgggctctccttggaagtgaggccttttattaaaaataaaagggttttgcagtttgaaaaa

SEQ ID NO: 21676 - DNA, 1569 bp, Homo sapiens
  source 1..1569: mol_type = unassigned DNA
caaaggccctacactttgacgtcctccccatctccggcagctccttaaactaagaactcattttaatttctgaattctccctttttaaagaccagataaatttacctttgggacagttagatgtgcacaaatgcaccatgtgtttaaagatcaccaaagaggagagaaaaggggattccttagtccagagaacaaaaactgcaggaggctggagctgagacgtgggtgttcctgcagctggggcctgtgctcccaggcactcatggcttctctggctggttcacttctccctggctcagacagatcaggagtggaaacatctgaatatgctcaaggaggagtgagtgacctgcaggaagaaggcaagaatgccatcaactcaccgatgtcccccgccctggtggatgttcaccctgaagacacccagcttgaggagaacgaggagcgcacgatgattgaccccacttccaaggaagaccccaagttcaaggaactggtcaaggtcctcctcgactggattaatgacgtgctggtggaggagaggatcattgtgaagcagctggaggaagacctgtatgacggccaggtgctgcagaagctcttggaaaaactggcagggtgcaagctgaatgtggctgaggtgacacagtccgaaatagggcagaaacagaagctgcagacggtgctggaagcagtacatgacctgctgcggccccgaggctgggcgctccggtggagcgtggactcaattcacgggaagaacctggtggccatcctccacctgctggtctctctggccatgcacttcagggcccccatccgccttcctgagcatgtaacggtgcaggtggtggtcgtgcggaaacgggaaggcctgctgcattccagccacatctcggaggagctgaccacaactacagagatgatgatgggccggttcgagcgggatgccttcgacacgctgttcgaccacgccccggataagctcagcgtggtgaagaagtctctcatcacttttgtgaacaagcacctgaacaagctgaatttggaggtgacggaactggagacccagtttgcagatggcgtgtacctggttctgctcatgggccttctggaagactactttgttcctctccaccacttctacctgactccggaaagcttcgatcagaaggtccacaatgtgtccttcgcctttgagctgatgctggacggaggcctcaagaaacccaaggctcgtcctgaagacgtggttaacttggacctcaaatccaccctgagggttctttacaacctgttcaccaagtacaagaacgtggagtgacgggggagctgtggatggtggcaggagtgtcccagcaagaaaggcggcatccgtctgtgccctgtgcctttccagggagccaggcgccatgggcttctggtccaagctgtgttgactgtcatccccaccccacccctacctcacgcctgccccaccccctgcctcttttggttgttgttcttaatctcctctccatgtagttcccagtgggcaagagcctttgaaaatgcaggattctaaacact

SEQ ID NO: 21677 - DNA, 1967 bp, Homo sapiens
  source 1..1967: mol_type = unassigned DNA
gtctcctgcgtggtcccgggagaggaaggggcctggcccggggcggggtgtggagagaggaggaagctcctgccggctgagcgggcctggaggaagtgagcagcggggctcctgcctcccggcctggtccccgaagaccccagaagaacccggaacttgcttccattcggaatccagggaccaccctttgcactcagtaggcctttgttttcctgcgtggaaagcggttgggcttgggaggcgatggagccggagttcttgtacgacctgctgcagctccccaagggggtggagcccccagcggaggaggagctctcaaaaggaggaaagaagaaatacctgccacccacttcccggaaggaccccaaatttgaagaactgcagaaggtgttgatggagtggatcaatgccactcttctccccgagcacattgtggtccgcagcctggaggaggacatgttcgacgggctcatcctacaccacctattccagaggctggcggcgctcaagctggaagcagaggacatcgccctgacagccacaagccagaagcacaagctcacagtggtgctggaggccgtgaaccggagtctgcagctggaggagtggcaggccaagtggagcgtggagagcatcttcaacaaggacctgttgtctaccctgcacctccttgtggccctggccaagcgcttccagcccgacctctccctcccaaccaacgtccaggtggaggtcatcactatcgagagcaccaaaagtggtctgaagtcagagaagttggtggaacagctcactgaatacagcacagacaaggacgagcctccaaaggacgtctttgatgaattatttaagctggctccggagaaagtgaacgcagtgaaagaggccatcgtgaactttgtcaaccagaagctggaccgcctgggcctgtctgtgcagaatctggacacccagtttgcagatggggtcatcttactcttgctgattggacaacttgaaggcttcttcctgcacttaaaggaattctacctcactcccaactctcctgcagaaatgctgcacaacgtcaccctggcgctggagctgctgaaggacgagggcctgctcagctgccctgtcagccctgaagatatcgtgaacaaggatgccaagagcacactgagggtgctctatggtctgttctgcaagcacacgcagaaggcacacagggacaggacgccccatggagccccgaattgaccctcactgcctccaaagcccagagcctgcctgtcagcccagctggagggcccgaggctgcagggtgtcctcccacagtcccgctgtttcctgtgcattcgtgacccgcttccctcccaccctgtctcctgtctccatcgttggattatctttgaacccccttgtgtggatcattttgagccgcctggccttgctcagtttattttaataaaagtatttctgggagggattctgggaacttgacagggtcctgaggagggcccttaaacctgcagcctccctcccatggggtgagtgtgtgtcacatcagtctctcatctctgggcccaggctagtgaccgcccagagaggtggcatcactcagggctggggactctcagggacagggcccacagccccagaccccaccttttccagcccagctccccacacccacctgcttctcactcgggaggatgggccccagagtcaccctccagggcaggagcccgaatggctccatagccatgcccccacccaccgggagaagtggattcagtgactgtcaaagcaacccgggctgtgtcctgcagctgccctcgtgagttttgcccaaaagtcacaaagaagcaatcttcgtggttgattagtgggttcaggtcatctccagtctgtcctcgggagctgtgggttcccactcgctccagtgagacttggcattttctgcacataaagaagagtcgtgtggg

SEQ ID NO: 21678 - DNA, 309 bp, Homo sapiens
  source 1..309: mol_type = unassigned DNA
ctccacctgccacgttctcaccccttcttcttccactgcaaactcctatgcagccgtcaaggccccattctcctctggaaagccttcccgatccccttggcaacaaccaccaccaatatttattcactgagcccactttgtgccaagcattgttctagacacggggaccaccctttgcactcagtaggcctttgttttcctgcgtggaaagcggttgggcttgggaggcgatggagccggagttcttgtacgacctgctgcagctccccaagggggtggagcccccagcggaggaggagctctcaaaag

SEQ ID NO: 21679 - DNA, 622 bp, Homo sapiens
  source 1..622: mol_type = unassigned DNA
gaggaaggggcctggcccggggcggggtgtggaggtgggaggacggcggtgcgggatggagggtggaggccaggctgacagggtgctggtggtgggttgcgggggtcgaccccaggctctggcctatgtagctgccattttggaggtgaacagcctgcggggaaactggcatggtttggggaaggcggggagagggggagaaatgaaagcattgagtttaagtggcctgcagaaccccgggggcccaggcggcacggcgggcgctggggctccgggcagagctttctggaggtttgtggcagcttcactttcacggcatccacccccctcgggccctgccgcagagaggaggaagctcctgccggctgagcgggcctggaggaagtgagcagcggggctcctgcctcccggcctggtccccgaagaccccagaagaacccggaacttgcttccattcggaatccagggaccaccctttgcactcagtaggcctttgttttcctgcgtggaaagcggttgggcttgggaggcgatggagccggagttcttgtacgacctgctgcagctccccaagggggtggagcccccagcggaggaggagctctcaaaaggtgtgtgccca

SEQ ID NO: 21680 - DNA, 2148 bp, Homo sapiens
  source 1..2148: mol_type = unassigned DNA
ctttgtttggctgctgttttaatctttcatgcatttagcagtcatggatggtgccagcgaaggaacaggtgccagggcgttgtgactccacccagcgctgcttcccgggaccttccaattggacaggagctgggggaagagctggttcacagccctttgtgggggatgggactttgggaaccccaaacttctgctgggaccacaaggagaagagggcagcagagtcacagctgcagagaggaggaagctcctgccggctgagcgggcctggaggaagtgagcagcggggctcctgcctcccggcctggtccccgaagaccccagaagaacccggaacttgcttccattcggaatccagggaccaccctttgcactcagtaggcctttgttttcctgcgtggaaagcggttgggcttgggaggcgatggagccggagttcttgtacgacctgctgcagctccccaagggggtggagcccccagcggaggaggagctctcaaaaggaggaaagaagaaatacctgccacccacttcccggaaggaccccaaatttgaagaactgcagaaggtgttgatggagtggatcaatgccactcttctccccgagcacattgtggtccgcagcctggaggaggacatgttcgacgggctcatcctacaccacctattccagaggctggcggcgctcaagctggaagcagaggacatcgccctgacagccacaagccagaagcacaagctcacagtggtgctggaggccgtgaaccggagtctgcagctggaggagtggcaggccaagtggagcgtggagagcatcttcaacaaggacctgttgtctaccctgcacctccttgtggccctggccaagcgcttccagcccgacctctccctcccaaccaacgtccaggtggaggtcatcactatcgagagcaccaaaagtggtctgaagtcagagaagttggtggaacagctcactgaatacagcacagacaaggacgagcctccaaaggacgtctttgatgaattatttaagctggctccggagaaagtgaacgcagtgaaagaggccatcgtgaactttgtcaaccagaagctggaccgcctgggcctgtctgtgcagaatctggacacccagtttgcagatggggtcatcttactcttgctgattggacaacttgaaggcttcttcctgcacttaaaggaattctacctcactcccaactctcctgcagaaatgctgcacaacgtcaccctggcgctggagctgctgaaggacgagggcctgctcagctgccctgtcagccctgaagatatcgtgaacaaggatgccaagagcacactgagggtgctctatggtctgttctgcaagcacacgcagaaggcacacagggacaggacgccccatggagccccgaattgaccctcactgcctccaaagcccagagcctgcctgtcagcccagctggagggcccgaggctgcagggtgtcctcccacagtcccgctgtttcctgtgcattcgtgacccgcttccctcccaccctgtctcctgtctccatcgttggattatctttgaacccccttgtgtggatcattttgagccgcctggccttgctcagtttattttaataaaagtatttctgggagggattctgggaacttgacagggtcctgaggagggcccttaaacctgcagcctccctcccatggggtgagtgtgtgtcacatcagtctctcatctctgggcccaggctagtgaccgcccagagaggtggcatcactcagggctggggactctcagggacagggcccacagccccagaccccaccttttccagcccagctccccacacccacctgcttctcactcgggaggatgggccccagagtcaccctccagggcaggagcccgaatggctccatagccatgcccccacccaccgggagaagtggattcagtgactgtcaaagcaacccgggctgtgtcctgcagctgccctcgtgagttttgcccaaaagtcacaaagaagcaatcttcgtggttgattagtgggttcaggtcatctccagtctgtcctcgggagctgtgggttcccactcgctccagtgagacttggcattttctgcacataaagaagagtcgtgtggg

SEQ ID NO: 21681 - DNA, 1709 bp, Homo sapiens
  source 1..1709: mol_type = unassigned DNA
aaactcaccatttcagcccggatggtgaagattccagcttgagagaccagctcgggtctgaagtgtttctctatctactgtgctgagatctctccttctcgaaccctgctatgcctttgcatacgctgttttctccacctgccacgttctcaccccttcttcttccactgcaaactcctatgcagccgtcaaggccccattctcctctggaaagccttcccgatccccttggcaacaaccaccaccaatatttattcactgagcccactttgtgccaagcattgttctagacacggagaggaggaagctcctgccggctgagcgggcctggaggaagtgagcagcggggctcctgcctcccggcctggtccccgaagaccccagaagaacccggaacttgcttccattcggaatccagggaccaccctttgcactcagtaggcctttgttttcctgcgtggaaagcggttgggcttgggaggcgatggagccggagttcttgtacgacctgctgcagctccccaagggggtggagcccccagcggaggaggagctctcaaaaggaggaaagaagaaatacctgccacccacttcccggaaggaccccaaatttgaagaactgcagaaggtgttgatggagtggatcaatgccactcttctccccgagcacattgtggtccgcagcctggaggaggacatgttcgacgggctcatcctacaccacctattccagaggctggcggcgctcaagctggaagcagaggacatcgccctgacagccacaagccagaagcacaagctcacagtggtgctggaggccgtgaaccggagtctgcagctggaggagtggcaggccaagtggagcgtggagagcatcttcaacaaggacctgttgtctaccctgcacctccttgtggccctggccaagcgcttccagcccgacctctccctcccaaccaacgtccaggtggaggtcatcactatcgagagcaccaaaagtggtctgaagtcagagaagttggtggaacagctcactgaatacagcacagacaaggacgagcctccaaaggacgtctttgatgaattatttaagctggctccggagaaagtgaacgcagtgaaagaggccatcgtgaactttgtcaaccagaagctggaccgcctgggcctgtctgtgcagaatctggacacccagtttgcagatggggtcatcttactcttgctgattggacaacttgaaggcttcttcctgcacttaaaggaattctacctcactcccaactctcctgcagaaatgctgcacaacgtcaccctggcgctggagctgctgaaggacgagggcctgctcagctgccctgtcagccctgaagatatcgtgaacaaggatgccaagagcacactgagggtgctctatggtctgttctgcaagcacacgcagaaggcacacagggacaggacgccccatggagccccgaattgaccctcactgcctccaaagcccagagcctgcctgtcagcccagctggagggcccgaggctgcagggtgtcctcccacagtcccgctgtttcctgtgcattcgtgacccgcttccctcccaccctgtctcctgtctccatcgttggattatctttgaacccccttgtgtggatcattttgagccgcctggccttgctcagtttattttaataaaagtatttctgggaggga

SEQ ID NO: 21682 - DNA, 907 bp, Homo sapiens
  source 1..907: mol_type = unassigned DNA
atggatggtgccagcgaaggaacaggtgccagggcgttgtgactccacccagcgctgcttcccgggaccttccaattggacaggagctgggggaagagctggttcacagccctttgtgggggatgggactttgggaaccccaaacttctgctgggaccacaaggagaagagggcagcagagtcacagctgcaggcttgggaggcgatggagccggagttcttgtacgacctgctgcagctccccaagggggtggagcccccagcggaggaggagctctcaaaaggaggaaagaagaaatacctgccacccacttcccggaaggaccccaaatttgaagaactgcagaagcacacctggcccagccctgtgactggcactggggacaccatctgtggtcttgcccggaagacctggtgaggtgctgacatgtcgtctcagctcggtctcctccacaggctgatccagagacaaggatttggatgccagtagttgagttgggaggttatcccaggggtcatgggagggaaggggccaacacatggttagtgatggagctggtcatggttctgggggctcaagcctgctgggtaccctggagccagcatagagcaagttcagtgcattcctgcccaaggggcgatggagctggggtatttatacaccaccacccctgccccgacaacctcctgacaacctttagtgaacagctgctccctgagaaagggctgggccttgattccctggcactctgaccttttgagcacagcagagtggggacagtttcgagcagagctgcaggtgggagctgggccagtaggcaacagtcaaggagtgggcagggtaccagcagcccccgcattagcttcctagggctactgtaacatgtgaccacagactgaatggctt

SEQ ID NO: 21683 - DNA, 4572 bp, Homo sapiens
  source 1..4572: mol_type = unassigned DNA
gtcgctgtgcgattggtcggtgggataaaagcgcggaagggctcctttccgtggtgtgtagccggcttggcgtgaccctcgcctgatccagttgttagagttggaagcttggcagttggcctcccttcttcccatggaggacgggggcttaacagcctttgaagaggaccagagatgcctttcccagagcctccccttgccagtgtcagcagagggcccagctgcacagaccactgctgagcccagcaggtcgttttcctcagcccacagacacctgagcagaaggaatgggctttccagactctgccagagcaggacagcgctctctgaagacagatggagctcctattgtctatcatcactggctgcccagaatatttgtacaagtaaactgcactgccctgctgcccctgagcacacggacccgtccgaaccgcggggcagtgtgtcctgctgctccctgctgcggggactgtcctcagggtggtcctcacctctgcttccggcccctgtgtgcaaccctaacaaggccatcttcacggtggatgccaagaccacagagatcctggttgctaacgacaaagcttgcgggctcctggggtacagcagccaggacctgattggccagaagctcacgcagttctttctgaggtcagattctgatgtggtggaggccctcagcgaggagcacatggaggccgacggccacgctgcggtggtgtttggcacggtggtggacatcatcagccgtagtggggagaagattccagtgtctgtgtggatgaagaggatgcggcaggagcgccgcctatgctgcgtggtggtcctggagcccgtggagagggtctcgacctgggtcgctttccagagcgatggcaccgtcacgtcatgtgacagtctctttgctcatcttcacgggtacgtgtctggggaggacgtggctgggcagcatatcacagacctgatcccttctgtgcagctccctccttctggccagcacatcccaaagaatctcaagattcagaggtctgttggaagagccagggacggtaccaccttccctctgagcttaaagctgaaatcccaacccagcagcgaggaggcgaccaccggtgaggcggcccctgtgagcggctaccgggcatctgtctgggtgttctgcaccatcagtggcctcatcaccctcctgccggatgggaccatccacggcatcaaccacagcttcgcgctgacactgtttggttacggaaagacggagctcctgggcaagaatatcactttcctgattcctggtttctacagctacatggaccttgcgtacaacagctcattacagctcccagacctggccagctgcctggacgtcggcaatgagagtgggtgtggggagagaaccttggacccgtggcagggccaggacccagctgaggggggccaggatccaaggattaatgtcgtgcttgctggtggccacgttgtgccccgagatgagatccggaagctgatggaaagccaagacatcttcaccgggactcagactgagctgattgctggaggccagctcctttcctgcctctcacctcagcctgctccaggggtggacaatgtcccagaaggaagcctgccagtgcacggtgaacaggcgctgcccaaggaccagcaaatcactgccttggggagagaggaacctgtggcaatagagagccccggacaggatcttctgggagaaagcaggtctgaaccagtggatgtgaagccatttgcttcctgcgaagattctgaagctccagtcccagctgaggatgggggcagtgatgctggcatgtgtggcctgtgtcagaaggcccagctagagcggatgggagtcagtggtcccagcggttcagacctttgggctggggctgccgtggccaagccccaggccaagggtcagctggcggggggcagcctcctgatgcactgcccttgctatgggagtgaatggggcttgtggtggcgaagccaggacttggcccccagcccctctgggatggcaggcctctcgtttgggacacctactctagatgagccgtggctgggagtggaaaacgaccgagaagagctgcagacctgcttgattaaggagcagctgtcccagttgagccttgcaggagccctggatgtcccccacgccgaactcgttccgacagagtgccaggctgtcaccgctcctgtgtcgtcctgcgatctgggaggcagagacctgtgcggtggctgcacgggcagctcctcagcctgctatgccttggccacggacctccctgggggcctggaagcagtggaggcccaggaggttgatgtgaattcgttttcctggaacctcaaggaactctttttcagtgaccagacagaccaaacgtcatcaaattgttcctgtgctacgtctgaactcagagagacaccctcttccttggcagtgggctccgatccagatgtaggcagtctccaggaacaggggtcgtgtgtcctggatgacagggagctgttactactgaccggcacctgtgttgaccttggccaaggccgacggttccgggagagctgtgtgggacatgatccaacagaaccgcttgaggtttgtttggtgtcctctgagcattatgcagcaagcgacagagaaagcccaggacacgttccttccacgttggatgctggccctgaggacacgtgcccatcagcagaggagccaaggctgaacgtccaggtcacctccacgcccgtgatcgtgatgcgcggggctgctggcctgcagcgggagatccaggagggtgcctactccgggagctgctaccatcgagatggcttacggctgagtatacagtttgaggtgaggcgggtggagctccagggccccacacctctgttctgctgctggctggtgaaagacctcctccacagccaacgcgactcagccgccaggacccgcctgttccttgccagcctgcccggctccacccactctaccgctgctgagctcaccggacccagcctggtggaagtgctcagagccagaccctggtttgaggagccccccaaggctgtggaactggaggggttggcggcctgtgagggcgagtactcccaaaagtacagtaccatgagcccgctgggcagtggggccttcggcttcgtgtggactgctgtggacaaggaaaaaaacaaggaggtggtggtgaagtttattaagaaggagaaggtcttggaggattgttggattgaggatcccaaacttgggaaagttactttagagatcgcaattctatccagggtggagcacgccaatatcatcaaggtattggatatatttgaaaaccaagggttcttccagcttgtgatggagaagcacggctccggcctagacctcttcgctttcatcgaccgccaccccaggctggatgagcccctggcgagctacatcttccgacaactagtgtcagcagtgggatacctgcgcttgaaggacatcatccaccgtgacatcaaggatgagaacatcgtgatcgccgaggacttcacaatcaagctgatagactttggctcggccgcctacttggaaaggggaaaattattttatactttttgtgggaccatcgagtactgtgcaccggaagttctcatggggaatccctacagagggccggagctggagatgtggtctctgggagtcactctgtacacgctggtctttgaggagaaccccttctgtgagctggaggagaccgtggaggctgccatacacccgccatacctggtgtccaaagaactcatgagccttgtgtctgggctgctgcagccagtccctgagagacgcaccaccttggagaagctggtgacagacccgtgggtaacacagcctgtgaatcttgctgactatacatgggaagaggtgtttcgagtaaacaagccagaaagtggagttctgtccgctgcgagcctggagatggggaacaggagcctgagtgatgtggcccaggctcaggagctttgtgggggccccgttccaggcgaggctcctaatggccaaggctgtttgcatcccggggatccccgtctgctgaccagctaaacaccaatttcttcctgcttttctccacttggtttggaaaatcacacagttttcaggctccatctgtttggagaaaatacattctgaagcatccccaattcaccttctaaaaactcatgtgcaggtttgataaacaccagaacagaagacagtgatgctgtattattttagatttattacatagatttggaattcacttttttcatgacctagaaaaaaacattccagtgttcaactgttttatattattaaagggcttttaatttgtgaacttctgaaggcatgagtgttttctctttctacttttgtatatgtgcatgttttgtttcctctgacttggtatatgctcatctgagtgacggatatgtgaaatttgtagaactggttagtcaaatggccagactatttcattaatttatttcctcaaatgcttttcaaattaaagcacctttgttagtaaacagtta

SEQ ID NO: 21684 - DNA, 4326 bp, Homo sapiens
  source 1..4326: mol_type = unassigned DNA
gcgtgaccctcgcctgatccagttgttagagttggaagcttggcagttggcctcccttcttcccatggaggacgggggcttaacagcctttgaagaggaccagagatgcctttcccagagcctccccttgccagtgtcagcagagggcccagctgcacagaccactgctgagcccagcaggtcgttttcctcagcccacagacacctgagcagaaggaatgggctttccagactctgccagagcaggacagcgctctctgaagacagatggagctcctattgtctatcatcactggctgcccagaatatttgtacaagtaaactgcactgccctgctgcccctgagcacacggacccgtccgaaccgcggggcagtgtgtcctgctgctccctgctgcggggactgtcctcagggtggtcctcacctctgcttccggcccctgtgtgcaaccctaacaaggccatcttcacggtggatgccaagaccacagagatcctggttgctaacgacaaagcttgcgggctcctggggtacagcagccaggacctgattggccagaagctcacgcagttctttctgaggtcagattctgatgtggtggaggccctcagcgaggagcacatggaggccgacggccacgctgcggtggtgtttggcacggtggtggacatcatcagccgtagtggggagaagattccagtgtctgtgtggatgaagaggatgcggcaggagcgccgcctatgctgcgtggtggtcctggagcccgtggagagggtctcgacctgggtcgctttccagagcgatggcaccgtcacgtcatgtgacagtctctttgctcatcttcacgggtacgtgtctggggaggacgtggctgggcagcatatcacagacctgatcccttctgtgcagctccctccttctggccagcacatcccaaagaatctcaagattcagaggtctgttggaagagccagggacggtaccaccttccctctgagcttaaagctgaaatcccaacccagcagcgaggaggcgaccaccggtgaggcggcccctgtgagcggctaccgggcatctgtctgggtgttctgcaccatcagtggcctcatcaccctcctgccggatgggaccatccacggcatcaaccacagcttcgcgctgacactgtttggttacggaaagacggagctcctgggcaagaatatcactttcctgattcctggtttctacagctacatggaccttgcgtacaacagctcattacagctcccagacctggccagctgcctggacgtcggcaatgagagtgggtgtggggagagaaccttggacccgtggcagggccaggacccagctgaggggggccaggatccaaggattaatgtcgtgcttgctggtggccacgttgtgccccgagatgagatccggaagctgatggaaagccaagacatcttcaccgggactcagactgagctgattgctggaggccagctcctttcctgcctctcacctcagcctgctccaggggtggacaatgtcccagaaggaagcctgccagtgcacggtgaacaggcgctgcccaaggaccagcaaatcactgccttggggagagaggaacctgtggcaatagagagccccggacaggatcttctgggagaaagcaggtctgaaccagtggatgtgaagccatttgcttcctgcgaagattctgaagctccagtcccagctgaggatgggggcagtgatgctggcatgtgtggcctgtgtcagaaggcccagctagagcggatgggagtcagtggtcccagcggttcagacctttgggctggggctgccgtggccaagccccaggccaagggtcagctggcggggggcagcctcctgatgcactgcccttgctatgggagtgaatggggcttgtggtggcgaagccaggacttggcccccagcccctctgggatggcaggcctctcgtttgggacacctactctagatgagccgtggctgggagtggaaaacgaccgagaagagctgcagacctgcttgattaaggagcagctgtcccagttgagccttgcaggagccctggatgtcccccacgccgaactcgttccgacagagtgccaggctgtcaccgctcctgtgtcgtcctgcgatctgggaggcagagacctgtgcggtggctgcacgggcagctcctcagcctgctatgccttggccacggacctccctgggggcctggaagcagtggaggcccaggaggttgatgtgaattcgttttcctggaacctcaaggaactctttttcagtgaccagacagaccaaacgtcatcaaattgttcctgtgctacgtctgaactcagagagacaccctcttccttggcagtgggctccgatccagatgtaggcagtctccaggaacaggggtcgtgtgtcctggatgacagggagctgttactactgaccggcacctgtgttgaccttggccaaggccgacggttccgggagagctgtgtgggacatgatccaacagaaccgcttgaggtttgtttggtgtcctctgagcattatgcagcaagcgacagagaaagcccaggacacgttccttccacgttggatgctggccctgaggacacgtgcccatcagcagaggagccaaggctgaacgtccaggtcacctccacgcccgtgatcgtgatgcgcggggctgctggcctgcagcgggagatccaggagggtgcctactccgggagctgctaccatcgagatggcttacggctgagtatacagtttgaggtgaggcgggtggagctccagggccccacacctctgttctgctgctggctggtgaaagacctcctccacagccaacgcgactcagccgccaggacccgcctgttccttgccagcctgcccggctccacccactctaccgctgctgagctcaccggacccagcctggtggaagtgctcagagccagaccctggtttgaggagccccccaaggctgtggaactggaggggttggcggcctgtgagggcgagtactcccaaaagtacagtaccatgagcccgctgggcagtggggccttcggcttcgtgtggactgctgtggacaaggaaaaaaacaaggaggtggtggtgaagtttattaagaaggagaaggtcttggaggattgttggattgaggatcccaaacttgggaaagttactttagagatcgcaattctatccagggtggagcacgccaatatcatcaaggtattggatatatttgaaaaccaagggttcttccagcttgtgatggagaagcacggctccggcctagacctcttcgctttcatcgaccgccaccccaggctggatgagcccctggcgagctacatcttccgacaagtgagagcaggccagagccgtctagtgtcagcagtgggatacctgcgcttgaaggacatcatccaccgtgacatcaaggatgagaacatcgtgatcgccgaggacttcacaatcaagctgatagactttggctcggccgcctacttggaaaggggaaaattattttatactttttgtgggaccatcgagtactgtgcaccggaagttctcatggggaatccctacagagggccggagctggagatgtggtctctgggagtcactctgtacacgctggtctttgaggagaaccccttctgtgagctggaggagaccgtggaggctgccatacacccgccatacctggtgtccaaagaactcatgagccttgtgtctgggctgctgcagccagtccctgagagacgcaccaccttggagaagctggtgacagacccgtgggtaacacagcctgtgaatcttgctgactatacatgggaagaggtgtttcgagtaaacaagccagaaagtggagttctgtccgctgcgagcctggagatggggaacaggagcctgagtgatgtggcccaggctcaggagctttgtgggggccccgttccaggcgaggctcctaatggccaaggctgtttgcatcccggggatccccgtctgctgaccagctaaacaccaatttcttcctgcttttctccacttggtttggaaaatcacacagttttcaggctccatctgtttggagaaaatacattctgaagcatccccaattcaccttctaaaaactcatgtgcaggtttgataaacaccagaacagaagacagtgatgctgtattattttagatttattacatagatttggaattcacttttttcatgacctagaaaaaaacattccagtgttcaactgttttatattattaaagggcttttaatttgtg

SEQ ID NO: 21685 - DNA, 4942 bp, Homo sapiens
  source 1..4942: mol_type = unassigned DNA
gagaagctgggaaggaaagcagagggagtcgaagcgggacgcacagagccgtagctgcaggcagacggagtggacgtctaggcagagtggagagacgccctgggcttgagagttgacttatgtcactgtctcgacctcggaggcgtggaggggccgcgggccaggcggatctttccgtggctgcaaggtgcgggccagtcctacgtgcatccctgacctctgcgagcctcgctggctgcgtctgtacaatgggccgaacggcaagagcaacaacattctcccggcgtccccgcgcggattttacccatgcgaaatgccgccttctcttgacgctcggagcaggcgggcaggtgcggggcacttgcgctggtggggccgctagccagctggctggctccggggcgccagctgggctccccttgcaagtcgttcccagcccagtgcggacgctgcagccttcgtctaccctgcggagccacccggcccatgaacgagccgccccgcgtcctccgccttcagaaagaggcctccaagaggcgagctctgcgctactcacccattttgatcgcgagtcgggaggaaaccgcatctgcccggcccgggggcggaggcgcccattattcctttggctcctccgaagcgccgtaggggtgtttgttgttagagttggaagcttggcagttggcctcccttcttcccatggaggacgggggcttaacagcctttgaagaggaccagagatgcctttcccagagcctccccttgccagtgtcagcagagggcccagctgcacagaccactgctgagcccagcaggtcgttttcctcagcccacagacacctgagcagaaggaatgggctttccagactctgccagagcaggacagcgctctctgaagacagatggagctcctattgtctatcatcactggctgcccagaatatttgtacaagtaaactgcactgccctgctgcccctgagcacacggacccgtccgaaccgcggggcagtgtgtcctgctgctccctgctgcggggactgtcctcagggtggtcctcacctctgcttccggcccctgtgtgcaaccctaacaaggccatcttcacggtggatgccaagaccacagagatcctggttgctaacgacaaagcttgcgggctcctggggtacagcagccaggacctgattggccagaagctcacgcagttctttctgaggtcagattctgatgtggtggaggccctcagcgaggagcacatggaggccgacggccacgctgcggtggtgtttggcacggtggtggacatcatcagccgtagtggggagaagattccagtgtctgtgtggatgaagaggatgcggcaggagcgccgcctatgctgcgtggtggtcctggagcccgtggagagggtctcgacctgggtcgctttccagagcgatggcaccgtcacgtcatgtgacagtctctttgctcatcttcacgggtacgtgtctggggaggacgtggctgggcagcatatcacagacctgatcccttctgtgcagctccctccttctggccagcacatcccaaagaatctcaagattcagaggtctgttggaagagccagggacggtaccaccttccctctgagcttaaagctgaaatcccaacccagcagcgaggaggcgaccaccggtgaggcggcccctgtgagcggctaccgggcatctgtctgggtgttctgcaccatcagtggcctcatcaccctcctgccggatgggaccatccacggcatcaaccacagcttcgcgctgacactgtttggttacggaaagacggagctcctgggcaagaatatcactttcctgattcctggtttctacagctacatggaccttgcgtacaacagctcattacagctcccagacctggccagctgcctggacgtcggcaatgagagtgggtgtggggagagaaccttggacccgtggcagggccaggacccagctgaggggggccaggatccaaggattaatgtcgtgcttgctggtggccacgttgtgccccgagatgagatccggaagctgatggaaagccaagacatcttcaccgggactcagactgagctgattgctggaggccagctcctttcctgcctctcacctcagcctgctccaggggtggacaatgtcccagaaggaagcctgccagtgcacggtgaacaggcgctgcccaaggaccagcaaatcactgccttggggagagaggaacctgtggcaatagagagccccggacaggatcttctgggagaaagcaggtctgaaccagtggatgtgaagccatttgcttcctgcgaagattctgaagctccagtcccagctgaggatgggggcagtgatgctggcatgtgtggcctgtgtcagaaggcccagctagagcggatgggagtcagtggtcccagcggttcagacctttgggctggggctgccgtggccaagccccaggccaagggtcagctggcggggggcagcctcctgatgcactgcccttgctatgggagtgaatggggcttgtggtggcgaagccaggacttggcccccagcccctctgggatggcaggcctctcgtttgggacacctactctagatgagccgtggctgggagtggaaaacgaccgagaagagctgcagacctgcttgattaaggagcagctgtcccagttgagccttgcaggagccctggatgtcccccacgccgaactcgttccgacagagtgccaggctgtcaccgctcctgtgtcgtcctgcgatctgggaggcagagacctgtgcggtggctgcacgggcagctcctcagcctgctatgccttggccacggacctccctgggggcctggaagcagtggaggcccaggaggttgatgtgaattcgttttcctggaacctcaaggaactctttttcagtgaccagacagaccaaacgtcatcaaattgttcctgtgctacgtctgaactcagagagacaccctcttccttggcagtgggctccgatccagatgtaggcagtctccaggaacaggggtcgtgtgtcctggatgacagggagctgttactactgaccggcacctgtgttgaccttggccaaggccgacggttccgggagagctgtgtgggacatgatccaacagaaccgcttgaggtttgtttggtgtcctctgagcattatgcagcaagcgacagagaaagcccaggacacgttccttccacgttggatgctggccctgaggacacgtgcccatcagcagaggagccaaggctgaacgtccaggtcacctccacgcccgtgatcgtgatgcgcggggctgctggcctgcagcgggagatccaggagggtgcctactccgggagctgctaccatcgagatggcttacggctgagtatacagtttgaggtgaggcgggtggagctccagggccccacacctctgttctgctgctggctggtgaaagacctcctccacagccaacgcgactcagccgccaggacccgcctgttccttgccagcctgcccggctccacccactctaccgctgctgagctcaccggacccagcctggtggaagtgctcagagccagaccctggtttgaggagccccccaaggctgtggaactggaggggttggcggcctgtgagggcgagtactcccaaaagtacagtaccatgagcccgctgggcagtggggccttcggcttcgtgtggactgctgtggacaaggaaaaaaacaaggaggtggtggtgaagtttattaagaaggagaaggtcttggaggattgttggattgaggatcccaaacttgggaaagttactttagagatcgcaattctatccagggtggagcacgccaatatcatcaaggtattggatatatttgaaaaccaagggttcttccagcttgtgatggagaagcacggctccggcctagacctcttcgctttcatcgaccgccaccccaggctggatgagcccctggcgagctacatcttccgacaactagtgtcagcagtgggatacctgcgcttgaaggacatcatccaccgtgacatcaaggatgagaacatcgtgatcgccgaggacttcacaatcaagctgatagactttggctcggccgcctacttggaaaggggaaaattattttatactttttgtgggaccatcgagtactgtgcaccggaagttctcatggggaatccctacagagggccggagctggagatgtggtctctgggagtcactctgtacacgctggtctttgaggagaaccccttctgtgagctggaggagaccgtggaggctgccatacacccgccatacctggtgtccaaagaactcatgagccttgtgtctgggctgctgcagccagtccctgagagacgcaccaccttggagaagctggtgacagacccgtgggtaacacagcctgtgaatcttgctgactatacatgggaagaggtgtttcgagtaaacaagccagaaagtggagttctgtccgctgcgagcctggagatggggaacaggagcctgagtgatgtggcccaggctcaggagctttgtgggggccccgttccaggcgaggctcctaatggccaaggctgtttgcatcccggggatccccgtctgctgaccagctaaacaccaatttcttcctgcttttctccacttggtttggaaaatcacacagttttcaggctccatctgtttggagaaaatacattctgaagcatccccaattcaccttctaaaaactcatgtgcaggtttgataaacaccagaacagaagacagtgatgctgtattattttagatttattacatagatttggaattcacttttttcatgacctagaaaaaaacattccagtgttcaactgttttatattattaaagggcttttaatttgtgaa

SEQ ID NO: 21686 - DNA, 565 bp, Homo sapiens
  source 1..565: mol_type = unassigned DNA
gtgtagccggcttggcgtgaccctcgcctgatccaggttgtgtcgccaggctggagggcagtggtgtcatctcggctcattacaacctccacctcccaggttcaagcgattctcctgcctctgcctccagagtagctgggaatacagttgttagagttggaagcttggcagttggcctcccttcttcccatggaggacgggggcttaacagcctttgaagaggaccagagatgcctttcccagagcctccccttgccagtgtcagcagagggcccagctgcacagaccactgctgagcccagcaggtcgttttcctcagcccacagacacctgagcagaaggaatgggctttccagactctgccagagcaggacagcgctctctgaagacagatggagctcctattgtctatcatcactggctgcccagaatatttgtacaagtaaactgcactgccctgctgcccctgagcacacggacccgtccgaaccgcggggcagtgtgtcctgctgctccctgctgcggggactgtcctcagggtggtcctcacctctgcttccggccc

SEQ ID NO: 21687 - DNA, 3652 bp, Homo sapiens
  source 1..3652: mol_type = unassigned DNA
gataaaagcgcggaagggctcctttccgtggtgtgtagccggcttggcgtgaccctcgcctgatccaggtggacatcatcagccgtagtggggagaagattccagtgtctgtgtggatgaagaggatgcggcaggagcgccgcctatgctgcgtggtggtcctggagcccgtggagagggtctcgacctgggtcgctttccagagcgatggcaccgtcacgtcatgtgacagtctctttgctcatcttcacgggtacgtgtctggggaggacgtggctgggcagcatatcacagacctgatcccttctgtgcagctccctccttctggccagcacatcccaaagaatctcaagattcagaggtctgttggaagagccagggacggtaccaccttccctctgagcttaaagctgaaatcccaacccagcagcgaggaggcgaccaccggtgaggcggcccctgtgagcggctaccgggcatctgtctgggtgttctgcaccatcagtggcctcatcaccctcctgccggatgggaccatccacggcatcaaccacagcttcgcgctgacactgtttggttacggaaagacggagctcctgggcaagaatatcactttcctgattcctggtttctacagctacatggaccttgcgtacaacagctcattacagctcccagacctggccagctgcctggacgtcggcaatgagagtgggtgtggggagagaaccttggacccgtggcagggccaggacccagctgaggggggccaggatccaaggattaatgtcgtgcttgctggtggccacgttgtgccccgagatgagatccggaagctgatggaaagccaagacatcttcaccgggactcagactgagctgattgctggaggccagctcctttcctgcctctcacctcagcctgctccaggggtggacaatgtcccagaaggaagcctgccagtgcacggtgaacaggcgctgcccaaggaccagcaaatcactgccttggggagagaggaacctgtggcaatagagagccccggacaggatcttctgggagaaagcaggtctgaaccagtggatgtgaagccatttgcttcctgcgaagattctgaagctccagtcccagctgaggatgggggcagtgatgctggcatgtgtggcctgtgtcagaaggcccagctagagcggatgggagtcagtggtcccagcggttcagacctttgggctggggctgccgtggccaagccccaggccaagggtcagctggcggggggcagcctcctgatgcactgcccttgctatgggagtgaatggggcttgtggtggcgaagccaggacttggcccccagcccctctgggatggcaggcctctcgtttgggacacctactctagatgagccgtggctgggagtggaaaacgaccgagaagagctgcagacctgcttgattaaggagcagctgtcccagttgagccttgcaggagccctggatgtcccccacgccgaactcgttccgacagagtgccaggctgtcaccgctcctgtgtcgtcctgcgatctgggaggcagagacctgtgcggtggctgcacgggcagctcctcagcctgctatgccttggccacggacctccctgggggcctggaagcagtggaggcccaggaggttgatgtgaattcgttttcctggaacctcaaggaactctttttcagtgaccagacagaccaaacgtcatcaaattgttcctgtgctacgtctgaactcagagagacaccctcttccttggcagtgggctccgatccagatgtaggcagtctccaggaacaggggtcgtgtgtcctggatgacagggagctgttactactgaccggcacctgtgttgaccttggccaaggccgacggttccgggagagctgtgtgggacatgatccaacagaaccgcttgaggtttgtttggtgtcctctgagcattatgcagcaagcgacagagaaagcccaggacacgttccttccacgttggatgctggccctgaggacacgtgcccatcagcagaggagccaaggctgaacgtccaggtcacctccacgcccgtgatcgtgatgcgcggggctgctggcctgcagcgggagatccaggagggtgcctactccgggagctgctaccatcgagatggcttacggctgagtatacagtttgaggtgaggcgggtggagctccagggccccacacctctgttctgctgctggctggtgaaagacctcctccacagccaacgcgactcagccgccaggacccgcctgttccttgccagcctgcccggctccacccactctaccgctgctgagctcaccggacccagcctggtggaagtgctcagagccagaccctggtttgaggagccccccaaggctgtggaactggaggggttggcggcctgtgagggcgagtactcccaaaagtacagtaccatgagcccgctgggcagtggggccttcggcttcgtgtggactgctgtggacaaggaaaaaaacaaggaggtggtggtgaagtttattaagaaggagaaggtcttggaggattgttggattgaggatcccaaacttgggaaagttactttagagatcgcaattctatccagggtggagcacgccaatatcatcaaggtattggatatatttgaaaaccaagggttcttccagcttgtgatggagaagcacggctccggcctagacctcttcgctttcatcgaccgccaccccaggctggatgagcccctggcgagctacatcttccgacaactagtgtcagcagtgggatacctgcgcttgaaggacatcatccaccgtgacatcaaggatgagaacatcgtgatcgccgaggacttcacaatcaagctgatagactttggctcggccgcctacttggaaaggggaaaattattttatactttttgtgggaccatcgagtactgtgcaccggaagttctcatggggaatccctacagagggccggagctggagatgtggtctctgggagtcactctgtacacgctggtctttgaggagaaccccttctgtgagctggaggagaccgtggaggctgccatacacccgccatacctggtgtccaaagaactcatgagccttgtgtctgggctgctgcagccagtccctgagagacgcaccaccttggagaagctggtgacagacccgtgggtaacacagcctgtgaatcttgctgactatacatgggaagaggtgtttcgagtaaacaagccagaaagtggagttctgtccgctgcgagcctggagatggggaacaggagcctgagtgatgtggcccaggctcaggagctttgtgggggccccgttccaggcgaggctcctaatggccaaggctgtttgcatcccggggatccccgtctgctgaccagctaaacaccaatttcttcctgcttttctccacttggtttggaaaatcacacagttttcaggctccatctgtttggagaaaatacattctgaagcatccccaattcaccttctaaaaactcatgtgcaggtttgataaacaccagaacagaagacagtgatgctgtattattttagatttattacatagatttggaattcacttttttcatgaccta

SEQ ID NO: 21688 - DNA, 4000 bp, Homo sapiens
  source 1..4000: mol_type = unassigned DNA
tgttagagttggaagcttggcagttggcctcccttcttcccatggaggacgggggcttaacagcctttgaagaggaccagagatgcctttcccagagcctccccttgccagtgtcagcagagggcccagctgcacagaccactgctgagcccagcaggtcgttttcctcagcccacagacacctgagcagaaggaatgggctttccagactctgccagagcaggacagcgctctctggtggacatcatcagccgtagtggggagaagattccagtgtctgtgtggatgaagaggatgcggcaggagcgccgcctatgctgcgtggtggtcctggagcccgtggagagggtctcgacctgggtcgctttccagagcgatggcaccgtcacgtcatgtgacagtctctttgctcatcttcacgggtacgtgtctggggaggacgtggctgggcagcatatcacagacctgatcccttctgtgcagctccctccttctggccagcacatcccaaagaatctcaagattcagaggtctgttggaagagccagggacggtaccaccttccctctgagcttaaagctgaaatcccaacccagcagcgaggaggcgaccaccggtgaggcggcccctgtgagcggctaccgggcatctgtctgggtgttctgcaccatcagtggcctcatcaccctcctgccggatgggaccatccacggcatcaaccacagcttcgcgctgacactgtttggttacggaaagacggagctcctgggcaagaatatcactttcctgattcctggtttctacagctacatggaccttgcgtacaacagctcattacagctcccagacctggccagctgcctggacgtcggcaatgagagtgggtgtggggagagaaccttggacccgtggcagggccaggacccagctgaggggggccaggatccaaggattaatgtcgtgcttgctggtggccacgttgtgccccgagatgagatccggaagctgatggaaagccaagacatcttcaccgggactcagactgagctgattgctggaggccagctcctttcctgcctctcacctcagcctgctccaggggtggacaatgtcccagaaggaagcctgccagtgcacggtgaacaggcgctgcccaaggaccagcaaatcactgccttggggagagaggaacctgtggcaatagagagccccggacaggatcttctgggagaaagcaggtctgaaccagtggatgtgaagccatttgcttcctgcgaagattctgaagctccagtcccagctgaggatgggggcagtgatgctggcatgtgtggcctgtgtcagaaggcccagctagagcggatgggagtcagtggtcccagcggttcagacctttgggctggggctgccgtggccaagccccaggccaagggtcagctggcggggggcagcctcctgatgcactgcccttgctatgggagtgaatggggcttgtggtggcgaagccaggacttggcccccagcccctctgggatggcaggcctctcgtttgggacacctactctagatgagccgtggctgggagtggaaaacgaccgagaagagctgcagacctgcttgattaaggagcagctgtcccagttgagccttgcaggagccctggatgtcccccacgccgaactcgttccgacagagtgccaggctgtcaccgctcctgtgtcgtcctgcgatctgggaggcagagacctgtgcggtggctgcacgggcagctcctcagcctgctatgccttggccacggacctccctgggggcctggaagcagtggaggcccaggaggttgatgtgaattcgttttcctggaacctcaaggaactctttttcagtgaccagacagaccaaacgtcatcaaattgttcctgtgctacgtctgaactcagagagacaccctcttccttggcagtgggctccgatccagatgtaggcagtctccaggaacaggggtcgtgtgtcctggatgacagggagctgttactactgaccggcacctgtgttgaccttggccaaggccgacggttccgggagagctgtgtgggacatgatccaacagaaccgcttgaggtttgtttggtgtcctctgagcattatgcagcaagcgacagagaaagcccaggacacgttccttccacgttggatgctggccctgaggacacgtgcccatcagcagaggagccaaggctgaacgtccaggtcacctccacgcccgtgatcgtgatgcgcggggctgctggcctgcagcgggagatccaggagggtgcctactccgggagctgctaccatcgagatggcttacggctgagtatacagtttgaggtgaggcgggtggagctccagggccccacacctctgttctgctgctggctggtgaaagacctcctccacagccaacgcgactcagccgccaggacccgcctgttccttgccagcctgcccggctccacccactctaccgctgctgagctcaccggacccagcctggtggaagtgctcagagccagaccctggtttgaggagccccccaaggctgtggaactggaggggttggcggcctgtgagggcgagtactcccaaaagtacagtaccatgagcccgctgggcagtggggccttcggcttcgtgtggactgctgtggacaaggaaaaaaacaaggaggtggtggtgaagtttattaagaaggagaaggtcttggaggattgttggattgaggatcccaaacttgggaaagttactttagagatcgcaattctatccagggtggagcacgccaatatcatcaaggtattggatatatttgaaaaccaagggttcttccagcttgtgatggagaagcacggctccggcctagacctcttcgctttcatcgaccgccaccccaggctggatgagcccctggcgagctacatcttccgacaactagtgtcagcagtgggatacctgcgcttgaaggacatcatccaccgtgacatcaaggatgagaacatcgtgatcgccgaggacttcacaatcaagctgatagactttggctcggccgcctacttggaaaggggaaaattattttatactttttgtgggaccatcgagtactgtgcaccggaagttctcatggggaatccctacagagggccggagctggagatgtggtctctgggagtcactctgtacacgctggtctttgaggagaaccccttctgtgagctggaggagaccgtggaggctgccatacacccgccatacctggtgtccaaagaactcatgagccttgtgtctgggctgctgcagccagtccctgagagacgcaccaccttggagaagctggtgacagacccgtgggtaacacagcctgtgaatcttgctgactatacatgggaagaggtgtttcgagtaaacaagccagaaagtggagttctgtccgctgcgagcctggagatggggaacaggagcctgagtgatgtggcccaggctcaggagctttgtgggggccccgttccaggcgaggctcctaatggccaaggctgtttgcatcccggggatccccgtctgctgaccagctaaacaccaatttcttcctgcttttctccacttggtttggaaaatcacacagttttcaggctccatctgtttggagaaaatacattctgaagcatccccaattcaccttctaaaaactcatgtgcaggtttgataaacaccagaacagaagacagtgatgctgtattattttagatttattacatagatttggaattcacttttttcatgacctagaaaaaaacattccagtgttcaactgttttatattattaaagggcttttaatttgtgaacttctgaaggcatgagtgttttctctttctacttttgtatatgtgcatgttttgtttcctctgacttggtatatgctcatctgagtgacggatatgtgaaatttgtagaactggttagtc

SEQ ID NO: 21689 - DNA, 5161 bp, Homo sapiens
  source 1..5161: mol_type = unassigned DNA
ctcctttccgtggtgtgtagccggcttggcgtgaccctcgcctgatccagttgttagagttggaagcttggcagttggcctcccttcttcccatggaggacgggggcttaacagcctttgaagaggaccagagatgcctttcccagagcctccccttgccagtgtcagcagagggcccagctgcacagaccactgctgagcccagcaggtcgttttcctcagcccacagacacctgagcagaaggaatgggctttccagactctgccagagcaggacagcgctctctgaagacagatggagctcctattgtctatcatcactggctgcccagaatatttgtacaagtaaactgcactgccctgctgcccctgagcacacggacccgtccgaaccgcggggcagtgtgtcctgctgctccctgctgcggggactgtcctcagggtggtcctcacctctgcttccggcccctgtgtgcaaccctaacaaggccatcttcacggtggatgccaagaccacagagatcctggttgctaacgacaaagcttgcgggctcctggggtacagcagccaggacctgattggccagaagctcacgcagttctttctgaggtcagattctgatgtggtggaggccctcagcgaggagcacatggaggccgacggccacgctgcggtggtgtttggcacggtggtggacatcatcagccgtagtggggagaagattccagtgtctgtgtggatgaagaggatgcggcaggagcgccgcctatgctgcgtggtggtcctggagcccgtggagagggtctcgacctgggtcgctttccagagcgatggcaccgtcacgtcatgtgacagtctctttgctcatcttcacgggtacgtgtctggggaggacgtggctgggcagcatatcacagacctgatcccttctgtgcagctccctccttctggccagcacatcccaaagaatctcaagattcagaggtctgttggaagagccagggacggtaccaccttccctctgagcttaaagctgaaatcccaacccagcagcgaggaggcgaccaccggtgaggcggcccctgtgagcggctaccgggcatctgtctgggtgttctgcaccatcagtggcctcatcaccctcctgccggatgggaccatccacggcatcaaccacagcttcgcgctgacactgtttggttacggaaagacggagctcctgggcaagaatatcactttcctgattcctggtttctacagctacatggaccttgcgtacaacagctcattacagctcccagacctggccagctgcctggacgtcggcaatgagagtgggtgtggggagagaaccttggacccgtggcagggccaggacccagctgaggggggccaggatccaaggattaatgtcgtgcttgctggtggccacgttgtgccccgagatgagatccggaagctgatggaaagccaagacatcttcaccgggactcagactgagctgattgctggaggccagctcctttcctgcctctcacctcagcctgctccaggggtggacaatgtcccagaaggaagcctgccagtgcacggtgaacaggcgctgcccaaggaccagcaaatcactgccttggggagagaggaacctgtggcaatagagagccccggacaggatcttctgggagaaagcaggtctgaaccagtggatgtgaagccatttgcttcctgcgaagattctgaagctccagtcccagctgaggatgggggcagtgatgctggcatgtgtggcctgtgtcagaaggcccagctagagcggatgggagtcagtggtcccagcggttcagacctttgggctggggctgccgtggccaagccccaggccaagggtcagctggcggggggcagcctcctgatgcactgcccttgctatgggagtgaatggggcttgtggtggcgaagccaggacttggcccccagcccctctgggatggcaggcctctcgtttgggacacctactctagatgagccgtggctgggagtggaaaacgaccgagaagagctgcagacctgcttgattaaggagcagctgtcccagttgagccttgcaggagccctggatgtcccccacgccgaactcgttccgacagagtgccaggctgtcaccgctcctgtgtcgtcctgcgatctgggaggcagagacctgtgcggtggctgcacgggcagctcctcagcctgctatgccttggccacggacctccctgggggcctggaagcagtggaggcccaggaggttgatgtgaattcgttttcctggaacctcaaggaactctttttcagtgaccagacagaccaaacgtcatcaaattgttcctgtgctacgtctgaactcagagagacaccctcttccttggcagtgggctccgatccagatgtaggcagtctccaggaacaggggtcgtgtgtcctggatgacagggagctgttactactgaccggcacctgtgttgaccttggccaaggccgacggttccgggagagctgtgtgggacatgatccaacagaaccgcttgaggtttgtttggtgtcctctgagcattatgcagcaagcgacagagaaagcccaggacacgttccttccacgttggatgctggccctgaggacacgtgcccatcagcagaggagccaaggctgaacgtccaggtcacctccacgcccgtgatcgtgatgcgcggggctgctggcctgcagcgggagatccaggagggtgcctactccgggagctgctaccatcgagatggcttacggctgagtatacagtttgaggtgaggcgggtggagctccagggccccacacctctgttctgctgctggctggtgaaagacctcctccacagccaacgcgactcagccgccaggacccgcctgttccttgccagcctgcccggctccacccactctaccgctgctgagctcaccggacccagcctggtggaagtgctcagagccagaccctggtttgaggagccccccaaggctgtggaactggaggggttggcggcctgtgagggcgagtactcccaaaagtacagtaccatgagcccgctgggcagtggggccttcggcttcgtgtggactgctgtggacaaggaaaaaaacaaggaggtggtggtgaagtttattaagaaggagaaggtcttggaggattgttggattgaggatcccaaacttgggaaagttactttagagatcgcaattctatccagggtggagcacgccaatatcatcaaggtattggatatatttgaaaaccaagggttcttccagcttgtgatggagaagcacggctccggcctagacctcttcgctttcatcgaccgccaccccaggctggatgagcccctggcgagctacatcttccgacaagtgagagcaggccagagccgtgttagtgtgaacgcaggcctgggtgcctgggtccggtggctgcaaagatcagtgatccatactcggttctctctctgagctggatctagccttctgtgtggggatttcatggagtaggatatatattttgagaagaaaattctatgattgaagtagagaaagtgaggttgggaaggaaggatgaggccagatacagtcctggaatgactgagaaagtatgtttaatggttaaggtttatttacatacataaaatatccacaacaatcataaaaattaaccagtaagggttaggatgcagccagagagcgtctcaaaggcatgtgtgcggcacagcggcctgcaggttgtaagtgcccactaaatggtggctgttgaggtaattaaccagcaaaactgagatcctgacattctcacttttcagtaagtatttgtcttgatctgtttcgtgtctaattacatattgaacttcggccattattttattggaatgggagagtgatgatccaaataggaaggcaccctagcagagggacagggggaagaaacggtaactcgtgttgggttttaaggagagggtggcggttccatcctgtactgctcccagctcccccagaagaactggagaaataccagcaaagggctgtgtagacaactcacatttgctcttggattgtttgctggggacaactcgatttctaatgacagcttccgtgaatcaacatttcttccttaaagctacacactctcgggttgttgggtttccgaagtttagtttctcaggctcctacttgtaagtttcagatattatggttctgcaaaaaagggtcacctctctccctcttcctgtgttggaaggtgacgtcctccctttagtttgtggccaacacttgtttctgaaactttttacagcaaacagagtatctgtatgaggttatgttgagggtcgcttgttaaaagctgctgcctgacagctgttaattctggggctagtgagacacataattatggtgtttatactctaaaatttttgccaaaagaatctctaccccttttgtaaatatatagacataaatgttattctatgtaaatacagatgcacaattttataaagtatatgatcgcacatcaatgtatgtaggaatcatgctggttctcagggcattgcctgtcagctccagattcatcaggacctgctcagcagcggggtcggggagctgggcctgggaacagccctggcttggttcaggccgctccagggcagcatggccagtccagggcacagaagcatctgcaggaagagcagctttcttcaagtcgctctttagccctttgtggttaatctctcagtactagttaataaatcttaatgaaactttccatgttcaagttcatgtgtgatttctgtctcctgattggatcctgactgatttgtatatatctacatatatatgtaagtatgtatgcatgcatgcttgtatatgtgtatttatgtgtgtacctatgtacaagtatatgttatgtgtataggtatgcacacgtgtgtatgcaggtgtgtatatatgtgcacatgtatgtatctaaatgtatgtataaatatgcaggtatgtatatataaatatgcaggtatgtatatataaatatgcaggtatgtatatgtttgtatatatgtgtataaatatgcgtatatttattaaatgtaagttaatcgggctta

SEQ ID NO: 21690 - DNA, 2332 bp, Homo sapiens
  source 1..2332: mol_type = unassigned DNA
gggcagtccacaatggaaggcttcttggaggaggagatgattgagctgcttctactaagatgagtatctcagagtcctcaacgtgggtgtggccgaggtgaagaaatccttcctggggcccttgtccccgtcctgtaagatggtgcagatgatgaggcagtttctgtaccgggtcctgcccgaggactcctacaaggtcaccacggggaagctccatgtgagcctcacccgcttaacggacggggagaatgtggtggtttcagagttcacgtccaaggaggagctcattgaggccctatactgcagctgcttcgtcccggtgtactgtggcctcatccccccgacttaccgcggtgtgaggtacatcgatgggggcttcacgggcatgcagccctgtgccttctggaccgacgccatcaccatctccaccttcagtgggcagcaggacatctgtccccgggactgcccggccatcttccacgacttccgcatgttcaactgctccttccagttctccctggagaacatcgccaggatgacccacgcattgttccccccggacctggtgatcctgcacgattactactaccgagggtacgaggatgcagttttgtacttgaggcggctgaatgctgtttatcttaattcttcctccaagagagtgattttcccccgggtggaagtgtactgccagatagaactcgcccttggcaatgagtgccctgaacgcagtcaaccaagccttcgagcacggcaggccagtctggaaggagccacacaacctcacaaggagtgggttcccaaaggggatggaaggggcagccatggtccgcctgtgtcccaacctgtgcagacacttgaattcacatgcgagtcacctgtttcagcaccagtctctccacttgagcagccacctgcacagccactggcctcttcaactccactttctctaagtggcatgccacctgtatcattcccagctgtgcacaagccacccagctccacacctggttcatcactgcccaccccaccacctggactgtcacctctgtcacctcagcagcaggtacaaccgtctggatcaccagccagatccctacactctcaggcacccacttcacccaggccatccctggggccttcaactgtgggggcacctcaaacactgccccgaagttctctttcagccttccctgctcagccacctgtggaggaactaggccaagaacagccccaagctgtagctcttcttgtctcttcaaaaccaaaaagcgccgtgcctctggttcatgtgaaggaaaccgtcagcaagccttatgtaacggagagccctgctgaagactcaaactgggtgaataaggtcttcaagaagaacaagcaaaagacaagtggcaccagaaaaggcttcccaagacattcgggatccaaaaaaccaagcagcaaagtgcagtgagcatgtctaatgttccttaaatcccacggagaggagcagctttgggaactgtgttcagagagattccgaggaatagaggagagtgtaagggagtagggggtgcagtgggagattgggctttggaacagacacatccgacataaaattcctgctctgccacagctccactcagggatcatggttgggacacttgctctccctgagcctccatttcctgtaaaatggggatgataccacttcataaagttgtgagagttaaatgtgatcgatgatgtaaattgcttcatagaatgcagaatgtgtaatagctcacaataagtaggtattatgtttacatattatgtttgtatttatgctacttaaatacaaaactggacaggccaggcatggtggctcatgcctgtaatcccagcactttgggaggctgaggtaggtggaaaacctgaggtcaggagttcaagaacagcctgaccaacatggtgaaactccatctctactaaaaatacaaaaattaaccaggcttgatggtgtgcacctgtaatctcagctactcgggaggctgaggcaagagaatcgcttgaacccaggaggcagaggttgcagtgcaccaagactgcgccattgcactccagcccgggcaacaagagcgaaaccccatctcgaaaaaaaacaaaacaaaactagacaagtgagtgcctacgtgacactcaaatgttgccagcatacagttaagggccctagtcaatgtaggcctgcttcttatagctttttgactatattatgctgtctttgacttagtcagtcaacacttattgagcacctactaagtgccaaacactctcctggactctggcaaaataaaaaatgaattaaaactct

SEQ ID NO: 21691 - DNA, 2478 bp, Homo sapiens
  source 1..2478: mol_type = unassigned DNA
atggaagaacaggtgttcaagggggacccggacacccctcactccatctccttctcgggcagtggattcctctccttctaccaggcgggggctgtggacgccctgcgggacctggccccccggatgctggaaacagcccaccgctttgcggggacatcggcaggtgctgtgatcgccgccctggccatctgcgggattgaaatggatgagtatctcagagtcctcaacgtgggtgtggccgaggtgaagaaatccttcctggggcccttgtccccgtcctgtaagatggtgcagatgatgaggcagtttctgtaccgggtcctgcccgaggactcctacaaggtcaccacggggaagctccatgtgagcctcacccgcttaacggacggggagaatgtggtggtttcagagttcacgtccaaggaggagctcattgaggccctatactgcagctgcttcgtcccggtgtactgtggcctcatccccccgacttaccgcggtgtgaggtacatcgatgggggcttcacgggcatgcagccctgtgccttctggaccgacgccatcaccatctccaccttcagtgggcagcaggacatctgtccccgggactgcccggccatcttccacgacttccgcatgttcaactgctccttccagttctccctggagaacatcgccaggatgacccacgcattgttccccccggacctggtgatcctgcacgattactactaccgagggtacgaggatgcagttttgtacttgaggcggctgaatgctgtttatcttaattcttcctccaagagagtgattttcccccgggtggaagtgtactgccagatagaactcgcccttggcaatgagtgccctgaacgcagtcaaccaagccttcgagcacggcaggccagtctggaaggagccacacaacctcacaaggagtgggttcccaaaggggatggaaggggcagccatggtccgcctgtgtcccaacctgtgcagacacttgaattcacatgcgagtcacctgtttcagcaccagtctctccacttgagcagccacctgcacagccactggcctcttcaactccactttctctaagtggcatgccacctgtatcattcccagctgtgcacaagccacccagctccacacctggttcatcactgcccaccccaccacctggactgtcacctctgtcacctcagcagcaggtacaaccgtctggatcaccagccagatccctacactctcaggcacccacttcacccaggccatccctggggccttcaactgtgggggcacctcaaacactgccccgaagttctctttcagccttccctgctcagccacctgtggaggaactaggccaagaacagccccaagctgtagctcttcttgtctcttcaaaaccaaaaagcgccgtgcctctggttcatgtgaaggaaaccgtcagcaagccttatgtaacggagagccctgctgaagactcaaactgggtgaataaggtcttcaagaagaacaagcaaaagacaagtggcaccagaaaaggcttcccaagacattcgggatccaaaaaaccaagcagcaaagtgcagtgagcatgtctaatgttccttaaatcccacggagaggagcagctttgggaactgtgttcagagagattccgaggaatagaggagagtgtaagggagtagggggtgcagtgggagattgggctttggaacagacacatccgacataaaattcctgctctgccacagctccactcagggatcatggttgggacacttgctctccctgagcctccatttcctgtaaaatggggatgataccacttcataaagttgtgagagttaaatgtgatcgatgatgtaaattgcttcatagaatgcagaatgtgtaatagctcacaataagtaggtattatgtttacatattatgtttgtatttatgctacttaaatacaaaactggacaggccaggcatggtggctcatgcctgtaatcccagcactttgggaggctgaggtaggtggaaaacctgaggtcaggagttcaagaacagcctgaccaacatggtgaaactccatctctactaaaaatacaaaaattaaccaggcttgatggtgtgcacctgtaatctcagctactcgggaggctgaggcaagagaatcgcttgaacccaggaggcagaggttgcagtgcaccaagactgcgccattgcactccagcccgggcaacaagagcgaaaccccatctcgaaaaaaaacaaaacaaaactagacaagtgagtgcctacgtgacactcaaatgttgccagcatacagttaagggccctagtcaatgtaggcctgcttcttatagctttttgactatattatgctgtctttgacttagtcagtcaacacttattgagcacctactaagtgccaaacactctcctggactctggcaaaataaaaaatgaattaaaactct

SEQ ID NO: 21692 - DNA, 1602 bp, Homo sapiens
  source 1..1602: mol_type = unassigned DNA
atggaagaacaggtgttcaagggggacccggacacccctcactccatctccttctcgggcagtggattcctctccttctaccaggcgggggctgtggacgccctgcgggacctggccccccggatgctggaaacagcccaccgctttgcggggacatcggcaggtgctgtgatcgccgccctggccatctgcgggattgaaatggatgagtatctcagagtcctcaacgtgggtgtggccgaggtgaagaaatccttcctggggcccttgtccccgtcctgtaagatggtgcagatgatgaggcagtttctgtaccgggtcctgcccgaggactcctacaaggtcaccacggggaagctccatgtgagcctcacccgcttaacggacggggagaatgtggtggtttcagagttcacgtccaaggaggagctcattgaggcagccctatactgcagctgcttcgtcccggtgtactgtggcctcatccccccgacttaccgcggtgtgaggtacatcgatgggggcttcacgggcatgcagccctgtgccttctggaccgacgccatcaccatctccaccttcagtgggcagcaggacatctgtccccgggactgcccggccatcttccacgacttccgcatgttcaactgctccttccagttctccctggagaacatcgccaggatgacccacgcattgttccccccggacctggtgatcctgcacgattactactaccgagggtacgaggatgcagttttgtacttgaggcggctgaatgctgtttatcttaattcttcctccaagagagtgattttcccccgggtggaagtgtactgccagatagaactcgcccttggcaatgagtgccctgaacgcagtcaaccaagccttcgagcacggcaggccagtctggaaggagccacacaacctcacaaggagtgggttcccaaaggggatggaaggggcagccatggtccgcctgtgtcccaacctgtgcagacacttgaattcacatgcgagtcacctgtttcagcaccagtctctccacttgagcagccacctgcacagccactggcctcttcaactccactttctctaagtggcatgccacctgtatcattcccagctgtgcacaagccacccagctccacacctggttcatcactgcccaccccaccacctggactgtcacctctgtcacctcagcagcaggtacaaccgtctggatcaccagccagatccctacactctcaggcacccacttcacccaggccatccctggggccttcaactgtgggggcacctcaaacactgccccgaagttctctttcagccttccctgctcagccacctgtggaggaactaggccaagaacagccccaagctgtagctcttcttgtctcttcaaaaccaaaaagcgccgtgcctctggttcatgtgaaggaaaccgtcagcaagccttatgtaacggagagccctgctgaagactcaaactgggtgaataaggtcttcaagaagaacaagcaaaagacaagtggcaccagaaaaggcttcccaagacattcgggatccaaaaaaccaagcagcaaagtgcagtga

SEQ ID NO: 21693 - DNA, 1518 bp, Homo sapiens
  source 1..1518: mol_type = unassigned DNA
gggcagtccacaatggaaggcttcttggaggaggagatgattgagctgcttctactaagatgagtatctcagagtcctcaacgtgggtgtggccgaggtgaagaaatccttcctggggcccttgtccccgtcctgtaagatggtgcagatgatgaggcagtttctgtaccgggtcctgcccgaggactcctacaaggtcaccacggggaagctccatgtgagcctcacccgcttaacggacggggagaatgtggtggtttcagagttcacgtccaaggaggagctcattgaggccctatactgcagctgcttcgtcccggtgtactgtggcctcatccccccgacttaccgcggtgtgtgggcatttctcactctgcccccacagaggtacatcgatgggggcttcacgggcatgcagccctgtgccttctggaccgacgccatcaccatctccaccttcagtgggcagcaggacatctgtccccgggactgcccggccatcttccacgacttccgcatgttcaactgctccttccagttctccctggagaacatcgccaggatgacccacgcattgttccccccggacctggtgatcctgcacgattactactaccgagggtacgaggatgcagttttgtacttgaggcggctgaatgctgtttatcttaattcttcctccaagagagtgattttcccccgggtggaagtgtactgccagatagaactcgcccttggcaatgagtgccctgaacgcagtcaaccaagccttcgagcacggcaggccagtctggaaggagccacacaacctcacaaggagtgggttcccaaaggggatggaaggggcagccatggtccgcctgtgtcccaacctgtgcagacacttgaattcacatgcgagtcacctgtttcagcaccagtctctccacttgagcagccacctgcacagccactggcctcttcaactccactttctctaagtggcatgccacctgtatcattcccagctgtgcacaagccacccagctccacacctggttcatcactgcccaccccaccacctggactgtcacctctgtcacctcagcagcaggtacaaccgtctggatcaccagccagatccctacactctcaggcacccacttcacccaggccatccctggggccttcaactgtgggggcacctcaaacactgccccgaagttctctttcagccttccctgctcagccacctgtggaggaactaggccaagaacagccccaagctgtagctcttcttgtctcttcaaaaccaaaaagcgccgtgcctctggttcatgtgaaggaaaccgtcagcaagccttatgtaacggagagccctgctgaagactcaaactgggtgaataaggtcttcaagaagaacaagcaaaagacaagtggcaccagaaaaggcttcccaagacattcgggatccaaaaaaccaagcagcaaagtgcagtgagcatgtctaatgttccttaaatcccacggagaggagca

SEQ ID NO: 21694 - DNA, 2428 bp, Homo sapiens
  source 1..2428: mol_type = unassigned DNA
gcggccccagtcagacgcaggcagccccaaagcctgaacaggcagggccagacccagcttcttcgcctccgccagcggggaccccgagctagagccgcagcgggacctgcccggcccccggctccagcgagcgagcggcgagcaggcggctcacagaggcctggccgcccacggaacccggggcccggcggccgccgccgcgatgtttccccgcgagaagacgtggaacatctcgttcgcgggctgcggcttcctcggcgtctactacgtcggcgtggcctcctgcctccgcgagcacgcgcccttcctggtggccaacgccacgcacatctacggcgcctcggccggggcgctcacggccacggcgctggtcaccggggtctgcctgggtgaggctggtgccaagttcattgaggtatctaaagaggcccggaagcggttcctgggccccctgcacccctccttcaacctggtaaagatcatccgcagtttcctgctgaaggtcctgcctgctgatagccatgagcatgccagtgggcgcctgggcatctccctgacccgcgtgtcagacggcgagaatgtcattatatcccacttcaactccaaggacgagctcatccaggccaatgtctgcagcggtttcatccccgtgtactgtgggctcatccctccctccctccagggggtgcgctacgtggatggtggcatttcagacaacctgccactctatgagcttaagaacaccatcacagtgtcccccttctcgggcgagagtgacatctgtccgcaggacagctccaccaacatccacgagctgcgggtcaccaacaccagcatccagttcaacctgcgcaacctctaccgcctctccaaggccctcttcccgccggagcccctggtgctgcgagagatgtgcaagcagggataccgggatggcctgcgctttctgcagcggaacggcctcctgaaccggcccaaccccttgctggcgttgccccccgcccgcccccacggcccagaggacaaggaccaggcagtggagagcgcccaagcggaggattactcgcagctgcccggagaagatcacatcctggagcacctgcccgcccggctcaatgaggccctgctggaggcctgcgtggagcccacggacctgctgaccaccctctccaacatgctgcctgtgcgtctggccacggccatgatggtgccctacacgctgccgctggagagcgctctgtccttcaccatccgcttgctggagtggctgcccgacgttcccgaggacatccggtggatgaaggagcagacgggcagcatctgccagtacctggtgatgcgcgccaagaggaagctgggcaggcacctgccctccaggctgccggagcaggtggagctgcgccgcgtccagtcgctgccgtccgtgccgctgtcctgcgccgcctacagagaggcactgcccggctggatgcgcaacaacctctcgctgggggacgcgctggccaagtgggaggagtgccagcgccagctgctgctcggcctcttctgcaccaacgtggccttcccgcccgaagctctgcgcatgcgcgcacccgccgacccggctcccgcccccgcggacccagcatccccgcagcaccagctggccgggcctgcccccttgctgagcacccctgctcccgaggcccggcccgtgatcggggccctggggctgtgagaccccgaccctctcgaggaaccctgcctgagacgcctccattaccactgcgcagtgagatgaggggactcacagttgccaagaggggtctttgccgtgggccccctcgccagccactcaccagctgcatgcactgagaggggaggtttccacacccctcccctgggccgctgaggccccgcgcacctgtgccttaatcttccctcccctgtgctgcccgagcacctcccccgcccctttactcctgagaactttgcagctgcccttccctccccgtttttcatggcctgctgaaatatgtgtgtgaagaattatttattttcgccaaagcacatgtaataaatgctgcagcccagcctctgcccactttgtgtgtatgtgaccgcctgcttacttgcagtgagagcctggtggccagggtctggccctaccttggctgaccagcctctccacagctgcaggccaggtctcccagcgtcgcactcctgggcctggcatttggaacctgccaggctggcctgggaacacccccctacaggcacatatgaacgtactgcattcctgccgacccccctgtctaggatgcatccacaccccccccaattttgcccagcagcctcctggctgacccttggccacagccttctgagggccaatggaaatatttgggaccaagattcttggtaaataaaaacgaaaatgtttgcaaaa

SEQ ID NO: 21695 - DNA, 2805 bp, Homo sapiens
  source 1..2805: mol_type = unassigned DNA
atggtccgaggggggcggggctgacgtcgcgctgggaatgccctggccgagacactgaggcagggtagagagcgcttgcgggcgccgggcggagctgctgcggatcaggacccgagccgattcccgatcccgacccagatcctaacccgcgcccccgccccgccgccgccgccatgtacgacgcagagcgcggctggagcttgtccttcgcgggctgcggcttcctgggcttctaccacgtcggggcgacccgctgcctgagcgagcacgccccgcacctcctccgcgacgcgcgcatgttgttcggcgcttcggccggggcgttgcactgcgtcggcgtcctctccggtatcccgctggagcagactctgcaggtcctctcagatcttgtgcggaaggccaggagtcggaacattggcatcttccatccatccttcaacttaagcaagttcctccgacagggtctctgcaaatgcctcccggccaatgtccaccagctcatctccggcaaaataggcatctctcttaccagagtgtctgatggggaaaacgttctggtgtctgactttcggtccaaagacgaagtcgtggatgccttggtatgttcctgcttcatccccttctacagtggccttatccctccttccttcagaggcgtgcgatatgtggatggaggagtgagtgacaacgtacccttcattgatgccaaaacaaccatcaccgtgtcccccttctatggggagtacgacatctgccctaaagtcaagtccacgaactttcttcatgtggacatcaccaagctcagtctacgcctctgcacagggaacctctaccttctctcgagagcttttgtccccccggatctcaaggtgctgggagagatatgccttcgaggatatttggatgcattcaggttcttggaagagaagggcatctgcaacaggccccagccaggcctgaagtcatcctcagaagggatggatcctgaggtcgccatgcccagctgggcaaacatgagtctggattcttccccggagtcggctgccttggctgtgaggctggagggagatgagctgctagaccacctgcgtctcagcatcctgccctgggatgagagcatcctggacaccctctcgcccaggctcgctacagcactgagtgaagaaatgaaagacaaaggtggatacatgagcaagatttgcaacttgctacccattaggataatgtcttatgtaatgctgccctgtaccctgcctgtggaatctgccattgcgattgtccagagactggtgacatggcttccagatatgcccgacgatgtcctgtggttgcagtgggtgacctcacaggtgttcactcgagtgctgatgtgtctgctccccgcctccaggtcccaaatgccagtgagcagccaacaggcctccccatgcacacctgagcaggactggccctgctggactccctgctcccccaagggctgtccagcagagaccaaagcagaggccaccccgcggtccatcctcaggtccagcctgaacttcttcttgggcaataaagtacctgctggtgctgaggggctctccacctttcccagtttttcactagagaagagtctgtgagtcacttgaggaggcgagtctagcagattctttcagaggtgctaaagtttcccatctttgtgcagctacctccgcattgctgtgtagtgacccctgcctgtgacgtggaggatcccagcctctgagctgagttggttttatgaaaagctaggaagcaacctttcgcctgtgcagcggtccagcacttaactctaatacatcagcatgcgttaattcagctggttgggaaatgacaccaggaagcccagtgcagagggtcccttactgactgtttcgtggccctattaatggtcagactgttccagcatgaggttcttagaatgacaggtgtttggatgggtgggggccttgtgatggggggtaggctggcccatgtgtgatcttgtggggtggagggaagagaatagcatgatcccacttccccatgctgtgggaaggggtgcagttcgtccccaagaacgacactgcctgtcaggtggtctgcaaagatgataaccttgactactaaaaacgtctccatggcgggggtaacaagatgataatctacttaattttagaacacctttttcacctaactaaaataatgtttaaagagttttgtataaaaatgtaaggaagcgttgttacctgttgaattttgtattatgtgaatcagtgagatgttagtagaataagccttaaaaaaaaaaaaatcggttgggtgcagtggcacacggctgtaatcccagcactttgggaggccaaggttggcagatcacctgaggtcaggagttcaagaccagtctggccaacatagcaaaaccctgtctctactaaaaatacaaaaattatctgggcatggtggtgcatgcctgtaatcccagctattcggaaggctgaggcaggagaatcacttgaacccaggaggcggaggttgcggtgagctgagattgcaccatttcattccagcctgggcaacatgagtgaaagtctgactcaaaaaaaaaaaatttaaaaaacaaaataatctagtgtgcagggcattcacctcagccccccaggcaggagccaagcacagcaggagcttccgcctcctctccactggagcacacaacttgaacctggcttattttctgcagggaccagccccacatggtcagtgagtttctccccatgtgtggcgatgagagagtgtagaaataaagac

SEQ ID NO: 21696 - DNA, 2537 bp, Homo sapiens
  source 1..2537: mol_type = unassigned DNA
accagccccagcccggctccctccagagcccacatttgggcccagccccgtccaaggctgcatcccggccctatcccgggtcacggagtgacccttcctcgtcccgatcaccccgcccggtccacccgccatgggcttcttagaggaggagggcagatggaacctgtccttctccggcgccggctacctgggcgcccaccacgtgggcgccaccgaatgcctgcgccagcgagccccgcgcctcctccagggcgcccgccgcatctacggttcctcgtctggggcgctcaacgcagtcagcatcgtctgcggcaagtcggtcgacttctgctgctcccacctcctgggcatggttgggcagttggagcggctgagcctaagcatcctgcacccggcctacgcgcccatcgagcacgtcaagcagcagctgcaggatgctctgccccccgacgcccacgtcctggcctcccagcggctgggcatttcgctgacccgctggcctgacggacgcaacttcttggtcactgacttcgccacctgcgatgagctcatccaggccttggtctgcaccttatactttcctttctactgcgggctgatcccccccgagttcagaggggagcgctacatcgatggggctctgagcaacaacttgccctttgcagactgcccctccaccatcacggtgtcgcccttccatgggacagtggacatctgcccccagagcacctcccccaacctgcatgagctgaacgtcttcaacttcagcttccaaatctccactgagaacttcttcctggggctcatatgtctcataccccccagcctcgaggtagtggccgacaactgcagacaaggctacctggatgccctgaggttcctggagagacgtggactcaccaaggaaccagtgctatggacgctggtgtctaaggaacccccagccccggctgacggaaactgggatgctggctgtgaccaacgctggaaggggggcctgtctctcaactggaaagtgccccatgtgcaagtcaaggatgtacccaactttgagcagctctcaccagagctggaggctgcactgaagaaagcatgtacgagggatcccagccggtgggcccgcttctggcactcggggcctggacaggtgctgacgtacctgctgctaccctgcacactgcccttcgagtacatctacttccgcagcagaaggttggtggtgtggctgcccgatgtgccggcggacttgtggtggatgcagggcctgctgaggaacatggccctcgaggttttctccaggaccaaggcccagctccttgggcccatcagccctccggccactcgcgtcctggaaacaagccccctccaaccccagatagctcctcatagagaggagctcgggcccacccaccaggcctgagggggccgagcagggccagcccagtgactggtgtcccttgattcctgctctggcctttgtcctgtgtgcccacatctgccccagcgggaagaggccctgccaatctccgtggagaccctgcagcttggagcccgttccttggggcgcagcctgtcagcatgtccccggtcactgtgtacccaggtcacctgccctccctcttgccccgtctcatcagggagagaaaggaggacagccacagagacacatgtcttactttcagaatttccacggggggactaggagggcagcattgctggggagaggggctcctgttctgccgtggagctgcccacggagcacctcacagaagattgagaaagtgcctgatgcccgcgtcagagaccagaggagccaactgagatgatggggtgggggtgctccccccagactttctcagtcctgcagcggcccttgggggtgacccccggcatctaccccactcaggaaaccttgacttctgaattcctatcaggtccagagggtggaaggccctggcaggaagcaggaggaggaggagaggggggtccaggtcttttcaggatcccagctgtgggtgcttctgttgggcccagtggcccctgctatccccacagcctcattcctgcagaaggtttgtgacgtagctgtgcctgtacctggggcagagaggatgccagggacaccaggcctctggcctctccacgagtcactgctctccccattggcagcacgggacccatgctgtgcccccggccaggccctgaggaaatgctcagcctcagtggagatggggaggttagagagatggaggcgtgagtgagaacgggaagcaaaggaatacacgtgggaactaaagagaaaaatgaccagcctgggcagcatagcaagaccctgtctctaaaaaaaataataaaaacttagctgggcatggtggtgcatgcctgtggtcctggctacttgggaggctgaggatggaggatcatttgagcccaggaggtcgaggctgcagtgaaccgtgatcacgccactgcaccccagcccaggcaacaaagtgagcccctgtctctaaataaataaagagacaataagccactca

SEQ ID NO: 21697 - DNA, 2000 bp, Homo sapiens
  source 1..2000: mol_type = unassigned DNA
agcaccagccccagcccggctccctccagagcccacatttgggcccagccccgtccaaggctgcatcccggccctatcccgggtcacggagtgacccttcctcgtcccgatcaccccgcccggtccacccgccatgggcttcttagaggaggagggcagatggaacctgtccttctccggcgccggctacctgggcgcccaccacgtgggcgccaccgaatgcctgcgccagcgagccccgcgcctcctccagggcgcccgccgcatctacggttcctcgtctggggcgctcaacgcagtcagcatcgtctgcggcaagtcggtcgactgcccctccaccatcacggtgtcgcccttccatgggacagtggacatctgcccccagagcacctcccccaacctgcatgagctgaacgtcttcaacttcagcttccaaatctccactgagaacttcttcctggggctcatatgtctcataccccccagcctcgaggtagtggccgacaactgcagacaaggctacctggatgccctgaggttcctggagagacgtggactcaccaaggaaccagtgctatggacgctggtgtctaaggaacccccagccccggctgacggaaactgggatgctggctgtgaccaacgctggaaggggggcctgtctctcaactggaaagtgccccatgtgcaagtcaaggatgtacccaactttgagcagctctcaccagagctggaggctgcactgaagaaagcatgtacgagggatcccagccggtgggcccgcttctggcactcggggcctggacaggtgctgacgtacctgctgctaccctgcacactgcccttcgagtacatctacttccgcagcagaaggttggtggtgtggctgcccgatgtgccggcggacttgtggtggatgcagggcctgctgaggaacatggccctcgaggttttctccaggaccaaggcccagctccttgggcccatcagccctccggccactcgcgtcctggaaacaagccccctccaaccccagatagctcctcatagagaggagctcgggcccacccaccaggcctgagggggccgagcagggccagcccagtgactggtgtcccttgattcctgctctggcctttgtcctgtgtgcccacatctgccccagcgggaagaggccctgccaatctccgtggagaccctgcagcttggagcccgttccttggggcgcagcctgtcagcatgtccccggtcactgtgtacccaggtcacctgccctccctcttgccccgtctcatcagggagagaaaggaggacagccacagagacacatgtcttactttcagaatttccacggggggactaggagggcagcattgctggggagaggggctcctgttctgccgtggagctgcccacggagcacctcacagaagattgagaaagtgcctgatgcccgcgtcagagaccagaggagccaactgagatgatggggtgggggtgctccccccagactttctcagtcctgcagcggcccttgggggtgacccccggcatctaccccactcaggaaaccttgacttctgaattcctatcaggtccagagggtggaaggccctggcaggaagcaggaggaggaggagaggggggtccaggtcttttcaggatcccagctgtgggtgcttctgttgggcccagtggcccctgctatccccacagcctcattcctgcagaaggtttgtgacgtagctgtgcctgtacctggggcagagaggatgccagggacaccaggcctctggcctctccacgagtcactgctctccccattggcagcacgggacccatgctgtgcccccggccaggccctgaggaaatgctcagcctcagtggagatggggaggttagagagatggaggcgtgagtgagaacgggaagcaaaggaatacacgtgggaactaaagagaaaaatgaccagcctgggcagcatagcaagaccctgtctc

SEQ ID NO: 21698 - DNA, 921 bp, Homo sapiens
  source 1..921: mol_type = unassigned DNA
gctccctccagagcccacatttgggcccagccccgtccaaggctgcatcccggccctatcccgggtcacggagtgacccttcctcgtcccgatcaccccgcccggtccacccgccatgggcttcttagaggaggagggcagatggaacctgtccttctccggcgccggctacctgggcgcccaccacgtgggcgccaccgaatgcctgcgccagcgagccccgcgcctcctccagggcgcccgccgcatctacggttcctcgtctggggcgctcaacgcagtcagcatcgtctgcggcaagtcggtcgacttctgctgctcccacctcctgggcatggttgggcagttggagcggctgagcctaagcatcctgcacccggcctacgcgcccatcgagcacgtcaagcagcagctgcaggatgctctgccccccgacgcccacgtcctggcctcccagcggctgggcatttcgctgacccgctggcctgacggacgcaacttcttggtcactgacttcgccacctgcgatgagctcatccaggtagtggccgacaactgcagacaaggctacctggatgccctgaggttcctggagagacgtggactcaccaaggaaccagtgctatggacgctggtgtctaaggaacccccagccccggctgacggaaactgggatgctggctgtgaccaacgctggaaggggggcctgtctctcaactggaaagtgccccatgtgcaagtcaaggatgtacccaactttgagcagctctcaccagagctggaggctgcactgaagaaagcatgtacgagggatcccagccggtgggcccgcttctggcactcggggcctggacaggtgctgacgtacctgctgctaccctgcacactgcccttcgagtacatctacttccgcagcagaag

SEQ ID NO: 21699 - DNA, 2197 bp, Homo sapiens
  source 1..2197: mol_type = unassigned DNA
agcaccagccccagcccggctccctccagagcccacatttgggcccagccccgtccaaggctgcatcccggccctatcccgggtcacggagtgacccttcctcgtcccgatcaccccgcccggtccacccgccatgggcttcttagaggaggagggcagatggaacctgtccttctccggcgccggctacctgggcgcccaccacgtgggcgccaccgaatgcctgcgccagcgagccccgcgcctcctccagggcgcccgccgcatctacggttcctcgtctggggcgctcaacgcagtcagcatcgtctgcggcaagtcggtcgactgcccctccaccatcacggtgtcgcccttccatgggacagtggacatctgcccccagagcacctcccccaacctgcatgagctgaacgtcttcaacttcagcttccaaatctccactgagaacttcttcctggggctcatatgtctcataccccccagcctcgaggtagtggccgacaactgcagacaaggctacctggatgccctgaggttcctggagagacgtggactcaccaaggaaccagtgctatggacgctggtgtctaaggaacccccagccccggctgacggaaactgggatgctggctgtgaccaacgctggaaggggggcctgtctctcaactggaaagtgccccatgtgcaagtcaaggatgtacccaactttgagcagctctcaccagagctggaggctgcactgaagaaagcatgtacgagggatcccagccggtgggcccgcttctggcactcggggcctggacaggtgctgacgtacctgctgctaccctgcacactgcccttcgagtacatctacttccgcagcagaaggttggtggtgtggctgcccgatgtgccggcggacttgtggtggatgcagggcctgctgaggaacatggccctcgaggttttctccaggaccaaggcccagctccttgggcccatcagccctccggccactcgcgtcctggaaacaagccccctccaaccccagatagctcctcatagagaggagctcgggcccacccaccaggcctgagggggccgagcagggccagcccagtgactggtgtcccttgattcctgctctggcctttgtcctgtgtgcccacatctgccccagcgggaagaggccctgccaatctccgtggagaccctgcagcttggagcccgttccttggggcgcagcctgtcagcatgtccccggtcactgtgtacccaggtcacctgccctccctcttgccccgtctcatcagggagagaaaggaggacagccacagagacacatgtcttactttcagaatttccacggggggactaggagggcagcattgctggggagaggggctcctgttctgccgtggagctgcccacggagcacctcacagaagattgagaaagtgcctgatgcccgcgtcagagaccagaggagccaactgagatgatggggtgggggtgctccccccagactttctcagtcctgcagcggcccttgggggtgacccccggcatctaccccactcaggaaaccttgacttctgaattcctatcaggtccagagggtggaaggccctggcaggaagcaggaggaggaggagaggggggtccaggtcttttcaggatcccagctgtgggtgcttctgttgggcccagtggcccctgctatccccacagcctcattcctgcagaaggtttgtgacgtagctgtgcctgtacctggggcagagaggatgccagggacaccaggcctctggcctctccacgagtcactgctctccccattggcagcacgggacccatgctgtgcccccggccaggccctgaggaaatgctcagcctcagtggagatggggaggttagagagatggaggcgtgagtgagaacgggaagcaaaggaatacacgtgggaactaaagagaaaaatgaccagcctgggcagcatagcaagaccctgtctctaaaaaaaataataaaaacttagctgggcatggtggtgcatgcctgtggtcctggctacttgggaggctgaggatggaggatcatttgagcccaggaggtcgaggctgcagtgaaccgtgatcacgccactgcaccccagcccaggcaacaaagtgagcccctgtctctaaataaataaagagacaataagccactc

SEQ ID NO: 21700 - DNA, 4472 bp, Homo sapiens
  source 1..4472: mol_type = unassigned DNA
agtgaataatttaaaggggccgtgcctgcggagccgggcggaacgctagcggtgttggcgcggagtggaccccggctgcggcccctggcaatggcgccaccatcggtcccggagtcccagtgatgctctgtgccatagagcccccataacttcactactacgtgatagtaaatccccggcaaaaaccagcagcgccttgcaagcccacgccaccccaagcatcccaggactcttctgaaacgactccgggctaccagatcggccgtccagctggaatcaaccgatggaggctccgctgcaaactggaatggtgcttggcgtgatgatcggggccggagtggcggtggtggtcacggccgtgctcatcctcctggtggtgcggaggctgcgagtgccaaaaaccccagccccggatggcccccggtatcggttccggaagagggacaaagtgctcttctatggccggaagattatgcggaaggtgtcacaatccacctcctccctcgtggatacctctgtctccgccacctcccggccacgcatgaggaagaaactgaagatgctcaacattgccaagaagatcctgcgcatccagaaagagacgcccacgctgcagcggaaggagcccccgcccgcagtgctagaagctgacctgaccgagggcgacctggctaactcccatctgccctctgaagtgctttatatgctcaagaacgtccgggtgctgggccacttcgagaagccactcttcctggagctctgccgccacatggtcttccagcggctgggccagggtgactacgtcttccggccgggccagccagatgccagcatctacgtggtgcaggacgggctgctggagctctgtctgccagggcctgacgggaaggagtgtgtggtgaaggaagtggttcctggggacagcgtcaacagccttctcagcatcctggatgtcatcaccggtcaccagcatccccagcggaccgtgtctgcccgggcggcccgggactccacggtgctgcgcctgccggtggaagcattctccgcggtcttcaccaagtacccggagagcttggtgcgggtcgtgcagatcatcatggtgcggctgcagcgagtcaccttcctggcactgcacaactacctgggtctgaccaatgagctcttcagccacgagatccagcccctgcgtctgttccccagccccggcctcccaactcgcaccagccctgtgcggggctccaagagaatggtcagcacctcagctacagacgagcccagggagaccccagggcggccacccgatcccaccggggccccgctgcctggacctacaggggaccctgtgaagcccacatccctggaaaccccctcggcccctctgctgagccgctgcgtctccatgccaggggacatctcaggcttgcagggtggcccccgctccgacttcgacatggcctatgagcgtggccggatctccgtgtccctgcaggaagaggcctccggggggtccctggcagcccccgctcggacccccactcaggagcctcgtgagcagccggcaggcgcctgtgaatacagctactgtgaggatgagtcggccactggtggctgccctttcgggccctaccagggccgccagaccagcagcatcttcgaggcagcaaagcaggagctggccaagctgatgcggattgaggacccctccctcctgaacagcagagtcttgctgcaccacgccaaagctggcaccatcattgcccgccagggagaccaggacgtgagcctgcacttcgtgctctggggctgcctgcacgtgtaccagcgcatgatcgacaaggcggaggacgtgtgcctgttcgtagcgcagcccggggaactggtggggcagctggcggtgctcactggcgaacctctcatcttcacactgcgagcccaacgcgactgcaccttcctgcggatctccaagtccgacttctatgagatcatgcgcgcacagcccagtgtggtgctgagtgcggcgcacacggtggcagccaggatgtcgcccttcgtgcgccagatggacttcgccatcgactggactgcagtggaggcgggacgcgcgctgtacaggcagggcgaccgctccgactgcacttacatcgtgctcaatgggcggctgcgtagcgtgatccagcgaggcagtggcaagaaggagctggtgggcgagtacggccgcggcgacctcatcggcgtggtggaggcactgacccggcagccgcgagccacgacggtgcacgcggtgcgcgacacggagctggccaagcttcccgagggcaccttgggtcacatcaaacgccggtacccgcaggtcgtgacccgccttatccacctactgagccagaaaattctagggaatttgcagcagctgcaaggacccttcccagcaggctctgggttgggtgtgcccccacactcggaactcaccaacccagccagcaacctggcaactgtggcaatcctgcctgtgtgtgctgaggtccccatggtggccttcacgctggagctgcagcacgccctgcaggccatcggtccgacgctactccttaacagtgacatcatccgggcacgcctgggggcctccgcactggatagcatccaagagttccggctgtcagggtggctggcccagcaggaggatgcacaccgtatcgtactctaccagacggacgcctcgctgacgccctggaccgtgcgctgcctgcgacaggccgactgcatcctcattgtgggcctgggggaccaggagcctaccctcggccagctggagcagatgctggagaacacggctgtgcgcgcccttaagcagctagtcctgctccaccgagaggagggcgcgggccccacgcgcaccgtggagtggctaaatatgcgcagctggtgctcggggcacctgcacctgcgctgtccgcgccgcctcttttcgcgccgcagccctgccaagctgcatgagctctacgagaaggttttctccaggcgcgcggaccggcacagcgacttctcccgcttggcgagggtgctcacggggaacaccattgcccttgtgctaggcgggggcggggccaggggctgctcgcacatcggagtactaaaggcattagaggaggcgggggtccccgtggacctggtgggcggcacgtccattggctctttcatcggagcgttgtacgcggaggagcgcagcgccagccgcacgaagcagcgggcccgggagtgggccaagagcatgacttcggtgctggaacctgtgttggacctcacgtacccagtcacctccatgttcactgggtctgcctttaaccgcagcatccatcgggtcttccaggataagcagattgaggacctgtggctgccttacttcaacgtgaccacagatatcaccgcctcagccatgcgagtccacaaagatggctccctgtggcggtacgtgcgcgccagcatgacgctgtcgggctacctgcccccgctgtgcgaccccaaggacgggcacctactcatggatggcggctacatcaacaatctgccagcggacatcgcccgcagcatgggtgccaaaacggtcatcgccattgacgtggggagccaggatgagacggacctcagcacctacggggacagcctgtccggctggtggctgctgtggaagcggctgaatccctgggctgacaaggtaaaggttccagacatggctgaaatccagtcccgcctggcctacgtgtcctgtgtgcggcagctagaggttgtcaagtccagctcctactgcgagtacctgcgcccgcccatcgactgcttcaagaccatggactttgggaagttcgaccagatctatgatgtgggctaccagtacgggaaggcggtgtttggaggctggagccgtggcaacgtcattgagaaaatgctcacagaccggcggtctacagaccttaatgagagccgccgtgcagacgtgcttgccttcccaagctctggcttcactgacttggcagagattgtgtcccggattgagccccccacgagctatgtctctgatggctgtgctgacggagaggagtcagattgtctgacagagtatgaggaggacgccggacccgactgctcgagggatgaaggggggtcccccgagggcgcaagccccagcactgcctccgagatggaggaggagaagtcgattctccggcaacgacgctgtctgccccaggagccgcccggctcagccacagatgcctgaggacctcgacaggggtcaccccctccctcccacccctggactgggctgggggtggccccgtgggggtagctcactccccctcctgctgctatgcctgtgacccccgcggcccacacactggactgacctgccctgagcggggatgcagtgttgcactgatgacttgaccagcccctcccccaataaactcgcctcttggaaatgg

SEQ ID NO: 21701 - DNA, 4573 bp, Homo sapiens
  source 1..4573: mol_type = unassigned DNA
gcatccccacccactaatcccagcgtctctggttacgcctcccagcaatggcgccaccatcggtcccggagtcccagtgatgctctgtgccatagagcccccataacttcactactacgtgatagtaaatccccggcaaaaaccagcagcgccttgcaagcccacgccaccccaagcatcccaggactcttctgaaacgactccgggctaccagatcggccgtccagctggaatcaaccgatggaggctccgctgcaaactggaatgatggggacatcgagtcacgggctggctacgaactcctcgggggcgaaggtggcggagagggatgggttccaggacgtcctggcgcccggggaaggctcggcgggacggatttgcggtgcgcagccagtgccgttcgtccctcaggtgcttggcgtgatgatcggggccggagtggcggtggtggtcacggccgtgctcatcctcctggtggtgcggaggctgcgagtgccaaaaaccccagccccggatggcccccggtatcggttccggaagagggacaaagtgctcttctatggccggaagattatgcggaaggtgtcacaatccacctcctccctcgtggatacctctgtctccgccacctcccggccacgcatgaggaagaaactgaagatgctcaacattgccaagaagatcctgcgcatccagaaagagacgcccacgctgcagcggaaggagcccccgcccgcagtgctagaagctgacctgaccgagggcgacctggctaactcccatctgccctctgaagtgctttatatgctcaagaacgtccgggtgctgggccacttcgagaagccactcttcctggagctctgccgccacatggtcttccagcggctgggccagggtgactacgtcttccggccgggccagccagatgccagcatctacgtggtgcaggacgggctgctggagctctgtctgccagggcctgacgggaaggagtgtgtggtgaaggaagtggttcctggggacagcgtcaacagccttctcagcatcctggatgtcatcaccggtcaccagcatccccagcggaccgtgtctgcccgggcggcccgggactccacggtgctgcgcctgccggtggaagcattctccgcggtcttcaccaagtacccggagagcttggtgcgggtcgtgcagatcatcatggtgcggctgcagcgagtcaccttcctggcactgcacaactacctgggtctgaccaatgagctcttcagccacgagatccagcccctgcgtctgttccccagccccggcctcccaactcgcaccagccctgtgcggggctccaagagaatggtcagcacctcagctacagacgagcccagggagaccccagggcggccacccgatcccaccggggccccgctgcctggacctacaggggaccctgtgaagcccacatccctggaaaccccctcggcccctctgctgagccgctgcgtctccatgccaggggacatctcaggcttgcagggtggcccccgctccgacttcgacatggcctatgagcgtggccggatctccgtgtccctgcaggaagaggcctccggggggtccctggcagcccccgctcggacccccactcaggagcctcgtgagcagccggcaggcgcctgtgaatacagctactgtgaggatgagtcggccactggtggctgccctttcgggccctaccagggccgccagaccagcagcatcttcgaggcagcaaagcaggagctggccaagctgatgcggattgaggacccctccctcctgaacagcagagtcttgctgcaccacgccaaagctggcaccatcattgcccgccagggagaccaggacgtgagcctgcacttcgtgctctggggctgcctgcacgtgtaccagcgcatgatcgacaaggcggaggacgtgtgcctgttcgtagcgcagcccggggaactggtggggcagctggcggtgctcactggcgaacctctcatcttcacactgcgagcccaacgcgactgcaccttcctgcggatctccaagtccgacttctatgagatcatgcgcgcacagcccagtgtggtgctgagtgcggcgcacacggtggcagccaggatgtcgcccttcgtgcgccagatggacttcgccatcgactggactgcagtggaggcgggacgcgcgctgtacaggcagggcgaccgctccgactgcacttacatcgtgctcaatgggcggctgcgtagcgtgatccagcgaggcagtggcaagaaggagctggtgggcgagtacggccgcggcgacctcatcggcgtggtggaggcactgacccggcagccgcgagccacgacggtgcacgcggtgcgcgacacggagctggccaagcttcccgagggcaccttgggtcacatcaaacgccggtacccgcaggtcgtgacccgccttatccacctactgagccagaaaattctagggaatttgcagcagctgcaaggacccttcccagcaggctctgggttgggtgtgcccccacactcggaactcaccaacccagccagcaacctggcaactgtggcaatcctgcctgtgtgtgctgaggtccccatggtggccttcacgctggagctgcagcacgccctgcaggccatcggtccgacgctactccttaacagtgacatcatccgggcacgcctgggggcctccgcactggatagcatccaagagttccggctgtcagggtggctggcccagcaggaggatgcacaccgtatcgtactctaccagacggacgcctcgctgacgccctggaccgtgcgctgcctgcgacaggccgactgcatcctcattgtgggcctgggggaccaggagcctaccctcggccagctggagcagatgctggagaacacggctgtgcgcgcccttaagcagctagtcctgctccaccgagaggagggcgcgggccccacgcgcaccgtggagtggctaaatatgcgcagctggtgctcggggcacctgcacctgcgctgtccgcgccgcctcttttcgcgccgcagccctgccaagctgcatgagctctacgagaaggttttctccaggcgcgcggaccggcacagcgacttctcccgcttggcgagggtgctcacggggaacaccattgcccttgtgctaggcgggggcggggccaggggctgctcgcacatcggagtactaaaggcattagaggaggcgggggtccccgtggacctggtgggcggcacgtccattggctctttcatcggagcgttgtacgcggaggagcgcagcgccagccgcacgaagcagcgggcccgggagtgggccaagagcatgacttcggtgctggaacctgtgttggacctcacgtacccagtcacctccatgttcactgggtctgcctttaaccgcagcatccatcgggtcttccaggataagcagattgaggacctgtggctgccttacttcaacgtgaccacagatatcaccgcctcagccatgcgagtccacaaagatggctccctgtggcggtacgtgcgcgccagcatgacgctgtcgggctacctgcccccgctgtgcgaccccaaggacgggcacctactcatggatggcggctacatcaacaatctgccagcggacatcgcccgcagcatgggtgccaaaacggtcatcgccattgacgtggggagccaggatgagacggacctcagcacctacggggacagcctgtccggctggtggctgctgtggaagcggctgaatccctgggctgacaaggtaaaggttccagacatggctgaaatccagtcccgcctggcctacgtgtcctgtgtgcggcagctagaggttgtcaagtccagctcctactgcgagtacctgcgcccgcccatcgactgcttcaagaccatggactttgggaagttcgaccagatctatgatgtgggctaccagtacgggaaggcggtgtttggaggctggagccgtggcaacgtcattgagaaaatgctcacagaccggcggtctacagaccttaatgagagccgccgtgcagacgtgcttgccttcccaagctctggcttcactgacttggcagagattgtgtcccggattgagccccccacgagctatgtctctgatggctgtgctgacggagaggagtcagattgtctgacagagtatgaggaggacgccggacccgactgctcgagggatgaaggggggtcccccgagggcgcaagccccagcactgcctccgagatggaggaggagaagtcgattctccggcaacgacgctgtctgccccaggagccgcccggctcagccacagatgcctgaggacctcgacaggggtcaccccctccctcccacccctggactgggctgggggtggccccgtgggggtagctcactccccctcctgctgctatgcctgtgacccccgcggcccacacactggactgacctgccctgagcggggatgcagtgttgcactgatgacttgaccagcccctcccccaataaactcgcctcttggaaatgg

SEQ ID NO: 21702 - DNA, 4460 bp, Homo sapiens
  source 1..4460: mol_type = unassigned DNA
caatggcgccaccatcggtcccggagtcccagtgatgctctgtgccatagagcccccataacttcactactacgtgatagtaaatccccggcaaaaaccagcagcgccttgcaagcccacgccaccccaagcatcccaggactcttctgaaacagggcagtgacccgggaggaagtcaccaggtgcagaggaccgtgccctgtggggacctgcctgcaggctgctgacagactccgggctaccagatcggccgtccagctggaatcaaccgatggaggctccgctgcaaactggaatggtgcttggcgtgatgatcggggccggagtggcggtggtggtcacggccgtgctcatcctcctggtggtgcggaggctgcgagtgccaaaaaccccagccccggatggcccccggtatcggttccggaagagggacaaagtgctcttctatggccggaagattatgcggaaggtgtcacaatccacctcctccctcgtggatacctctgtctccgccacctcccggccacgcatgaggaagaaactgaagatgctcaacattgccaagaagatcctgcgcatccagaaagagacgcccacgctgcagcggaaggagcccccgcccgcagtgctagaagctgacctgaccgagggcgacctggctaactcccatctgccctctgaagtgctttatatgctcaagaacgtccgggtgctgggccacttcgagaagccactcttcctggagctctgccgccacatggtcttccagcggctgggccagggtgactacgtcttccggccgggccagccagatgccagcatctacgtggtgcaggacgggctgctggagctctgtctgccagggcctgacgggaaggagtgtgtggtgaaggaagtggttcctggggacagcgtcaacagccttctcagcatcctggatgtcatcaccggtcaccagcatccccagcggaccgtgtctgcccgggcggcccgggactccacggtgctgcgcctgccggtggaagcattctccgcggtcttcaccaagtacccggagagcttggtgcgggtcgtgcagatcatcatggtgcggctgcagcgagtcaccttcctggcactgcacaactacctgggtctgaccaatgagctcttcagccacgagatccagcccctgcgtctgttccccagccccggcctcccaactcgcaccagccctgtgcggggctccaagagaatggtcagcacctcagctacagacgagcccagggagaccccagggcggccacccgatcccaccggggccccgctgcctggacctacaggggaccctgtgaagcccacatccctggaaaccccctcggcccctctgctgagccgctgcgtctccatgccaggggacatctcaggcttgcagggtggcccccgctccgacttcgacatggcctatgagcgtggccggatctccgtgtccctgcaggaagaggcctccggggggtccctggcagcccccgctcggacccccactcaggagcctcgtgagcagccggcaggcgcctgtgaatacagctactgtgaggatgagtcggccactggtggctgccctttcgggccctaccagggccgccagaccagcagcatcttcgaggcagcaaagcaggagctggccaagctgatgcggattgaggacccctccctcctgaacagcagagtcttgctgcaccacgccaaagctggcaccatcattgcccgccagggagaccaggacgtgagcctgcacttcgtgctctggggctgcctgcacgtgtaccagcgcatgatcgacaaggcggaggacgtgtgcctgttcgtagcgcagcccggggaactggtggggcagctggcggtgctcactggcgaacctctcatcttcacactgcgagcccaacgcgactgcaccttcctgcggatctccaagtccgacttctatgagatcatgcgcgcacagcccagtgtggtgctgagtgcggcgcacacggtggcagccaggatgtcgcccttcgtgcgccagatggacttcgccatcgactggactgcagtggaggcgggacgcgcgctgtacaggcagggcgaccgctccgactgcacttacatcgtgctcaatgggcggctgcgtagcgtgatccagcgaggcagtggcaagaaggagctggtgggcgagtacggccgcggcgacctcatcggcgtggtggaggcactgacccggcagccgcgagccacgacggtgcacgcggtgcgcgacacggagctggccaagcttcccgagggcaccttgggtcacatcaaacgccggtacccgcaggtcgtgacccgccttatccacctactgagccagaaaattctagggaatttgcagcagctgcaaggacccttcccagcaggctctgggttgggtgtgcccccacactcggaactcaccaacccagccagcaacctggcaactgtggcaatcctgcctgtgtgtgctgaggtccccatggtggccttcacgctggagctgcagcacgccctgcaggccatcggtccgacgctactccttaacagtgacatcatccgggcacgcctgggggcctccgcactggatagcatccaagagttccggctgtcagggtggctggcccagcaggaggatgcacaccgtatcgtactctaccagacggacgcctcgctgacgccctggaccgtgcgctgcctgcgacaggccgactgcatcctcattgtgggcctgggggaccaggagcctaccctcggccagctggagcagatgctggagaacacggctgtgcgcgcccttaagcagctagtcctgctccaccgagaggagggcgcgggccccacgcgcaccgtggagtggctaaatatgcgcagctggtgctcggggcacctgcacctgcgctgtccgcgccgcctcttttcgcgccgcagccctgccaagctgcatgagctctacgagaaggttttctccaggcgcgcggaccggcacagcgacttctcccgcttggcgagggtgctcacggggaacaccattgcccttgtgctaggcgggggcggggccaggggctgctcgcacatcggagtactaaaggcattagaggaggcgggggtccccgtggacctggtgggcggcacgtccattggctctttcatcggagcgttgtacgcggaggagcgcagcgccagccgcacgaagcagcgggcccgggagtgggccaagagcatgacttcggtgctggaacctgtgttggacctcacgtacccagtcacctccatgttcactgggtctgcctttaaccgcagcatccatcgggtcttccaggataagcagattgaggacctgtggctgccttacttcaacgtgaccacagatatcaccgcctcagccatgcgagtccacaaagatggctccctgtggcggtacgtgcgcgccagcatgacgctgtcgggctacctgcccccgctgtgcgaccccaaggacgggcacctactcatggatggcggctacatcaacaatctgccagcggacatcgcccgcagcatgggtgccaaaacggtcatcgccattgacgtggggagccaggatgagacggacctcagcacctacggggacagcctgtccggctggtggctgctgtggaagcggctgaatccctgggctgacaaggtaaaggttccagacatggctgaaatccagtcccgcctggcctacgtgtcctgtgtgcggcagctagaggttgtcaagtccagctcctactgcgagtacctgcgcccgcccatcgactgcttcaagaccatggactttgggaagttcgaccagatctatgatgtgggctaccagtacgggaaggcggtgtttggaggctggagccgtggcaacgtcattgagaaaatgctcacagaccggcggtctacagaccttaatgagagccgccgtgcagacgtgcttgccttcccaagctctggcttcactgacttggcagagattgtgtcccggattgagccccccacgagctatgtctctgatggctgtgctgacggagaggagtcagattgtctgacagagtatgaggaggacgccggacccgactgctcgagggatgaaggggggtcccccgagggcgcaagccccagcactgcctccgagatggaggaggagaagtcgattctccggcaacgacgctgtctgccccaggagccgcccggctcagccacagatgcctgaggacctcgacaggggtcaccccctccctcccacccctggactgggctgggggtggccccgtgggggtagctcactccccctcctgctgctatgcctgtgacccccgcggcccacacactggactgacctgccctgagcggggatgcagtgttgcactgatgacttgaccagcccctcccccaataaactcgcctcttggaaatgg

SEQ ID NO: 21703 - DNA, 1482 bp, Homo sapiens
  source 1..1482: mol_type = unassigned DNA
agcaatggcgccaccatcggtcccggagtcccagtgatgctctgtgccatagagcccccggtatcggttccggaagagggacaaagtgctcttctatggccggaagattatgcggaaggtgtcacaatccacctcctccctcgtggatacctctgtctccgccacctcccggccacgcatgaggaagaaactgaagatgctcaacattgccaagaagatcctgcgcatccagaaagagacgcccacgctgcagcggaaggagcccccgcccgcagtgctagaagctgacctgaccgagggcgacctggctaactcccatctgccctctgaagtgctttatatgctcaagaacgtccgggtgctgggccacttcgagaagccactcttcctggagctctgccgccacatggtcttccagcggctgggccagggtgactacgtcttccggccgggccagccagatgccagcatctacgtggtgcaggacgggctgctggagctctgtctgccagggcctgacgggaaggagtgtgtggtgaaggaagtggttcctggggacagcgtcaacagccttctcagcatcctggatgtcatcaccggtcaccagcatccccagcggaccgtgtctgcccgggcggcccgggactccacggtgctgcgcctgccggtggaagcattctccgcggtcttcaccaagtacccggagagcttggtgcgggtcgtgcagatcatcatggtgcggctgcagcgagtcaccttcctggcactgcacaactacctgggtctgaccaatgagctcttcagccacgagatccagcccctgcgtctgttccccagccccggcctcccaactcgcaccagccctgtgcggggctccaagagaatggtcagcacctcagctacagacgagcccagggagaccccagggcggccacccgatcccaccggggccccgctgcctggacctacaggggaccctgtgaagcccacatccctggaaaccccctcggcccctctgctgagccgctgcgtctccatgccaggggacatctcaggcttgcagggtggcccccgctccgacttcgacatggcctatgagcgtggccggatctccgtgtccctgcaggaagaggcctccggggggtccctggcagcccccgctcggacccccactcaggagcctcgtgagcagccggcaggcgcctgtgaatacagctactgtgaggatgagtcggccactggtggctgccctttcgggccctaccagggccgccagaccagcagcatcttcgaggcagcaaagcaggagctggccaagctgatgcggattgaggacccctccctcctgaacagcagagtcttgctgcaccacgccaaagctggcaccatcattgcccgccagggagaccaggacgtgagcggcccacacactggactgacctgccctgagcggggatgcagtgttgcactgatgacttgacc

SEQ ID NO: 21704 - DNA, 4508 bp, Homo sapiens
  source 1..4508: mol_type = unassigned DNA
gagtctgggtttccgttagcctcgcaggggtgtcccttcgagggtcgttagcgagcctccgctttcccacgatctgtcctccgattcctgttaactctagactttctgatgttcccataccccccacgtctcggcaggtgtttccacaccggtagccagctgtgccctgaggtggaagaggaccggccacccaggaattttccaacaatggcgccaccatcggtcccggagtcccagtgatgctctgtgccatagagcccccataacttcactactacgtgatagtaaatccccggcaaaaaccagcagcgccttgcaagcccacgccaccccaagcatcccaggactcttctgaaacgactccgggctaccagatcggccgtccagctggaatcaaccgatggaggctccgctgcaaactggaatggtgcttggcgtgatgatcggggccggagtggcggtggtggtcacggccgtgctcatcctcctggtggtgcggaggctgcgagtgccaaaaaccccagccccggatggcccccggtatcggttccggaagagggacaaagtgctcttctatggccggaagattatgcggaaggtgtcacaatccacctcctccctcgtggatacctctgtctccgccacctcccggccacgcatgaggaagaaactgaagatgctcaacattgccaagaagatcctgcgcatccagaaagagacgcccacgctgcagcggaaggagcccccgcccgcagtgctagaagctgacctgaccgagggcgacctggctaactcccatctgccctctgaagtgctttatatgctcaagaacgtccgggtgctgggccacttcgagaagccactcttcctggagctctgccgccacatggtcttccagcggctgggccagggtgactacgtcttccggccgggccagccagatgccagcatctacgtggtgcaggacgggctgctggagctctgtctgccagggcctgacgggaaggagtgtgtggtgaaggaagtggttcctggggacagcgtcaacagccttctcagcatcctggatgtcatcaccggtcaccagcatccccagcggaccgtgtctgcccgggcggcccgggactccacggtgctgcgcctgccggtggaagcattctccgcggtcttcaccaagtacccggagagcttggtgcgggtcgtgcagatcatcatggtgcggctgcagcgagtcaccttcctggcactgcacaactacctgggtctgaccaatgagctcttcagccacgagatccagcccctgcgtctgttccccagccccggcctcccaactcgcaccagccctgtgcggggctccaagagaatggtcagcacctcagctacagacgagcccagggagaccccagggcggccacccgatcccaccggggccccgctgcctggacctacaggggaccctgtgaagcccacatccctggaaaccccctcggcccctctgctgagccgctgcgtctccatgccaggggacatctcaggcttgcagggtggcccccgctccgacttcgacatggcctatgagcgtggccggatctccgtgtccctgcaggaagaggcctccggggggtccctggcagcccccgctcggacccccactcaggagcctcgtgagcagccggcaggcgcctgtgaatacagctactgtgaggatgagtcggccactggtggctgccctttcgggccctaccagggccgccagaccagcagcatcttcgaggcagcaaagcaggagctggccaagctgatgcggattgaggacgtgagcctgcacttcgtgctctggggctgcctgcacgtgtaccagcgcatgatcgacaaggcggaggacgtgtgcctgttcgtagcgcagcccggggaactggtggggcagctggcggtgctcactggcgaacctctcatcttcacactgcgagcccaacgcgactgcaccttcctgcggatctccaagtccgacttctatgagatcatgcgcgcacagcccagtgtggtgctgagtgcggcgcacacggtggcagccaggatgtcgcccttcgtgcgccagatggacttcgccatcgactggactgcagtggaggcgggacgcgcgctgtacaggcagggcgaccgctccgactgcacttacatcgtgctcaatgggcggctgcgtagcgtgatccagcgaggcagtggcaagaaggagctggtgggcgagtacggccgcggcgacctcatcggcgtggtggaggcactgacccggcagccgcgagccacgacggtgcacgcggtgcgcgacacggagctggccaagcttcccgagggcaccttgggtcacatcaaacgccggtacccgcaggtcgtgacccgccttatccacctactgagccagaaaattctagggaatttgcagcagctgcaaggacccttcccaggctctgggttgggtgtgcccccacactcggaactcaccaacccagccagcaacctggcaactgtggcaatcctgcctgtgtgtgctgaggtccccatggtggccttcacgctggagctgcagcacgccctgcaggccatcggtccgacgctactccttaacagtgacatcatccgggcacgcctgggggcctccgcactggatagcatccaagagttccggctgtcagggtggctggcccagcaggaggatgcacaccgtatcgtactctaccagacggacgcctcgctgacgccctggaccgtgcgctgcctgcgacaggccgactgcatcctcattgtgggcctgggggaccaggagcctaccctcggccagctggagcagatgctggagaacacggctgtgcgcgcccttaagcagctagtcctgctccaccgagaggagggcgcgggccccacgcgcaccgtggagtggctaaatatgcgcagctggtgctcggggcacctgcacctgcgctgtccgcgccgcctcttttcgcgccgcagccctgccaagctgcatgagctctacgagaaggttttctccaggcgcgcggaccggcacagcgacttctcccgcttggcgagggtgctcacggggaacaccattgcccttgtgctaggcgggggcggggccaggggctgctcgcacatcggagtactaaaggcattagaggaggcgggggtccccgtggacctggtgggcggcacgtccattggctctttcatcggagcgttgtacgcggaggagcgcagcgccagccgcacgaagcagcgggcccgggagtgggccaagagcatgacttcggtgctggaacctgtgttggacctcacgtacccagtcacctccatgttcactgggtctgcctttaaccgcagcatccatcgggtcttccaggataagcagattgaggacctgtggctgccttacttcaacgtgaccacagatatcaccgcctcagccatgcgagtccacaaagatggctccctgtggcggtacgtgcgcgccagcatgacgctgtcgggctacctgcccccgctgtgcgaccccaaggacgggcacctactcatggatggcggctacatcaacaatctgccagcggacatcgcccgcagcatgggtgccaaaacggtcatcgccattgacgtggggagccaggatgagacggacctcagcacctacggggacagcctgtccggctggtggctgctgtggaagcggctgaatccctgggctgacaaggtaaaggttccagacatggctgaaatccagtcccgcctggcctacgtgtcctgtgtgcggcagctagaggttgtcaagtccagctcctactgcgagtacctgcgcccgcccatcgactgcttcaagaccatggactttgggaagttcgaccagatctatgatgtgggctaccagtacgggaaggcggtgtttggaggctggagccgtggcaacgtcattgagaaaatgctcacagaccggcggtctacagaccttaatgagagccgccgtgcagacgtgcttgccttcccaagctctggcttcactgacttggcagagattgtgtcccggattgagccccccacgagctatgtctctgatggctgtgctgacggagaggagtcagattgtctgacagagtatgaggaggacgccggacccgactgctcgagggatgaaggggggtcccccgagggcgcaagccccagcactgcctccgagatggaggaggagaagtcgattctccggcaacgacgctgtctgccccaggagccgcccggctcagccacagatgcctgaggacctcgacaggggtcaccccctccctcccacccctggactgggctgggggtggccccgtgggggtagctcactccccctcctgctgctatgcctgtgacccccgcggcccacacactggactgacctgccctgagcggggatgcagtgttgcactgatgacttgaccagcccctcccccaataaactcgcctcttggaaatgg

SEQ ID NO: 21705 - DNA, 4581 bp, Homo sapiens
  source 1..4581: mol_type = unassigned DNA
aaaagacagcttttcttcctggagaacagactttttcagcaggattttcctttcagtgaaacataatttgacttgaaaggaacccagggaaaagtgtccaggtgtgagcatgagcgggtagaggtgtgcccttgtttgcttcaggctgtctgcttttcgcccctgactgttttttctgtttctggccatggaggaagagaaagatgacagcccacagctgacggggattgcagttggagccctcctggccctggccttggttggtgtcctcatccttttcatgttcagaaggcttagacaatttcgacaagcacagcccactcctcagtaccggttccggaagagagacaaagtgatgttttacggccggaagatcatgaggaaggtgaccacactccccaacacccttgtggagaacactgccctgccccggcagcgggccaggaagaggaccaaggtgctgtctttggccaagaggattctgcgtttcaagaaggaatacccggccctgcagcccaaggagcccccgccctccctgctggaggccgacctcacggagtttgacgtgaagaattctcacctgccatcggaagttctgtacatgctgaaaaacgttcgggtcctgggccactttgagaagccgctgttcctggagctttgcaaacacatcgtctttgtgcagctgcaggaaggggagcacgtcttccagcccagggagccggaccccagcatctgtgtggtgcaggacgggcggctggaggtctgcatccaggacactgacggcaccgaggtggtggtgaaagaggttctggcgggagacagcgtccacagcctgctcagcatcctggacatcatcaccggccatgctgcaccttacaaaacggtctccgtccgcgcggccatcccgtccaccatcctccggcttccagctgcggcttttcatggagtttttgagaaatatccggaaactctggtgagggtggtgcagatcatcatggtgcggctgcagagggtgacctttctggctctgcacaactacctcggcctgaccacagagctcttcaacgctgagagccaggccatccctctcgtgtctgtagccagtgtggctgccgggaaggccaagaagcaggtgttctatggcgaagaagagcggcttaaaaagccaccgcggctccaggagtcctgtgactcagatcacgggggcggccgcccggcagctgctgggcccctgctgaagaggagccactccgtccccgcgccttccattcgcaaacagatcttggaggagctggagaagcccggggcaggtgaccctgacccttcggccccacaagggggcccaggcagtgccacttctgatctggggatggcatgtgaccgtgccagggtcttcctgcactcggacgagcaccccgggagctccgtggccagcaagtccaggaaaagcgtgatggttgcagagataccctccacggtctcccagcactcagagagtcacacggatgagaccctggccagcaggaagtcggatgccatcttcagagctgccaagaaggacctgctcaccctgatgaagctggaagactcatctctgttggatggccgggtggcgcttctgcacgttcctgcaggcacggtggtgtcaaggcagggagaccaggacgccagcatcctgttcgtggtctcggggctgctgcacgtgtaccagcggaagatcggcagccaggaggacacctgcttgttcctcacgcgccccggggagatggtgggccagctggccgtgctcaccggggagcctctcatcttcaccgtcaaggccaacagggactgcagcttcctgtccatctccaaggcccacttctatgaaatcatgcggaagcagccgaccgtcgtcctgggtgtggcgcacactgtggtgaagaggatgtcgtccttcgtgcggcaaatcgactttgccctggactgggtggaggtggaggccgggcgagcaatatacaggcagggggacaagtccgactgcacgtacatcatgctcagcggccggctgcgctctgtgatccggaaggatgatgggaagaagcgcctggccggggagtacggccgaggagacctcgtcggcgtggtggagacactgacccaccaggcccgggcgaccacggtgcatgccgttcgggactcagaattggccaagctgccggcaggagccctcacgtccatcaagcgcaggtacccacaggtggtgactcggctgattcatctcttgggtgagaagatcctgggcagcctccagcagggacctgtgacaggccaccagcttgggctccccacggagggcagcaagtgggacttggggaacccggctgtcaacctgtccacggtggcagtgatgcccgtgtcagaggaagtgcccctcaccgccttcgccctggagctggagcatgccctcagcgccatcggcccgaccctgctgctgactagtgacaacataaaacggcgccttggctccgctgccctggacagtgttcacgagtaccggctgtccagctggctggggcagcaggaggacacccacaggatcgtgctctaccaggtagatggcacgctcacaccctggacccagcgctgcgtgcgccaggccgactgcatcctcatcgtgggcctgggtgaccaggagcccacagtgggcgagctggagcggatgctggagagcacagctgtgcgtgcccagaagcagctgatcctgctgcacagggaggagggcccggcgccagcgcgcaccgtggagtggctcaacatgcggagctggtgctccggccacctgcacctctgctgcccgcgccgcgtcttctccaggaggagcctgcccaagctggtggagatgtacaagcatgtcttccagcggcccccggaccgacactcagacttctcccgcctggcgagggtgctgacgggcaacgccattgccctggtgcttgggggagggggagcaagaggctgtgcccaggtgggcgttctcaaggccttggcggagtgcggcatccctgtggacatggtgggaggcacgtccatcggggccttcgtgggtgccctgtactctgaggagcggaactacagccagatgcggatccgggccaagcagtgggccgagggcatgacgtccttgatgaaggccgcgctggacctcacctaccccatcacgtccatgttctccggagccggcttcaacagcagcatcttcagcgtcttcaaggaccagcagatcgaggacctgtggattccttatttcgccatcaccaccgacatcacagcctcggccatgcgggtccacaccgacggctccctgtggtggtacgtgcgtgccagcatgtccctgtccggttacatgccccctctctgtgacccgaaggacggacacctgctgatggacgggggctacatcaacaacctcccagcggatgtggcccggtccatgggggcaaaagtggtgatcgccattgacgtgggcagccgagatgagacggacctcaccaactatggggatgcgctgtctgggtggtggctgctgtggaaacgctggaaccccttggccacgaaagtcaaggtgttgaacatggcagagattcagacgcgcctggcctacgtgtgttgcgtgcggcagctggaggtggtgaagagcagtgactactgcgagtacctgcgcccccccatcgacagctacagcaccctggacttcggcaagttcaacgagatctgcgaagtgggctaccagcacgggcgcacggtgtttgacatctggggccgcagcggcgtgctggagaagatgctccgcgaccagcaggggccgagcaagaagcccgcgagtgcggtcctcacctgtcccaacgcctccttcacggaccttgccgaaattgtgtctcgcattgagcccgccaagcccgccatggtggatgacgaatctgactaccagacggagtacgaggaggagctgctggacgtccccagggatgcatacgcagacttccagagcacctcagcccagcagggctcagacttggaggacgagtcctcactgcggcatcgacaccccagtctggctttcccaaaactgtctgagggctcctctgaccaggacgggtagaggcctctgctaaagagcccggatgcagcgtcttccgtgggactgtccccaaggctgaggctcctgccaagtcctaggggcctctgtacctgccctgctggaagccctgacttccccggggccccaggctgtgttagggttctctgggcctcttctttgtaccagcagccctgcatacagggccctgtgagcccccctgcagtcctgtgaggcccctgaagctctgtgaggcccctgaagctctgtgaaccccctgcagccctgtgaggccccccgaagccctgtgaggccccccgaagccctgtgaaccacctgctgccctgtgaggcccccaaagccctgtgaactgcctgctgtcctgtgaactgcctgctgccctgtgaggtgtgggagccctgatgctgccgtgtgatgtttcaataaaggtggatctcactgtt

SEQ ID NO: 21706 - DNA, 2741 bp, Homo sapiens
  source 1..2741: mol_type = unassigned DNA
cttacaaaacggtctccgtccgcgcggccatcccgtccaccatcctccggcttccagctgcggcttttcatggagtttttgagaaatatccggaaactctggtgagggtggtgcagatcatcatggtgcggctgcagagggtgacctttctggctctgcacaactacctcggcctgaccacagagctcttcaacgctgagagccaggccatccctctcgtgtctgtagccagtgtggctgccgggaaggccaagaagcaggtgttctatggcgaagaagagcggcttaaaaagccaccgcggctccaggagtcctgtgactcagcagatcacgggggcggccgcccggcagctgctgggcccctgctgaagaggagccactccgtccccgcgccttccattcgcaaacagatcttggaggagctggagaagcccggggcaggtgaccctgacccttcggccccacaaggccaccagcttgggctccccacggagggcagcaagtgggacttggggaacccggctgtcaacctgtccacggtggcagtgatgcccgtgtcagaggaagtgcccctcaccgccttcgccctggagctggagcatgccctcagcgccatcggcccgaccctgctgctgactagtgacaacataaaacggcgccttggctccgctgccctggacagtgttcacgagtaccggctgtccagctggctggggcagcaggaggacacccacaggatcgtgctctaccaggtagatggcacgctcacaccctggacccagcgctgcgtgcgccaggccgactgcatcctcatcgtgggcctgggtgaccaggagcccacagtgggcgagctggagcggatgctggagagcacagctgtgcgtgcccagaagcagctgatcctgctgcacagggaggagggcccggcgccagcgcgcaccgtggagtggctcaacatgcggagctggtgctccggccacctgcacctctgctgcccgcgccgcgtcttctccaggaggagcctgcccaagctggtggagatgtacaagcatgtcttccagcggcccccggaccgacactcagacttctcccgcctggcgagggtgctgacgggcaacgccattgccctggtgcttgggggagggggagcaagaggctgtgcccaggtgggcgttctcaaggccttggcggagtgcggcatccctgtggacatggtgggaggcacgtccatcggggccttcgtgggtgccctgtactctgaggagcggaactacagccagatgcggatccgggccaagcagtgggccgagggcatgacgtccttgatgaaggccgcgctggacctcacctaccccatcacgtccatgttctccggagccggcttcaacagcagcatcttcagcgtcttcaaggaccagcagatcgaggacctgtggattccttatttcgccatcaccaccgacatcacagcctcggccatgcgggtccacaccgacggctccctgtggtggtacgtgcgtgccagcatgtccctgtccggttacatgccccctctctgtgacccgaaggacggacacctgctgatggacgggggctacatcaacaacctcccagcggatgtggcccggtccatgggggcaaaagtggtgatcgccattgacgtgggcagccgagatgagacggacctcaccaactatggggatgcgctgtctgggtggtggctgctgtggaaacgctggaaccccttggccacgaaagtcaaggtgttgaacatggcagagattcagacgcgcctggcctacgtgtgttgcgtgcggcagctggaggtggtgaagagcagtgactactgcgagtacctgcgcccccccatcgacagctacagcaccctggacttcggcaagttcaacgagatctgcgaagtgggctaccagcacgggcgcacggtgtttgacatctggggccgcagcggcgtgctggagaagatgctccgcgaccagcaggggccgagcaagaagcccgcgagtgcggtcctcacctgtcccaacgcctccttcacggaccttgccgaaattgtgtctcgcattgagcccgccaagcccgccatggtggatgacgaatctgactaccagacggagtacgaggaggagctgctggacgtccccagggatgcatacgcagacttccagagcacctcagcccagcagggctcagacttggaggacgagtcctcactgcggcatcgacaccccagtctggctttcccaaaactgtctgagggctcctctgaccaggacgggtagaggcctctgctaaagagcccggatgcagcgtcttccgtgggactgtccccaaggctgaggctcctgccaagtcctaggggcctctgtacctgccctgctggaagccctgacttccccggggccccaggctgtgttagggttctctgggcctcttctttgtaccagcagccctgcatacagggccctgtgagcccccctgcagtcctgtgaggcccctgaagctctgtgaggcccctgaagctctgtgaaccccctgcagccctgtgaggccccccgaagccctgtgaggccccccgaagccctgtgaaccacctgctgccctgtgaggcccccaaagccctgtgaactgcctgctgtcctgtgaactgcctgctgccctgtgaggtgtgggagccctgatgctgccgtgtgatgtttcaataaaggtggatctcactgttg

SEQ ID NO: 21707 - DNA, 2344 bp, Homo sapiens
  source 1..2344: mol_type = unassigned DNA
aaaagacagcttttcttcctggagaacagactttttcagcaggattttcctttcagtgaaacataatttgacttgaaaggaacccagggaaaagtgtccaggtgtgagcatgagcgggtagaggtgtgcccttgtttgcttcaggctgtctgcttttcgcccctgactgttttttctgtttctggccatggaggaagagaaagatgacagcccacaggctgacttctgcctgggcaccgccctgcactcttggggactgtggttcacggaggaaggttcaccgtccaccatgctgacggggattgcagttggagccctcctggccctggccttggttggtgtcctcatccttttcatgttcagaaggcttagacaatttcgacaagcacagcccactcctcagtaccggttccggaagagagacaaagtgatgttttacggccggaagatcatgaggaaggtgaccacactccccaacacccttgtggagaacactgccctgccccggcagcgggccaggaagaggaccaaggtgctgtctttggccaagaggattctgcgtttcaagaaggaatacccggccctgcagcccaaggagcccccgccctccctgctggaggccgacctcacggagtttgacgtgaagaattctcacctgccatcggaagttctgtacatgctgaaaaacgttcgggtcctgggccactttgagaagccgctgttcctggagctttgcaaacacatcgtctttgtgcagctgcaggaaggggagcacgtcttccagcccagggagccggaccccagcatctgtgtggtgcaggacgggcggctggaggtctgcatccaggacactgacggcaccgaggtggtggtgaaagaggttctggcgggagacagcgtccacagcctgctcagcatcctggacatcatcaccggccatgctgcaccttacaaaacggtctccgtccgcgcggccatcccgtccaccatcctccggcttccagctgcggcttttcatggagtttttgagaaatatccggaaactctggtgagggtggtgcagatcatcatggtgcggctgcagagggtgacctttctggctctgcacaactacctcggcctgaccacagagctcttcaacgctgagagccaggccatccctctcgtgtctgtagccagtgtggctgccgggaaggccaagaagcaggtgttctatggcgaagaagagcggcttaaaaagccaccgcggctccaggagtcctgtgactcagatcacgggggcggccgcccggcagctgctgggcccctgctgaagaggagccactccgtccccgcgccttccattcgcaaacagatcttggaggagctggagaagcccggggcaggtgaccctgacccttcggccccacaagctcgtgtcctctgtctcttgcctcagtgcctgggtggcttgccgcccacagacaccagcgtctactcctcagcctcatccgactgctgtggctgctccatgcctgtgctgtgcatcatgggccacaagcctcatgtgactgttgacacctaaactcactcatgccagctaaactcattcacgccagttaaactcattcatactagctaaactcatttgtaccagctaaactcactcacaccagttaaactcactcacaccagttaaactcattcgtaccagctaaactcactcatgccagctaaactcactcacgccggctaaactcactcgtaccagctaaactcattcgtaccagctaaactcattcataccagctaaactcactcatgccagctaaactcactcacgccggctaaactcactcataccggctaaactcattcgtactagctaaactcattcgtaccagctaaactcactcgtaccagctaaactcactcacaccagctaaactcacttgtaccagctaaactcactcatgccagctaaactcactcatgccagctaaattcacgccagctaaactcactcgtacccgctaaactcactcatgccaattaaactcattcgtaccagctaaactcactcatgccagccacacttcaggtgctcactggccgcccatggttagcggccacttccggcccagcatgtgctgctctctgtcttctggtgggcgtgcagtggaggctgcctgtgctctgattctgtcttcttgatgaactgtgaggccgagcaccttggatagccttctttgtcttttgcccattttcctcttagctttcattttcttattattaataggaattctttatatattctctgtatgattcctttgtcaagtatgtatattaaaaatattttctattc

SEQ ID NO: 21708 - DNA, 4542 bp, Homo sapiens
  source 1..4542: mol_type = unassigned DNA
gctgcccccatccccgccgcgctgggcctggctcctcttgacctgcttggatacgccccatctggctgctgttctgggttccgggacagccacgtgagggctgtttacagagggaaggaggtggctcctagcagatgacagacacttctcaaaagacagcttttcttcctggagaacagactttttcagcaggattttcctttcagtgaaacataatttgacttgaaaggaacccagggaaaagtgtccaggtgtgagcatgagcgggtagaggtgtgcccttgtttgcttcaggctgtctgcttttcgcccctgactgttttttctgtttctggccatggaggaagagaaagatgacagcccacagctgacggggattgcagttggagccctcctggccctggccttggttggtgtcctcatccttttcatgttcagaaggcttagacaatttcgacaagcacagcccactcctcagtaccggttccggaagagagacaaagtgatgttttacggccggaagatcatgaggaaggtgaccacactccccaacacccttgtggagaacactgccctgccccggcagcgggccaggaagaggaccaaggtgctgtctttggccaagaggattctgcgtttcaagaaggaatacccggccctgcagcccaaggagcccccgccctccctgctggaggccgacctcacggagtttgacgtgaagaattctcacctgccatcggaagttctgtacatgctgaaaaacgttcgggtcctgggccactttgagaagccgctgttcctggagctttgcaaacacatcgtctttgtgcagctgcaggaaggggagcacgtcttccagcccagggagccggaccccagcatctgtgtggtgcaggacgggcggctggaggtctgcatccaggacactgacggcaccgaggtggtggtgaaagaggttctggcgggagacagcgtccacagcctgctcagcatcctggacatcatcaccggccatgctgcaccttacaaaacggtctccgtccgcgcggccatcccgtccaccatcctccggcttccagctgcggcttttcatggagtttttgagaaatatccggaaactctggtgagggtggtgcagatcatcatggtgcggctgcagagggtgacctttctggctctgcacaactacctcggcctgaccacagagctcttcaacgctgagagccaggccatccctctcgtgtctgtagccagtgtggctgccgggaaggccaagaagcaggtgttctatggcgaagaagagcggcttaaaaagccaccgcggctccaggagtcctgtgactcagatcacgggggcggccgcccggcagctgctgggcccctgctgaagaggagccactccgtccccgcgccttccattcgcaaacagatcttggaggagctggagaagcccggggcaggtgaccctgacccttcggccccacaagggggcccaggcagtgccacttctgatctggggatggcatgtgaccgtgccagggtcttcctgcactcggacgagcaccccgggagctccgtggccagcaagtccaggaaaagcgtgatggttgcagagataccctccacggtctcccagcactcagagagtcacacggatgagaccctggccagcaggaagtcggatgccatcttcagagctgccaagaaggacctgctcaccctgatgaagctggaagactcatctctgttggatggccgggtggcgcttctgcacgttcctgcaggcacggtggtgtcaaggcagggagaccaggacgccagcatcctgttcgtggtctcggggctgctgcacgtgtaccagcggaagatcggcagccaggaggacacctgcttgttcctcacgcgccccggggagatggtgggccagctggccgtgctcaccggggagcctctcatcttcaccgtcaaggccaacagggactgcagcttcctgtccatctccaaggcccacttctatgaaatcatgcggaagcagccgaccgtcgtcctgggtgtggcgcacactgtggtgaagaggatgtcgtccttcgtgcggcaaatcgactttgccctggactgggtggaggtggaggccgggcgagcaatatacaggcagggggacaagtccgactgcacgtacatcatgctcagcggccggctgcgctctgtgatccggaaggatgatgggaagaagcgcctggccggggagtacggccgaggagacctcgtcggcgtggtggagacactgacccaccaggcccgggcgaccacggtgcatgccgttcgggactcagaattggccaagctgccggcaggagccctcacgtccatcaagcgcaggtacccacaggtggtgactcggctgattcatctcttgggtgagaagatcctgggcagcctccagcagggacctgtgacaggccaccagcttgggctccccacggagggcagcaagtgggacttggggaacccggctgtcaacctgtccacggtggcagtgatgcccgtgtcagaggaagtgcccctcaccgccttcgccctggagctggagcatgccctcagcgccatcggcccgaccctgctgctgactagtgacaacataaaacggcgccttggctccgctgccctggacagtgttcacgagtaccggctgtccagctggctggggcagcaggaggacacccacaggatcgtgctctaccaggtagatggcacgctcacaccctggacccagcgctgcgtgcgccaggccgactgcatcctcatcgtgggcctgggtgaccaggagcccacagtgggcgagctggagcggatgctggagagcacagctgtgcgtgcccagaagcagctgatcctgctgcacagggaggagggcccggcgccagcgcgcaccgtggagtggctcaacatgcggagctggtgctccggccacctgcacctctgctgcccgcgccgcgtcttctccaggaggagcctgcccaagctggtggagatgtacaagcatgtcttccagcggcccccggaccgacactcagacttctcccgcctggcgagggtgctgacgggcaacgccattgccctggtgcttgggggagggggagcaagaggctgtgcccaggtgggcgttctcaaggccttggcggagtgcggcatccctgtggacatggtgggaggcacgtccatcggggccttcgtgggtgccctgtactctgaggagcggaactacagccagatgcggatccgggccaagcagtgggccgagggcatgacgtccttgatgaaggccgcgctggacctcacctaccccatcacgtccatgttctccggagccggcttcaacagcagcatcttcagcgtcttcaaggaccagcagatcgaggacctgtggattccttatttcgccatcaccaccgacatcacagcctcggccatgcgggtccacaccgacggctccctgtggtggtacgtgcgtgccagcatgtccctgtccggttacatgccccctctctgtgacccgaaggacggacacctgctgatggacgggggctacatcaacaacctcccagcggatgtggcccggtccatgggggcaaaagtggtgatcgccattgacgtgggcagccgagatgagacggacctcaccaactatggggatgcgctgtctgggtggtggctgctgtggaaacgctggaaccccttggccacgaaagtcaaggtgttgaacatggcagagattcagacgcgcctggcctacgtgtgttgcgtgcggcagctggaggtggtgaagagcagtgactactgcgagtacctgcgcccccccatcgacagctacagcaccctggacttcggcaagttcaacgagatctgcgtgccagacgaatctgactaccagacggagtacgaggaggagctgctggacgtccccagggatgcatacgcagacttccagagcacctcagcccagcagggctcagacttggaggacgagtcctcactgcggcatcgacaccccagtctggctttcccaaaactgtctgagggctcctctgaccaggacgggtagaggcctctgctaaagagcccggatgcagcgtcttccgtgggactgtccccaaggctgaggctcctgccaagtcctaggggcctctgtacctgccctgctggaagccctgacttccccggggccccaggctgtgttagggttctctgggcctcttctttgtaccagcagccctgcatacagggccctgtgagcccccctgcagtcctgtgaggcccctgaagctctgtgaggcccctgaagctctgtgaaccccctgcagccctgtgaggccccccgaagccctgtgaggccccccgaagccctgtgaaccacctgctgccctgtgaggcccccaaagccctgtgaactgcctgctgtcctgtgaactgcctgctgccctgtgaggtgtgggagccctgatgctgccgtgtgatgtttcaataaaggtggatctcactgtt

SEQ ID NO: 21709 - DNA, 3376 bp, Homo sapiens
  source 1..3376: mol_type = unassigned DNA
cggccgcccggcagctgctgggcccctgctgaagaggagccactccgtccccgcgccttccattcgcaaacagatcttggaggagctggagaagcccggggcaggtgaccctgacccttcggccccacaagggggcccaggcagtgccacttctgatctggggatggcatgtgaccgtgccagggtcttcctgcactcggacgagcaccccgggagctccgtggccagcaagtccaggaaaagcgtgatggttgcagagataccctccacggtctcccagcactcagagagtcacacggatgagaccctggccagcaggaagtcggatgccatcttcagagctgccaagaaggacctgctcaccctgatgaagctggaagactcatctctgttggatggccgggtggcgcttctgcacgttcctgcaggcacggtggtgtcaaggcagggagaccaggacgccagcatcctgttcgtggtctcggggctgctgcacgtgtaccagcggaagatcggcagccaggaggacacctgcttgttcctcacgcgccccggggagatggtgggccagctggccgtgctcaccggggagcctctcatcttcaccgtcaaggccaacagggactgcagcttcctgtccatctccaaggcccacttctatgaaatcatgcggaagcagccgaccgtcgtcctgggtgtggcgcacactgtggtgaagaggatgtcgtccttcgtgcggcaaatcgactttgccctggactgggtggaggtggaggccgggcgagcaatatacaggcagggggacaagtccgactgcacgtacatcatgctcagcggccggctgcgctctgtgatccggaaggatgatgggaagaagcgcctggccggggagtacggccgaggagacctcgtcggcgtggtggagacactgacccaccaggcccgggcgaccacggtgcatgccgttcgggactcagaattggccaagctgccggcaggagccctcacgtccatcaagcgcaggtacccacaggtggtgactcggctgattcatctcttgggtgagaagatcctgggcagcctccagcagggacctgtgacaggccaccagcttgggctccccacggagggcagcaagtgggacttggggaacccggctgtcaacctgtccacggtggcagtgatgcccgtgtcagaggaagtgcccctcaccgccttcgccctggagctggagcatgccctcagcgccatcggcccgaccctgctgctgactagtgacaacataaaacggcgccttggctccgctgccctggacagtgttcacgagtaccggctgtccagctggctggggcagcaggaggacacccacaggatcgtgctctaccaggtagatggcacgctcacaccctggacccagcgctgcgtgcgccaggccgactgcatcctcatcgtgggcctgggtgaccaggagcccacagtgggcgagctggagcggatgctggagagcacagctgtgcgtgcccagaagcagctgatcctgctgcacagggaggagggcccggcgccagcgcgcaccgtggagtggctcaacatgcggagctggtgctccggccacctgcacctctgctgcccgcgccgcgtcttctccaggaggagcctgcccaagctggtggagatgtacaagcatgtcttccagcggcccccggaccgacactcagacttctcccgcctggcgagggtgctgacgggcaacgccattgccctggtgcttgggggagggggagcaagaggctgtgcccaggtgggcgttctcaaggccttggcggagtgcggcatccctgtggacatggtgggaggcacgtccatcggggccttcgtgggtgccctgtactctgaggagcggaactacagccagatgcggatccgggccaagcagtgggccgagggcatgacgtccttgatgaaggccgcgctggacctcacctaccccatcacgtccatgttctccggagccggcttcaacagcagcatcttcagcgtcttcaaggaccagcagatcgaggacctgtggattccttatttcgccatcaccaccgacatcacagcctcggccatgcgggtccacaccgacggctccctgtggtggtacgtgcgtgccagcatgtccctgtccggttacatgccccctctctgtgacccgaaggacggacacctgctgatggacgggggctacatcaacaacctcccagcggatgtggcccggtccatgggggcaaaagtggtgatcgccattgacgtgggcagccgagatgagacggacctcaccaactatggggatgcgctgtctgggtggtggctgctgtggaaacgctggaaccccttggccacgaaagtcaaggtgttgaacatggcagagattcagacgcgcctggcctacgtgtgttgcgtgcggcagctggaggtggtgaagagcagtgactactgcgagtacctgcgcccccccatcgacagctacagcaccctggacttcggcaagttcaacgagatctgcgaagtgggctaccagcacgggcgcacggtgtttgacatctggggccgcagcggcgtgctggagaagatgctccgcgaccagcaggggccgagcaagaagcccgcgagtgcggtcctcacctgtcccaacgcctccttcacggaccttgccgaaattgtgtctcgcattgagcccgccaagcccgccatggtggatgacgaatctgactaccagacggagtacgaggaggagctgctggacgtccccagggatgcatacgcagacttccagagcacctcagcccagcagggctcagacttggaggacgagtcctcactgcggcatcgacaccccagtctggctttcccaaaactgtctgagggctcctctgaccaggacgggtagaggcctctgctaaagagcccggatgcagcgtcttccgtgggactgtccccaaggctgaggctcctgccaagtcctaggggcctctgtacctgccctgctggaagccctgacttccccggggccccaggctgtgttagggttctctgggcctcttctttgtaccagcagccctgcatacagggccctgtgagcccccctgcagtcctgtgaggcccctgaagctctgtgaggcccctgaagctctgtgaaccccctgcagccctgtgaggccccccgaagccctgtgaggccccccgaagccctgtgaaccacctgctgccctgtgaggcccccaaagccctgtgaactgcctgctgtcctgtgaactgcctgctgccctgtgaggtgtgggagccctgatgctgccgtgtgatgtttcaataaaggtggatctcactgttg

SEQ ID NO: 21710 - DNA, 4806 bp, Homo sapiens
  source 1..4806: mol_type = unassigned DNA
gctgcccccatccccgccgcgctgggcctggctcctcttgacctgcttggatacgccccatctggctgctgttctgggttccgggacagccacgtgagggctgtttacagagggaaggaggtggctcctagcagatgacagacacttctcaaaagacagcttttcttcctggagaacagactttttcagcaggattttcctttcagtgaaacataatttgacttgaaaggaacccagggaaaagtgtccaggtgtgagcatgagcgggtagaggtgtgcccttgtttgcttcaggctgtctgcttttcgcccctgactgttttttctgtttctggccatggaggaagagaaagatgacagcccacaggctgacttctgcctgggcaccgccctgcactcttggggactgtggttcacggaggaaggttcaccgtccaccatgctgacggggattgcagttggagccctcctggccctggccttggttggtgtcctcatccttttcatgttcagaaggcttagacaatttcgacaagcacagcccactcctcagtaccggttccggaagagagacaaagtgatgttttacggccggaagatcatgaggaaggtgaccacactccccaacacccttgtggagaacactgccctgccccggcagcgggccaggaagaggaccaaggtgctgtctttggccaagaggattctgcgtttcaagaaggaatacccggccctgcagcccaaggagcccccgccctccctgctggaggccgacctcacggagtttgacgtgaagaattctcacctgccatcggaagttctgtacatgctgaaaaacgttcgggtcctgggccactttgagaagccgctgttcctggagctttgcaaacacatcgtctttgtgcagctgcaggaaggggagcacgtcttccagcccagggagccggaccccagcatctgtgtggtgcaggacgggcggctggaggtctgcatccaggacactgacggcaccgaggtggtggtgaaagaggttctggcgggagacagcgtccacagcctgctcagcatcctggacatcatcaccggccatgctgcaccttacaaaacggtctccgtccgcgcggccatcccgtccaccatcctccggcttccagctgcggcttttcatggagtttttgagaaatatccggaaactctggtgagggtggtgcagatcatcatggtgcggctgcagagggtgacctttctggctctgcacaactacctcggcctgaccacagagctcttcaacgctgagagccaggccatccctctcgtgtctgtagccagtgtggctgccgggaaggccaagaagcaggtgttctatggcgaagaagagcggcttaaaaagccaccgcggctccaggagtcctgtgactcagatcacgggggcggccgcccggcagctgctgggcccctgctgaagaggagccactccgtccccgcgccttccattcgcaaacagatcttggaggagctggagaagcccggggcaggtgaccctgacccttcggccccacaagggggcccaggcagtgccacttctgatctggggatggcatgtgaccgtgccagggtcttcctgcactcggacgagcaccccgggagctccgtggccagcaagtccaggaaaagcgtgatggttgcagagataccctccacggtctcccagcactcagagagtcacacggatgagaccctggccagcaggaagtcggatgccatcttcagagctgccaagaaggacctgctcaccctgatgaagctggaagactcatctctgttggatggccgggtggcgcttctgcacgttcctgcaggcacggtggtgtcaaggcagggagaccaggacgccagcatcctgttcgtggtctcggggctgctgcacgtgtaccagcggaagatcggcagccaggaggacacctgcttgttcctcacgcgccccggggagatggtgggccagctggccgtgctcaccggggagcctctcatcttcaccgtcaaggccaacagggactgcagcttcctgtccatctccaaggcccacttctatgaaatcatgcggaagcagccgaccgtcgtcctgggtgtggcgcacactgtggtgaagaggatgtcgtccttcgtgcggcaaatcgactttgccctggactgggtggaggtggaggccgggcgagcaatatacaggcagggggacaagtccgactgcacgtacatcatgctcagcggccggctgcgctctgtgatccggaaggatgatgggaagaagcgcctggccggggagtacggccgaggagacctcgtcggcgtggtggagacactgacccaccaggcccgggcgaccacggtgcatgccgttcgggactcagaattggccaagctgccggcaggagccctcacgtccatcaagcgcaggtacccacaggtggtgactcggctgattcatctcttgggtgagaagatcctgggcagcctccagcagggacctgtgacaggccaccagcttgggctccccacggagggcagcaagtgggacttggggaacccggctgtcaacctgtccacggtggcagtgatgcccgtgtcagaggaagtgcccctcaccgccttcgccctggagctggagcatgccctcagcgccatcggcccgaccctgctgctgactagtgacaacataaaacggcgccttggctccgctgccctggacagtgttcacgagtaccggctgtccagctggctggggcagcaggaggacacccacaggatcgtgctctaccaggtagatggcacgctcacaccctggacccagcgctgcgtgcgccaggccgactgcatcctcatcgtgggcctgggtgaccaggagcccacagtgggcgagctggagcggatgctggagagcacagctgtgcgtgcccagaagcagctgatcctgctgcacagggaggagggcccggcgccagcgcgcaccgtggagtggctcaacatgcggagctggtgctccggccacctgcacctctgctgcccgcgccgcgtcttctccaggaggagcctgcccaagctggtggagatgtacaagcatgtcttccagcggcccccggaccgacactcagacttctcccgcctggcgagggtgctgacgggcaacgccattgccctggtgcttgggggagggggagcaagaggctgtgcccaggtgggcgttctcaaggccttggcggagtgcggcatccctgtggacatggtgggaggcacgtccatcggggccttcgtgggtgccctgtactctgaggagcggaactacagccagatgcggatccgggccaagcagtgggccgagggcatgacgtccttgatgaaggccgcgctggacctcacctaccccatcacgtccatgttctccggagccggcttcaacagcagcatcttcagcgtcttcaaggaccagcagatcgaggacctgtggattccttatttcgccatcaccaccgacatcacagcctcggccatgcgggtccacaccgacggctccctgtggtggtacgtgcgtgccagcatgtccctgtccggttacatgccccctctctgtgacccgaaggacggacacctgctgatggacgggggctacatcaacaacctcccagcggatgtggcccggtccatgggggcaaaagtggtgatcgccattgacgtgggcagccgagatgagacggacctcaccaactatggggatgcgctgtctgggtggtggctgctgtggaaacgctggaaccccttggccacgaaagtcaaggtgttgaacatggcagagattcagacgcgcctggcctacgtgtgttgcgtgcggcagctggaggtggtgaagagcagtgactactgcgagtacctgcgcccccccatcgacagctacagcaccctggacttcggcaagttcaacgagatctgcgaagtgggctaccagcacgggcgcacggtgtttgacatctggggccgcagcggcgtgctggagaagatgctccgcgaccagcaggggccgagcaagaagcccgcgagtgcggtcctcacctgtcccaacgcctccttcacggaccttgccgaaattgtgtctcgcattgagcccgccaagcccgccatggtggatgacgaatctgactaccagacggagtacgaggaggagctgctggacgtccccagggatgcatacgcagacttccagagcacctcagcccagcagggctcagacttggaggacgagtcctcactgcggcatcgacaccccagtctggctttcccaaaactgtctgagggctcctctgaccaggacgggtagaggcctctgctaaagagcccggatgcagcgtcttccgtgggactgtccccaaggctgaggctcctgccaagtcctaggggcctctgtacctgccctgctggaagccctgacttccccggggccccaggctgtgttagggttctctgggcctcttctttgtaccagcagccctgcatacagggccctgtgagcccccctgcagtcctgtgaggcccctgaagctctgtgaggcccctgaagctctgtgaaccccctgcagccctgtgaggccccccgaagccctgtgaggccccccgaagccctgtgaaccacctgctgccctgtgaggcccccaaagccctgtgaactgcctgctgtcctgtgaactgcctgctgccctgtgaggtgtgggagccctgatgctgccgtgtgatgtttcaataaaggtggatctcactgtt

SEQ ID NO: 21711 - DNA, 3916 bp, Homo sapiens
  source 1..3916: mol_type = unassigned DNA
ggctgacttctgcctgggcaccgccctgcactcttggggactgtggttcacggaggaaggttcaccgtccaccatgctgacggggattgcagttggagccctcctggccctggccttggttggtgtcctcatccttttcatgttcagaaggcttagacaatttcgacaagcacagcccactcctcagtaccggttccggaagagagacaaagtgatgttttacggccggaagatcatgaggaaggtgaccacactccccaacacccttgtggagaacactgccctgccccggcagcgggccaggaagaggaccaaggtgctgtctttggccaagaggattctgcgtttcaagaaggaatacccggccctgcagcccaaggagcccccgccctccctgctggaggccgacctcacggagtttgacgtgaagaattctcacctgccatcggaagttctgtacatgctgaaaaacgttcgggtcctgggccactttgagaagccgctgttcctggagctttgcaaacacatcgtctttgtgcagctgcaggaaggggagcacgtcttccagcccagggagccggaccccagcatctgtgtggtgcaggacgggcggctggaggtctgcatccaggacactgacggcaccgaggtggtggtgaaagaggttctggcgggagacagcgtccacagcctgctcagcatcctggacatcatcaccggccatgctgcaccttacaaaacggtctccgtccgcgcggccatcccgtccaccatcctccggcttccagctgcggcttttcatggagtttttgagaaatatccggaaactctggtgagggtggtgcagatcatcatggtgcggctgcagagggtgacctttctggctctgcacaactacctcggcctgaccacagagctcttcaacgctgagagccaggccatccctctcgtgtctgtagccagtgtggctgccgggaaggccaagaagcaggtgttctatggcgaagaagagcggcttaaaaagccaccgcggctccaggagtcctgtgactcagatcacgggggcggccgcccggcagctgctgggcccctgctgaagaggagccactccgtccccgcgccttccattcgcaaacagatcttggaggagctggagaagcccggggcaggtgaccctgacccttcggccccacaagggggcccaggcagtgccacttctgatctggggatggcatgtgaccgtgccagggtcttcctgcactcggacgagcaccccgggagctccgtggccagcaagtccaggaaaagcgtgatggttgcagagataccctccacggtctcccagcactcagagagtcacacggatgagaccctggccagcaggaagtcggatgccatcttcagagctgccaagaaggacctgctcaccctgatgaagctggaagactcatctctgttggatggccgggtggcgcttctgcacgttcctgcaggcacggtggtgtcaaggcagggagaccaggacgccagcatcctgttcgtggtctcggggctgctgcacgtgtaccagcggaagatcggcagccaggaggacacctgcttgttcctcacgcgccccggggagatggtgggccagctggccgtgctcaccggggagcctctcatcttcaccgtcaaggccaacagggactgcagcttcctgtccatctccaaggcccacttctatgaaatcatgcggaagcagccgaccgtcgtcctgggtgtggcgcacactgtggtgaagaggatgtcgtccttcgtgcggcaaatcgactttgccctggactgggtggaggtggaggccgggcgagcaatatacaggcagggggacaagtccgactgcacgtacatcatgctcagcggccggctgcgctctgtgatccggaaggatgatgggaagaagcgcctggccggggagtacggccgaggagacctcgtcggcgtggtggagacactgacccaccaggcccgggcgaccacggtgcatgccgttcgggactcagaattggccaagctgccggcaggagccctcacgtccatcaagcgcaggtacccacaggtggtgactcggctgattcatctcttgggtgagaagatcctgggcagcctccagcagggacctgtgacaggccaccagcttgggctccccacggagggcagcaagtgggacttggggaacccggctgtcaacctgtccacggtggcagtgatgcccgtgtcagaggaagtgcccctcaccgccttcgccctggagctggagcatgccctcagcgccatcggcccgaccctgctgctgactagtgacaacataaaacggcgccttggctccgctgccctggacagtgttcacgagtaccggctgtccagctggctggggcagcaggaggacacccacaggatcgtgctctaccaggtagatggcacgctcacaccctggacccagcgctgcgtgcgccaggccgactgcatcctcatcgtgggcctgggtgaccaggagcccacagtgggcgagctggagcggatgctggagagcacagctgtgcgtgcccagaagcagctgatcctgctgcacagggaggagggcccggcgccagcgcgcaccgtggagtggctcaacatgcggagctggtgctccggccacctgcacctctgctgcccgcgccgcgtcttctccaggaggagcctgcccaagctggtggagatgtacaagcatgtcttccagcggcccccggaccgacactcagacttctcccgcctggcgagggtgctgacgggcaacgccattgccctggtgcttgggggagggggagcaagaggctgtgcccaggtgggcgttctcaaggccttggcggagtgcggcatccctgtggacatggtgggaggcacgtccatcggggccttcgtgggtgccctgtactctgaggagcggaactacagccagatgcggatccgggccaagcagtgggccgagggcatgacgtccttgatgaaggccgcgctggacctcacctaccccatcacgtccatgttctccggagccggcttcaacagcagcatcttcagcgtcttcaaggaccagcagatcgaggacctgtggattccttatttcgccatcaccaccgacatcacagcctcggccatgcgggtccacaccgacggctccctgtggtggtacgtgcgtgccagcatgtccctgtccggttacatgccccctctctgtgacccgaaggacggacacctgctgatggacgggggctacatcaacaacctcccagcggatgtggcccggtccatgggggcaaaagtggtgatcgccattgacgtgggcagccgagatgagacggacctcaccaactatggggatgcgctgtctgggtggtggctgctgtggaaacgctggaaccccttggccacgaaagtcaaggtgttgaacatggcagagattcagacgcgcctggcctacgtgtgttgcgtgcggcagctggaggtggtgaagagcagtgactactgcgagtacctgcgcccccccatcgacagctacagcaccctggacttcggcaagttcaacgagatctgcgaagtgggctaccagcacgggcgcacggtgtttgacatctggggccgcagcggcgtgctggagaagatgctccgcgaccagcaggggccgagcaagaagcccgcgagtgcggtcctcacctgtcccaacgcctccttcacggaccttgccgaaattgtgtctcgcattgagcccgccaagcccgccatggtggatgacgaatctgactaccagacggagtacgaggaggagctgctggacgtccccagggatgcatacgcagacttccagagcacctcagcccagcagggctcagacttg

SEQ ID NO: 21712 - DNA, 3490 bp, Homo sapiens
  source 1..3490: mol_type = unassigned DNA
acttccgctgggggcggagcggggcggggctgagtgggtggcgacctagctgctgcgccagtgtttgtgttggaagctcagctgatgcaggccggttggagtggacgtcattgccgggaacgagcgagtcgccgctgcagccctagtgactgcggcctgcatcccgattgtcttctcctccaaggtctacatgattacctgaagtttaataagtaagaccatgaattatggcatttcttaaatgaagcgttcaagaagtgagagaatgtcatagaaaataaatgatttttaagttatgtctattaatctgactgtagatatatatatttacctccttagtaatgcaagaagtgtttgtgggaagcagagaagcaagcaactgtatttcttgttctcacctaagcattactggaggataagccacatcagtctacaaagaggttttcatacaaacataataagatgtaaatggaccaaaagtgaagcacattcttgcagtaagcactgttactctccaagcaaccatggtttacatattgggattttgaaacttagcacttctgctcccaagggacttacaaaagtgaacatttgtatgtcccgtattaaaagtactttgaactctgtttcaaaggctgtttttggcaatcaaaatgaaatgatttcacgtttagctcaatttaagccaagttcccaaattttaagaaaagtatcggatagtggctggttaaaacagaaaaacatcaaacaagccatcaaatctctgaaaaaatatagtgacaaatcagcagaaaagagtccttttccagaagagaaaagtcacattatagacaaagaagaagatataggtaaacgcagtctttttcattacacaagttctataaccacaaaatttggagactcattctactttttatcaaatcatattaattcatatttcaaacgtaaggaaaaaatgtctcaacaaaaggaaaatgaacatttccgggacaaatcagaacttgaagataaaaaggtagaagaggggaaattaagatctccagatcctggcatcctggcttataagccaggctcagaatctgtacatacggtggacaagcctacaagtccttctgcgatacctgatgttcttcaagtttcaactaaacaaagtattgctaactttctttctcgtcccacggaaggtgtacaagctttagtaggtggttatattggtggacttgtccccaaattaaagtatgattcaaagagtcagtcagaagaacaggaagagcctgctaaaactgatcaggctgtcagcaaagacagaaatgcagaggagaaaaagcgtttatctcttcagcgagaaaagattatcgcaagggtgagtattgataacaggacccgggcattagttcaggcattaagaagaacaactgacccaaagctctgcattactagggttgaagaactgacttttcatcttctagaatttcctgaaggaaaaggagtggctgtcaaggaaagaattattccatatttattacgactgagacaaattaaggatgaaactcttcaggctgcagttagagaaattttggccctaattggctatgtggatccagtgaaagggagaggaatccgaattctctcaattgatggtggaggaacaaggggcgtggttgctctccagaccctacgaaaattagttgaacttactcagaagccagttcatcagctctttgattacatttgtggtgtaagcacaggtgccatattagctttcatgttggggttgtttcatatgcccttggatgaatgtgaggaactttatcgaaaattaggatcagatgtattttcacaaaatgtcattgttggaacagtaaaaatgagttggagccatgcattttatgacagtcaaacatgggaaaacattcttaaggataggatgggatctgcactgatgattgaaacagcaagaaaccccacatgtcctaaggtagctgctgtaagtaccatagtaaatagagggataacacccaaagcttttgtgttcagaaactatggtcattttcctggaatcaactctcattatttgggaggctgtcagtataaaatgtggcaggccattagagcctcatctgctgctccaggctactttgcagaatatgcattgggaaatgatcttcatcaagatggaggtttgcttctgaataacccttcggcattagctatgcatgagtgtaaatgtctttggccagatgtgccgttagagtgcatagtatccctgggcactggacgttatgagagtgatgtgagaaacacggtaacatacacaagcttgaaaactaaactttctaatgttatcaacagtgctacagatacagaagaagtccatataatgcttgatggcctgttacctcctgacacctattttagattcaatcctgtaatgtgtgaaaacatacctctagatgaaagtcgaaatgaaaagctggatcagctgcagttggaagggttgaaatacatagaaagaaatgaacaaaaaatgaaaaaagttgcaaaaatattaagtcaagaaaaaacaactctgcagaaaattaatgattggataaaattaaaaactgatatgtatgaaggacttccattcttttcaaaattgtgatgagtatatgcttatgttctcataaatgaaggtctgtttagaagatcaaccacattcaataaggaattgtggggttcgacatgagttaactttgaaatacgtatgaattctggagaatcctgaaaaagacggtgcttcaaccagcttgcatagcacagagaatattcttggttacagaattcatatgggaactaggcttttaagatgttaataattagctaagctttagtaacccttactgtgctagtagattttagtagatattggtgttatattgtttgatgtttgaaaatatattaatatatgtgccgaacaagaaaccgaaagctatattgtactgtgtatttttactttagtcctcataatcatgttgaatttatgtgatcattgattttatttcatatggaaaagctaatttcttcttaaatttacattacctaatattctcactagctatgttctccaatccacactgccttttattgtaatatcatctaaatagatgcagaaaaatggaattttctctattaaagtattttacatttgacataaaaaagaaccagatacagttttctattcagatatgtttattttaacattgtttggttaaaaaaggtgaagttccagtcaaccactttttacccctgaaatttcaagataatgctatattaacttttccagatctaacactagcttattcttccctgttataaaatggtttgaacttactgaggagatattcctatcattaacaaaaataaactatttaaataatctgttgttaaaaggctaatgtcattttaaaattaatttttgttcataatgtagctcccctttagcctttga

SEQ ID NO: 21713 - DNA, 3234 bp, Homo sapiens
  source 1..3234: mol_type = unassigned DNA
tggaagctcagctgatgcaggccggttggagtggacgtcattgccgggaacgagcgagtcgccgctgcagccctagtgactgcggcctgcatcccgattgtcttctcctccaaggtctacatgattacctgaagtttaataagtaagaccatgaattatggcatttcttaaatgaagcgttcaagaagtgagagaatgtcatagaaaataaatgatttttaagttatgtctattaatctgactgtagatatatatatttacctccttagtaatgcaagaagtgtttgtgggaagcagagaagcaagcaactgtatttcttgttctcacctaagcattactggaggataagccacatcagtctacaaagaggttttcatacaaacataataagatgtaaatggaccaaaagtgaagcacattcttgcagtaagcactgttactctccaagcaaccatggtttacatattgggattttgaaacttagcacttctgctcccaagggacttacaaaagtgaacatttgtatgtcccgtattaaaagtactttgaactctgtttcaaaggctgtttttggcaatcaaaatgaaatgatttcacgtttagctcaatttaagccaagttcccaaattttaagaaaagtatcggatagtggctggttaaaacagaaaaacatcaaacaagccatcaaatctctgaaaaaatatagtgacaaatcagcagaaaagagtccttttccagaagagaaaagtcacattatagacaaagaagaagatataggtaaacgcagtctttttcattacacaagttctataaccacaaaatttggagactcattctactttttatcaaatcatattaattcatatttcaaacgtaaggaaaaaatgtctcaacaaaaggaaaatgaacatttccgggacaaatcagaacttgaagataaaaaggtagaagaggggaaattaagatctccagatcctggcatcctggcttataagccaggctcagaatctgtacatacggtggacaagcctacaagtccttctgcgatacctgatgttcttcaagtttcaactaaacaaagtattgctaactttctttctcgtcccacggaaggtgtacaagctttagtaggtggttatattggtggacttgtccccaaattaaagtatgattcaaagagtcagtcagaagaacaggaagagcctgctaaaactgatcaggctgtcagcaaagacagaaatgcagaggagaaaaagcgtttatctcttcagcgagaaaagattatcgcaagggtgagtattgataacaggacccgggcattagttcaggcattaagaagaacaactgacccaaagctctgcattactagggttgaagaactgacttttcatcttctagaatttcctgaaggaaaaggagtggctgtcaaggaaagaattattccatatttattacgactgagacaaattaaggatgaaactcttcaggctgcagttagagaaattttggccctaattggctatgtggatccagtgaaagggagaggaatccgaattctctcaattgatggtggaggaacaaggggcgtggttgctctccagaccctacgaaaattagttgaacttactcagaagccagttcatcagctctttgattacatttgtggtgtaagcacaggtgccatattagctttcatgttggggttgtttcatatgcccttggatgaatgtgaggaactttatcgaaaattaggatcagatgtattttcacaaaatgtcattgttggaacagtaaaaatgagttggagccatgcattttatgacagtcaaacatgggaaaacattcttaaggataggatgggatctgcactgatgattgaaacagcaagaaaccccacatgtcctaaggtaaggaaagatggaggtttgcttctgaataacccttcggcattagctatgcatgagtgtaaatgtctttggccagatgtgccgttagagtgcatagtatccctgggcactggacgttatgagagtgatgtgagaaacacggtaacatacacaagcttgaaaactaaactttctaatgttatcaacagtgctacagatacagaagaagtccatataatgcttgatggcctgttacctcctgacacctattttagattcaatcctgtaatgtgtgaaaacatacctctagatgaaagtcgaaatgaaaagctggatcagctgcagttggaagggttgaaatacatagaaagaaatgaacaaaaaatgaaaaaagttgcaaaaatattaagtcaagaaaaaacaactctgcagaaaattaatgattggataaaattaaaaactgatatgtatgaaggacttccattcttttcaaaattgtgatgagtatatgcttatgttctcataaatgaaggtctgtttagaagatcaaccacattcaataaggaattgtggggttcgacatgagttaactttgaaatacgtatgaattctggagaatcctgaaaaagacggtgcttcaaccagcttgcatagcacagagaatattcttggttacagaattcatatgggaactaggcttttaagatgttaataattagctaagctttagtaacccttactgtgctagtagattttagtagatattggtgttatattgtttgatgtttgaaaatatattaatatatgtgccgaacaagaaaccgaaagctatattgtactgtgtatttttactttagtcctcataatcatgttgaatttatgtgatcattgattttatttcatatggaaaagctaatttcttcttaaatttacattacctaatattctcactagctatgttctccaatccacactgccttttattgtaatatcatctaaatagatgcagaaaaatggaattttctctattaaagtattttacatttgacataaaaaagaaccagatacagttttctattcagatatgtttattttaacattgtttggttaaaaaaggtgaagttccagtcaaccactttttacccctgaaatttcaagataatgctatattaacttttccagatctaacactagcttattcttccctgttataaaatggtttgaacttactgaggagatattcctatcattaacaaaaataaactatttaaataatctgttgttaaaaggctaatgtcattttaaaattaatttttgttcataatgtagctcccctttagcctttga

SEQ ID NO: 21714 - DNA, 568 bp, Homo sapiens
  source 1..568: mol_type = unassigned DNA
aggggatgaaagagcataagcggagagggaatggtggtgctctctccttgaccatactttagttaggctcctctgagccctcttcccaactaggcctcatccttgggcccctgtcttaggcctgctgagtccagttttagcaagaatcttgcaaagtcagtttagagagtatctcctagccttgataattgatcatctccgcctgtcttcagcaagaatcttagtgttatacagctggaatcatactgctatggtccgaatgtttgtgcctctcaaaattcatgtggaaatcataaccgctaaagtgatggtattaagaggtaagaccatgaattatggcatttcttaaatgaagcgttcaagaagtgagagaatgtcatagaaaataaatgatttttaagttatgtctattaatctgactgtagatatatatatttacctccttagtaatgcaagaagtgtttgtgggaagcagagaagcaagcaactgtatttcttgttctcacctaagcattactggaggataagccacatcagtctacaaagaggttttcatacaaacataata

SEQ ID NO: 21715 - DNA, 3530 bp, Homo sapiens
  source 1..3530: mol_type = unassigned DNA
acttccgctgggggcggagcggggcggggctgagtgggtggcgacctagctgctgcgccagtgtttgtgttggaagctcagctgatgcaggccggttggagtggacgtcattgccgggaacgagcgagtcgccgctgcagccctagtgactgcggcctgcatcccgattgtcttctcctccaaggtctacatgattacctgaagtttaataattttgcctttctagagtgttatacagctggaatcatactgctatggtccgaatgtttgtgcctctcaaaattcatgtggaaatcataaccgctaaagtgatggtattaagaggtaagaccatgaattatggcatttcttaaatgaagcgttcaagaagtgagagaatgtcatagaaaataaatgatttttaagttatgtctattaatctgactgtagatatatatatttacctccttagtaatgcaagaagtgtttgtgggaagcagagaagcaagcaactgtatttcttgttctcacctaagcattactggaggataagccacatcagtctacaaagaggttttcatacaaacataataagatgtaaatggaccaaaagtgaagcacattcttgcagtaagcactgttactctccaagcaaccatggtttacatattgggattttgaaacttagcacttctgctcccaagggacttacaaaagtgaacatttgtatgtcccgtattaaaagtactttgaactctgtttcaaaggctgtttttggcaatcaaaatgaaatgatttcacgtttagctcaatttaagccaagttcccaaattttaagaaaagtatcggatagtggctggttaaaacagaaaaacatcaaacaagccatcaaatctctgaaaaaatatagtgacaaatcagcagaaaagagtccttttccagaagagaaaagtcacattatagacaaagaagaagatataggtaaacgcagtctttttcattacacaagttctataaccacaaaatttggagactcattctactttttatcaaatcatattaattcatatttcaaacgtaaggaaaaaatgtctcaacaaaaggaaaatgaacatttccgggacaaatcagaacttgaagataaaaaggtagaagaggggaaattaagatctccagatcctggcatcctggcttataagccaggctcagaatctgtacatacggtggacaagcctacaagtccttctgcgatacctgatgttcttcaagtttcaactaaacaaagtattgctaactttctttctcgtcccacggaaggtgtacaagctttagtaggtggttatattggtggacttgtccccaaattaaagtatgattcaaagagtcagtcagaagaacaggaagagcctgctaaaactgatcaggctgtcagcaaagacagaaatgcagaggagaaaaagcgtttatctcttcagcgagaaaagattatcgcaagggtgagtattgataacaggacccgggcattagttcaggcattaagaagaacaactgacccaaagctctgcattactagggttgaagaactgacttttcatcttctagaatttcctgaaggaaaaggagtggctgtcaaggaaagaattattccatatttattacgactgagacaaattaaggatgaaactcttcaggctgcagttagagaaattttggccctaattggctatgtggatccagtgaaagggagaggaatccgaattctctcaattgatggtggaggaacaaggggcgtggttgctctccagaccctacgaaaattagttgaacttactcagaagccagttcatcagctctttgattacatttgtggtgtaagcacaggtgccatattagctttcatgttggggttgtttcatatgcccttggatgaatgtgaggaactttatcgaaaattaggatcagatgtattttcacaaaatgtcattgttggaacagtaaaaatgagttggagccatgcattttatgacagtcaaacatgggaaaacattcttaaggataggatgggatctgcactgatgattgaaacagcaagaaaccccacatgtcctaaggtagctgctgtaagtaccatagtaaatagagggataacacccaaagcttttgtgttcagaaactatggtcattttcctggaatcaactctcattatttgggaggctgtcagtataaaatgtggcaggccattagagcctcatctgctgctccaggctactttgcagaatatgcattgggaaatgatcttcatcaagatggaggtttgcttctgaataacccttcggcattagctatgcatgagtgtaaatgtctttggccagatgtgccgttagagtgcatagtatccctgggcactggacgttatgagagtgatgtgagaaacacggtaacatacacaagcttgaaaactaaactttctaatgttatcaacagtgctacagatacagaagaagtccatataatgcttgatggcctgttacctcctgacacctattttagattcaatcctgtaatgtgtgaaaacatacctctagatgaaagtcgaaatgaaaagctggatcagctgcagttggaagggttgaaatacatagaaagaaatgaacaaaaaatgaaaaaagttgcaaaaatattaagtcaagaaaaaacaactctgcagaaaattaatgattggataaaattaaaaactgatatgtatgaaggacttccattcttttcaaaattgtgatgagtatatgcttatgttctcataaatgaaggtctgtttagaagatcaaccacattcaataaggaattgtggggttcgacatgagttaactttgaaatacgtatgaattctggagaatcctgaaaaagacggtgcttcaaccagcttgcatagcacagagaatattcttggttacagaattcatatgggaactaggcttttaagatgttaataattagctaagctttagtaacccttactgtgctagtagattttagtagatattggtgttatattgtttgatgtttgaaaatatattaatatatgtgccgaacaagaaaccgaaagctatattgtactgtgtatttttactttagtcctcataatcatgttgaatttatgtgatcattgattttatttcatatggaaaagctaatttcttcttaaatttacattacctaatattctcactagctatgttctccaatccacactgccttttattgtaatatcatctaaatagatgcagaaaaatggaattttctctattaaagtattttacatttgacataaaaaagaaccagatacagttttctattcagatatgtttattttaacattgtttggttaaaaaaggtgaagttccagtcaaccactttttacccctgaaatttcaagataatgctatattaacttttccagatctaacactagcttattcttccctgttataaaatggtttgaacttactgaggagatattcctatcattaacaaaaataaactatttaaataa

SEQ ID NO: 21716 - DNA, 735 bp, Homo sapiens
  source 1..735: mol_type = unassigned DNA
ggaagctcagctgatgcaggccggttggagtggacgtcattgccgggaacgagcgagtcgccgctgcagccctagtaagaccatgaattatggcatttcttaaatgaagcgttcaagaagtgagagaatgtcatagaaaataaatgatttttaagttatgtctattaatctgactgtagatatatatatttacctccttagtaatgcaagaagtgtttgtgggaagcagagaagcaagcaactgtatttcttgttctcacctaagcattactggaggataagccacatcagtctacaaagaggttttcatacaaacataataagatgtaaatggaccaaaagtgaagcacattcttgcagtaagcactgttactctccaagcaaccatggtttacatattgggattttgaaacttagcacttctgctcccaagggacttacaaaagtgaacatttgtatgtcccgtattaaaagtactttgaactctgtttcaaaggctgtttttggcaatcaaaatgaaatgatttcacgtttagctcaatttaagccaagttcccaaattttaagaaaagtatcggatagtggctggttaaaacagaaaaacatcaaacaagccatcaaatctctgaaaaaatatagtgacaaatcagcagaaaagagtccttttccagaagagaaaagtcacattatagacaaagaagaagatataggtaaacgcagtctttttcattacac

SEQ ID NO: 21717 - DNA, 3462 bp, Homo sapiens
  source 1..3462: mol_type = unassigned DNA
gtcatgctctattgcgcatatctcggggcgggggaggaacggagattgacaaggaggcagaggcctgagcgaggcggaaaatcctcaccccggcccgcgggtagacccaaacttctagcgcgtcacttccgctgggggcggagcggggcggggctgagtgggtggcgacctagctgctgcgccagtgtttgtgttggaagctcagctgatgcaggccggttggagtggacgtcattgccgggaacgagcgagtcgccgctgcagccctagtgactgcggcctgcatcccggtaagaccatgaattatggcatttcttaaatgaagcgttcaagaagtgagagaatgtcatagaaaataaatgatttttaagttatgtctattaatctgactgtagatatatatatttacctccttagtaatgcaagaagtgtttgtgggaagcagagaagcaagcaactgtatttcttgttctcacctaagcattactggaggataagccacatcagtctacaaagaggttttcatacaaacataataagatgtaaatggaccaaaagtgaagcacattcttgcagtaagcactgttactctccaagcaaccatggtttacatattgggattttgaaacttagcacttctgctcccaagggacttacaaaagtgaacatttgtatgtcccgtattaaaagtactttgaactctgtttcaaaggctgtttttggcaatcaaaatgaaatgatttcacgtttagctcaatttaagccaagttcccaaattttaagaaaagtatcggatagtggctggttaaaacagaaaaacatcaaacaagccatcaaatctctgaaaaaatatagtgacaaatcagcagaaaagagtccttttccagaagagaaaagtcacattatagacaaagaagaagatataggtaaacgcagtctttttcattacacaagttctataaccacaaaatttggagactcattctactttttatcaaatcatattaattcatatttcaaacgtaaggaaaaaatgtctcaacaaaaggaaaatgaacatttccgggacaaatcagaacttgaagataaaaaggtagaagaggggaaattaagatctccagatcctggcatcctggcttataagccaggctcagaatctgtacatacggtggacaagcctacaagtccttctgcgatacctgatgttcttcaagtttcaactaaacaaagtattgctaactttctttctcgtcccacggaaggtgtacaagctttagtaggtggttatattggtggacttgtccccaaattaaagtatgattcaaagagtcagtcagaagaacaggaagagcctgctaaaactgatcaggctgtcagcaaagacagaaatgcagaggagaaaaagcgtttatctcttcagcgagaaaagattatcgcaagggtgagtattgataacaggacccgggcattagttcaggcattaagaagaacaactgacccaaagctctgcattactagggttgaagaactgacttttcatcttctagaatttcctgaaggaaaaggagtggctgtcaaggaaagaattattccatatttattacgactgagacaaattaaggatgaaactcttcaggctgcagttagagaaattttggccctaattggctatgtggatccagtgaaagggagaggaatccgaattctctcaattgatggtggaggaacaaggggcgtggttgctctccagaccctacgaaaattagttgaacttactcagaagccagttcatcagctctttgattacatttgtggtgtaagcacaggtgccatattagctttcatgttggggttgtttcatatgcccttggatgaatgtgaggaactttatcgaaaattaggatcagatgtattttcacaaaatgtcattgttggaacagtaaaaatgagttggagccatgcattttatgacagtcaaacatgggaaaacattcttaaggataggatgggatctgcactgatgattgaaacagcaagaaaccccacatgtcctaaggtagctgctgtaagtaccatagtaaatagagggataacacccaaagcttttgtgttcagaaactatggtcattttcctggaatcaactctcattatttgggaggctgtcagtataaaatgtggcaggccattagagcctcatctgctgctccaggctactttgcagaatatgcattgggaaatgatcttcatcaagatggaggtttgcttctgaataacccttcggcattagctatgcatgagtgtaaatgtctttggccagatgtgccgttagagtgcatagtatccctgggcactggacgttatgagagtgatgtgagaaacacggtaacatacacaagcttgaaaactaaactttctaatgttatcaacagtgctacagatacagaagaagtccatataatgcttgatggcctgttacctcctgacacctattttagattcaatcctgtaatgtgtgaaaacatacctctagatgaaagtcgaaatgaaaagctggatcagctgcagttggaagggttgaaatacatagaaagaaatgaacaaaaaatgaaaaaagttgcaaaaatattaagtcaagaaaaaacaactctgcagaaaattaatgattggataaaattaaaaactgatatgtatgaaggacttccattcttttcaaaattgtgatgagtatatgcttatgttctcataaatgaaggtctgtttagaagatcaaccacattcaataaggaattgtggggttcgacatgagttaactttgaaatacgtatgaattctggagaatcctgaaaaagacggtgcttcaaccagcttgcatagcacagagaatattcttggttacagaattcatatgggaactaggcttttaagatgttaataattagctaagctttagtaacccttactgtgctagtagattttagtagatattggtgttatattgtttgatgtttgaaaatatattaatatatgtgccgaacaagaaaccgaaagctatattgtactgtgtatttttactttagtcctcataatcatgttgaatttatgtgatcattgattttatttcatatggaaaagctaatttcttcttaaatttacattacctaatattctcactagctatgttctccaatccacactgccttttattgtaatatcatctaaatagatgcagaaaaatggaattttctctattaaagtattttacatttgacataaaaaagaaccagatacagttttctattcagatatgtttattttaacattgtttggttaaaaaaggtgaagttccagtcaaccactttttacccctgaaatttcaagataatgctatattaacttttccagatctaacactagcttattcttccctgttataaaatggtttgaacttactgaggagatat

SEQ ID NO: 21718 - DNA, 4259 bp, Homo sapiens
  source 1..4259: mol_type = unassigned DNA
gcgagtcgccgctgcagccctagtgactgcggcctgcatcccggtaagaccatgaattatggcatttcttaaatgaagcgttcaagaagtgagagaatgtcatagaaaataaatgatttttaagttatgtctattaatctgactgtagatatatatatttacctccttagtaatgcaagaagtgtttgtgggaagcagagaagcaagcaactgtatttcttgttctcacctaagcattactggaggataagccacatcagtctacaaagaggttttcatacaaacataataagatgtaaatggaccaaaagtgaagcacattcttgcagtaagcactgttactctccaagcaaccatggtttacatattgggattttgaaacttagcacttctgctcccaagggacttacaaaagtgaacatttgtatgtcccgtattaaaagtactttgaactctgtttcaaaggctgtttttggcaatcaaaatgaaatgatttcacgtttagctcaatttaagccaagttcccaaattttaagaaaagtatcggatagtggctggttaaaacagaaaaacatcaaacaagccatcaaatctctgaaaaaatatagtgacaaatcagcagaaaagagtccttttccagaagagaaaagtcacattatagacaaagaagaagatataggtaaacgcagtctttttcattacacaagttctataaccacaaaatttggagactcattctactttttatcaaatcatattaattcatatttcaaacgtaaggaaaaaatgtctcaacaaaaggaaaatgaacatttccgggacaaatcagaacttgaagataaaaaggtagaagaggggaaattaagatctccagatcctggcatcctggcttataagccaggctcagaatctgtacatacggtggacaagcctacaagtccttctgcgatacctgatgttcttcaagtttcaactaaacaaagtattgctaactttctttctcgtcccacggaaggtgtacaagctttagtaggtggttatattggtggacttgtccccaaattaaagtatgattcaaagagtcagtcagaagaacaggaagagcctgctaaaactgatcaggctgtcagcaaagacagaaatgcagaggagaaaaagcgtttatctcttcagcgagaaaagattatcgcaagggtgagtattgataacaggacccgggcattagttcaggcattaagaagaacaactgacccaaagctctgcattactagggttgaagaactgacttttcatcttctagaatttcctgaaggaaaaggagtggctgtcaaggaaagaattattccatatttattacgactgagacaaattaaggatgaaactcttcaggctgcagttagagaaattttggccctaattggctatgtggatccagtgaaagggagaggaatccgaattctctcaattgatggtggaggaacaaggggcgtggttgctctccagaccctacgaaaattagttgaacttactcagaagccagttcatcagctctttgattacatttgtggtgtaagcacaggtgccatattagctttcatgttggggttgtttcatatgcccttggatgaatgtgaggaactttatcgaaaattaggatcagatgtattttcacaaaatgtcattgttggaacagtaaaaatgagttggagccatgcattttatgacagtcaaacatgggaaaacattcttaaggataggatgggatctgcactgatgattgaaacagcaagaaaccccacatgtcctaaggatggaggtttgcttctgaataacccttcggcattagctatgcatgagtgtaaatgtctttggccagatgtgccgttagagtgcatagtatccctgggcactggacgttatgagagtgatgtgagaaacacggtaacatacacaagcttgaaaactaaactttctaatgttatcaacagtgctacagatacagaagaagtccatataatgcttgatggcctgttacctcctgacacctattttagattcaatcctgtaatgtgtgaaaacatacctctagatgaaagtcgaaatgaaaagctggatcagctgcagttggaagggttgaaatacatagaaagaaatgaacaaaaaatgaaaaaagttgcaaaaatattaagtcaagaaaaaacaactctgcagaaaattaatgattggataaaattaaaaactgatatgtatgaaggacttccattcttttcaaaattgtgatgagtatatgcttatgttctcataaatgaaggtctgtttagaagatcaaccacattcaataaggaattgtggggttcgacatgagttaactttgaaatacgtatgaattctggagaatcctgaaaaagacggtgcttcaaccagcttgcatagcacagagaatattcttggttacagaattcatatgggaactaggcttttaagatgttaataattagctaagctttagtaacccttactgtgctagtagattttagtagatattggtgttatattgtttgatgtttgaaaatatattaatatatgtgccgaacaagaaaccgaaagctatattgtactgtgtatttttactttagtcctcataatcatgttgaatttatgtgatcattgattttatttcatatggaaaagctaatttcttcttaaatttacattacctaatattctcactagctatgttctccaatccacactgccttttattgtaatatcatctaaatagatgcagaaaaatggaattttctctattaaagtattttacatttgacataaaaaagaaccagatacagttttctattcagatatgtttattttaacattgtttggttaaaaaaggtgaagttccagtcaaccactttttacccctgaaatttcaagataatgctatattaacttttccagatctaacactagcttattcttccctgttataaaatggtttgaacttactgaggagatattcctatcattaacaaaaataaactatttaaataatctgttgttaaaaggctaatgtcattttaaaattaatttttgttcataatgtagctcccctttagcctttgaatacacctggcagcagtatgcttaaaaataagaagttagttgcctggcgcagtagctcacacctgtaatcccagcactttgggaggccgaggcaggcagatcacctgacgtcaggagtccaagaccagcctggccaacacggtgaaacctcgtctctaataaaaatacaaacattagcccggcatggtggtgcacacctatagtcccagctactcgggaggctaaggcaggagaatggcttgaacctgagagacggaggttgcagtgagccaaatagcgccagtgcactccagcctaggcgacacagcgagactccatctcaaaaaaaaaaaaaaaaaaaagaagaagttaggcttgttttaccttattaactcctttgaactgtctggatttcatggaagttggtaagatgcacttacatggaacattgttcatgccaaacaaactcatctttattgtatctatttgtcacataaatccttacatggaatgttttgatttcttaagaaaaatgaaacaaaggttagcgccccttgttttagacatacaaactaaagctagaccctgttgcccagatagtcatattgcttctttgcaatatcaattcacagaggctgtgagatgtggttcaaagagtggagtcgagagtctggatgctaatcctgcctttgctgcaagaacccttctgtttgttaccttgaggaaggcaaatgtctgtaggctttgcatatctcatttgtaaaatgaggaaaggtagctgtaaaattttctaacatccgaattatataaactttagacatagtataaaataggaaactaccaatgatttctaaagataatatagttctttcagaccacaaataatacataataacatgcaactaagaacaacttgtaaatgcaagaaaaaaacaaataattggaaatcagaatatttctgggaattcttcgtaataaagcaaatttcaagcacaataaagtaatatttatgcatatttacatatttgcacctcatcataaggtcactctagtcctaaactgatgtagttcatctgttttacagctgaagttaagtatgtcccttatttgtgcttggcttatttctttcttaaataatacattacacaagtgaa

SEQ ID NO: 21719 - DNA, 3366 bp, Homo sapiens
  source 1..3366: mol_type = unassigned DNA
atgctctattgcgcatatctcggggcgggggaggaacggagattgacaaggaggcagaggcctgagcgaggcggaaaatcctcaccccggcccgcgggtagacccaaacttctagcgcgtcacttccgctgggggcggagcggggcggggctgagtgggtggcgacctagctgctgcgccagtgtttgtgttggaagctcagctgatgcaggccggttggagtggacgtcattgccgggaacgagcgagtcgccgctgcagccctagtgactgcggcctgcatcccgtaatgcaagaagtgtttgtgggaagcagagaagcaagcaactgtatttcttgttctcacctaagcattactggaggataagccacatcagtctacaaagaggttttcatacaaacataataagatgtaaatggaccaaaagtgaagcacattcttgcagtaagcactgttactctccaagcaaccatggtttacatattgggattttgaaacttagcacttctgctcccaagggacttacaaaagtgaacatttgtatgtcccgtattaaaagtactttgaactctgtttcaaaggctgtttttggcaatcaaaatgaaatgatttcacgtttagctcaatttaagccaagttcccaaattttaagaaaagtatcggatagtggctggttaaaacagaaaaacatcaaacaagccatcaaatctctgaaaaaatatagtgacaaatcagcagaaaagagtccttttccagaagagaaaagtcacattatagacaaagaagaagatataggtaaacgcagtctttttcattacacaagttctataaccacaaaatttggagactcattctactttttatcaaatcatattaattcatatttcaaacgtaaggaaaaaatgtctcaacaaaaggaaaatgaacatttccgggacaaatcagaacttgaagataaaaaggtagaagaggggaaattaagatctccagatcctggcatcctggcttataagccaggctcagaatctgtacatacggtggacaagcctacaagtccttctgcgatacctgatgttcttcaagtttcaactaaacaaagtattgctaactttctttctcgtcccacggaaggtgtacaagctttagtaggtggttatattggtggacttgtccccaaattaaagtatgattcaaagagtcagtcagaagaacaggaagagcctgctaaaactgatcaggctgtcagcaaagacagaaatgcagaggagaaaaagcgtttatctcttcagcgagaaaagattatcgcaagggtgagtattgataacaggacccgggcattagttcaggcattaagaagaacaactgacccaaagctctgcattactagggttgaagaactgacttttcatcttctagaatttcctgaaggaaaaggagtggctgtcaaggaaagaattattccatatttattacgactgagacaaattaaggatgaaactcttcaggctgcagttagagaaattttggccctaattggctatgtggatccagtgaaagggagaggaatccgaattctctcaattgatggtggaggaacaaggggcgtggttgctctccagaccctacgaaaattagttgaacttactcagaagccagttcatcagctctttgattacatttgtggtgtaagcacaggtgccatattagctttcatgttggggttgtttcatatgcccttggatgaatgtgaggaactttatcgaaaattaggatcagatgtattttcacaaaatgtcattgttggaacagtaaaaatgagttggagccatgcattttatgacagtcaaacatgggaaaacattcttaaggataggatgggatctgcactgatgattgaaacagcaagaaaccccacatgtcctaaggtagctgctgtaagtaccatagtaaatagagggataacacccaaagcttttgtgttcagaaactatggtcattttcctggaatcaactctcattatttgggaggctgtcagtataaaatgtggcaggccattagagcctcatctgctgctccaggctactttgcagaatatgcattgggaaatgatcttcatcaagatggaggtttgcttctgaataacccttcggcattagctatgcatgagtgtaaatgtctttggccagatgtgccgttagagtgcatagtatccctgggcactggacgttatgagagtgatgtgagaaacacggtaacatacacaagcttgaaaactaaactttctaatgttatcaacagtgctacagatacagaagaagtccatataatgcttgatggcctgttacctcctgacacctattttagattcaatcctgtaatgtgtgaaaacatacctctagatgaaagtcgaaatgaaaagctggatcagctgcagttggaagggttgaaatacatagaaagaaatgaacaaaaaatgaaaaaagttgcaaaaatattaagtcaagaaaaaacaactctgcagaaaattaatgattggataaaattaaaaactgatatgtatgaaggacttccattcttttcaaaattgtgatgagtatatgcttatgttctcataaatgaaggtctgtttagaagatcaaccacattcaataaggaattgtggggttcgacatgagttaactttgaaatacgtatgaattctggagaatcctgaaaaagacggtgcttcaaccagcttgcatagcacagagaatattcttggttacagaattcatatgggaactaggcttttaagatgttaataattagctaagctttagtaacccttactgtgctagtagattttagtagatattggtgttatattgtttgatgtttgaaaatatattaatatatgtgccgaacaagaaaccgaaagctatattgtactgtgtatttttactttagtcctcataatcatgttgaatttatgtgatcattgattttatttcatatggaaaagctaatttcttcttaaatttacattacctaatattctcactagctatgttctccaatccacactgccttttattgtaatatcatctaaatagatgcagaaaaatggaattttctctattaaagtattttacatttgacataaaaaagaaccagatacagttttctattcagatatgtttattttaacattgtttggttaaaaaaggtgaagttccagtcaaccactttttacccctgaaatttcaagataatgctatattaacttttccagatctaacactagcttattcttccctgttataaaatggtttgaacttactgaggagatattcctatcattaacaaaaataaactatttaaataa

SEQ ID NO: 21720 - DNA, 4225 bp, Homo sapiens
  source 1..4225: mol_type = unassigned DNA
cccacgcccgcgccttggcggccccactgaatccctacgcggggcccagcggtaccgggagaccgggctagcctatgggagcgcccagataacgcgggttgggggcgcccgcgccccccatccccgccagcatgactcgatcgccgcccctcagagagctgcccccgagttacacacccccagctcgaaccgcagcaccccagatcctagctgggagcctgaaggctccactctggcttcgtgcttacttccagggcctgctcttctctctgggatgcgggatccagagacattgtggcaaagtgctctttctgggactgttggcctttggggccctggcattaggtctccgcatggccattattgagacaaacttggaacagctctgggtagaagtgggcagccgggtgagccaggagctgcattacaccaaggagaagctgggggaggaggctgcatacacctctcagatgctgatacagaccgcacgccaggagggagagaacatcctcacacccgaagcacttggcctccacctccaggcagccctcactgccagtaaagtccaagtatcactctatgggaagtcctgggatttgaacaaaatctgctacaagtcaggagttccccttattgaaaatggaatgattgagcggatgattgagaagctgtttccgtgcgtgatcctcacccccctcgactgcttctgggagggagccaaactccaagggggctccgcctacctgcccggccgcccggatatccagtggaccaacctggatccagagcagctgctggaggagctgggtccctttgcctcccttgagggcttccgggagctgctagacaaggcacaggtgggccaggcctacgtggggcggccctgtctgcaccctgatgacctccactgcccacctagtgcccccaaccatcacagcaggcaggctcccaatgtggctcacgagctgagtgggggctgccatggcttctcccacaaattcatgcactggcaggaggaattgctgctgggaggcatggccagagacccccaaggagagctgctgagggcagaggccctgcagagcaccttcttgctgatgagtccccgccagctgtacgagcatttccggggtgactatcagacacatgacattggctggagtgaggagcaggccagcacagtgctacaagcctggcagcggcgctttgtgcagctggcccaggaggccctgcctgagaacgcttcccagcagatccatgccttctcctccaccaccctggatgacatcctgcatgcgttctctgaagtcagtgctgcccgtgtggtgggaggctatctgctcatgctggcctatgcctgtgtgaccatgctgcggtgggactgcgcccagtcccagggttccgtgggccttgccggggtactgctggtggccctggcggtggcctcaggccttgggctctgtgccctgctcggcatcaccttcaatgctgccactacccaggtgctgcccttcttggctctgggaatcggcgtggatgacgtattcctgctggcgcatgccttcacagaggctctgcctggcacccctctccaggagcgcatgggcgagtgtctgcagcgcacgggcaccagtgtcgtactcacatccatcaacaacatggccgccttcctcatggctgccctcgttcccatccctgcgctgcgagccttctccctacaggcggccatagtggttggctgcacctttgtagccgtgatgcttgtcttcccagccatcctcagcctggacctacggcggcgccactgccagcgccttgatgtgctctgctgcttctccagtccctgctctgctcaggtgattcagatcctgccccaggagctgggggacgggacagtaccagtgggcattgcccacctcactgccacagttcaagcctttacccactgtgaagccagcagccagcatgtggtcaccatcctgcctccccaagcccacctggtgcccccaccttctgacccactgggctctgagctcttcagccctggagggtccacacgggaccttctaggccaggaggaggagacaaggcagaaggcagcctgcaagtccctgccctgtgcccgctggaatcttgcccatttcgcccgctatcagtttgccccgttgctgctccagtcacatgctaaggccatcgtgctggtgctctttggtgctcttctgggcctgagcctctacggagccaccttggtgcaagacggcctggccctgacggatgtggtgcctcggggcaccaaggagcatgccttcctgagcgcccagctcaggtacttctccctgtacgaggtggccctggtgacccagggtggctttgactacgcccactcccaacgcgccctctttgatctgcaccagcgcttcagttccctcaaggcggtgctgcccccaccggccacccaggcaccccgcacctggctgcactattaccgcaactggctacagggaatccaggctgcctttgaccaggactgggcttctgggcgcatcacccgccactcgtaccgcaatggctctgaggatggggccctggcctacaagctgctcatccagactggagacgcccaggagcctctggatttcagccagctgaccacaaggaagctggtggacagagagggactgattccacccgagctcttctacatggggctgaccgtgtgggtgagcagtgaccccctgggtctggcagcctcacaggccaacttctaccccccacctcctgaatggctgcacgacaaatacgacaccacgggggagaaccttcgcatcccgccagctcagcccttggagtttgcccagttccccttcctgctgcgtggcctccagaagactgcagactttgtggaggccatcgagggggcccgggcagcatgcgcagaggccggccaggctggggtgcacgcctaccccagcggctcccccttcctcttctgggaacagtatctgggcctgcggcgctgcttcctgctggccgtctgcatcctgctggtgtgcactttcctcgtctgtgctctgctgctcctcaacccctggacggctggcctcatagtgctggtcctggcgatgatgacagtggaactctttggtatcatgggtttcctgggcatcaagctgagtgccatccccgtggtgatccttgtggcctctgtaggcattggcgttgagttcacagtccacgtggctctgggcttcctgaccacccagggcagccggaacctgcgggccgcccatgcccttgagcacacatttgcccccgtgaccgatggggccatctccacattgctgggtctgctcatgcttgctggttcccactttgacttcattgtaaggtacttctttgcggcgctgacagtgctcacgctcctgggcctcctccatggactcgtgctgctgcctgtgctgctgtccatcctgggcccgccgccagaggtgatacagatgtacaaggaaagcccagagatcctgagtccaccagctccacagggaggcgggcttaggtggggggcatcctcctccctgccccagagctttgccagagtgactacctccatgaccgtggccatccacccaccccccctgcctggtgcctacatccatccagcccctgatgagcccccttggtcccctgctgccactagctctggcaacctcagttccaggggaccaggtccagccactgggtgaaagagcagctgaagcacagagaccatgtgtggggcgtgtggggtcactgggaagcactgggtctggtgttagacgcaggatggacccctggagggccctgctgctgctgcatcccctctcccgacccagctgtcatgggcctccctgatatccatacagaacagccaccgatttgcacatccaggcctgtgtgagcctgtatctgtgtcacttgagagtgaaagctggcacttggggctgcagtgcagccctgtcccccttcccaccccacaccactgcctgcccagctgaccaagcctgagggaccctccagcacccttccgtctggtgactcctgggcaggctctccatatccctgcccacctcctaccacatccattatttatatgaaaatgtctatttttgtagtatacatacatgttagctatgatgaaagttttattttttaaagaatgaaatatattctatgtgaactaatctca

SEQ ID NO: 21721 - DNA, 1110 bp, Homo sapiens
  source 1..1110: mol_type = unassigned DNA
ctttgacttcattgtaaggtacttctttgcggcgctgacagtgctcacgctcctgggcctcctccatggactcgtgctgctgcctgtgctgctgtccatcctgggcccgccgccagaggtgatacagatgtacaaggaaagcccagagatcctgagtccaccagctccacagggaggcgggcttagagtggggagtttgcaagtgaacattagctattggaaggagcttctctggtgccaggacctgaggcccgaggagatctagcctctgcctcccaccccagcaccccctcatcagacacacggagcgccactgtctggacaggctgaattggtcttcgggtccctaatttctcatacgccattccctctgcctagaacactttctcacctccccttgatgtgaccccatatcacccttcgaggtgaattggatcggatgccatctcctccaggaggggtggggtcgtgcctcctgtgaggtcccagtgcccctgagtgtctgtgcccgtctgtttccccgtccctctctctaagcccggaggcttactgcgggtaaggacggcgggacaggaccttaacccctgggacgaacaccagctccgcaaaggactccgcacccggcgccgcccacggggtgcgggtcccaggaggaccagcagagaggagcataggagagcaaaggagatcagtgacccatggcttccccggtggcgcggaacagcccggagccgcctgtgatttgcatacccatggtgcaccacgaaaagataccctcaagatgcttgcactccctctgtgcgcgcatttctgcactgttttagagcatgatgcctcttacacgcatctgtgtgcataaactacatatagggagtgcgtaccacgcaggcatccaacaaccataagtgtgttaagtgttagttctccctgcgaggttcgaagcggaagtcacgaatatactcgggtttctcttcaaagcgcataaatctttcgccttttactaaagatttccgtggagagaaagttgtgagtttttattcaattttttgaggcctcttatttcctgaggctacatttttaagtattaaaagttaggcaactacaaccaag

SEQ ID NO: 21722 - DNA, 4298 bp, Homo sapiens
  source 1..4298: mol_type = unassigned DNA
atccccgccagcatgactcgatcgccgcccctcagagagctgcccccgagttacacacccccagctcgaaccgcagcaccccagatcctagctgggagcctgaaggctccactctggcttcgtgcttacttccagggcctgctcttctctctgggatgcgggatccagagacattgtggcaaagtgctctttctgggactgttggcctttggggccctggcattaggtctccgcatggccattattgagacaaacttggaacagctctgggtagaagtgggcagccgggtgagccaggagctgcattacaccaaggagaagctgggggaggaggctgcatacacctctcagatgctgatacagaccgcacgccaggagggagagaacatcctcacacccgaagcacttggcctccacctccaggcagccctcactgccagtaaagtccaagtatcactctatgggaagtcctgggatttgaacaaaatctgctacaagtcaggagttccccttattgaaaatggaatgattgagcggatgattgagaagctgtttccgtgcgtgatcctcacccccctcgactgcttctgggagggagccaaactccaagggggctccgcctacctgcccggccgcccggatatccagtggaccaacctggatccagagcagctgctggaggagctgggtccctttgcctcccttgagggcttccgggagctgctagacaaggcacaggtgggccaggcctacgtggggcggccctgtctgcaccctgatgacctccactgcccacctagtgcccccaaccatcacagcaggcaggctcccaatgtggctcacgagctgagtgggggctgccatggcttctcccacaaattcatgcactggcaggaggaattgctgctgggaggcatggccagagacccccaaggagagctgctgagggcagaggccctgcagagcaccttcttgctgatgagtccccgccagctgtacgagcatttccggggtgactatcagacacatgacattggctggagtgaggagcaggccagcacagtgctacaagcctggcagcggcgctttgtgcagctggcccaggaggccctgcctgagaacgcttcccagcagatccatgccttctcctccaccaccctggatgacatcctgcatgcgttctctgaagtcagtgctgcccgtgtggtgggaggctatctgctcatgctggcctatgcctgtgtgaccatgctgcggtgggactgcgcccagtcccagggttccgtgggccttgccggggtactgctggtggccctggcggtggcctcaggccttgggctctgtgccctgctcggcatcaccttcaatgctgccactacccaggtgctgcccttcttggctctgggaatcggcgtggatgacgtattcctgctggcgcatgccttcacagaggctctgcctggcacccctctccaggagcgcatgggcgagtgtctgcagcgcacgggcaccagtgtcgtactcacatccatcaacaacatggccgccttcctcatggctgccctcgttcccatccctgcgctgcgagccttctccctacaggcggccatagtggttggctgcacctttgtagccgtgatgcttgtcttcccagccatcctcagcctggacctacggcggcgccactgccagcgccttgatgtgctctgctgcttctccagtccctgctctgctcaggtgattcagatcctgccccaggagctgggggacgggacagtaccagtgggcattgcccacctcactgccacagttcaagcctttacccactgtgaagccagcagccagcatgtggtcaccatcctgcctccccaagcccacctggtgcccccaccttctgacccactgggctctgagctcttcagccctggagggtccacacgggaccttctaggccaggaggaggagacaaggcagaaggcagcctgcaagtccctgccctgtgcccgctggaatcttgcccatttcgcccgctatcagtttgccccgttgctgctccagtcacatgctaaggccatcgtgctggtgctctttggtgctcttctgggcctgagcctctacggagccaccttggtgcaagacggcctggccctgacggatgtggtgcctcggggcaccaaggagcatgccttcctgagcgcccagctcaggtacttctccctgtacgaggtggccctggtgacccagggtggctttgactacgcccactcccaacgcgccctctttgatctgcaccagcgcttcagttccctcaaggcggtgctgcccccaccggccacccaggcaccccgcacctggctgcactattaccgcaactggctacagggaatccaggctgcctttgaccaggactgggcttctgggcgcatcacccgccactcgtaccgcaatggctctgaggatggggccctggcctacaagctgctcatccagactggagacgcccaggagcctctggatttcagccagctgaccacaaggaagctggtggacagagagggactgattccacccgagctcttctacatggggctgaccgtgtgggtgagcagtgaccccctgggtctggcagcctcacaggccaacttctaccccccacctcctgaatggctgcacgacaaatacgacaccacgggggagaaccttcgcatcccgccagctcagcccttggagtttgcccagttccccttcctgctgcgtggcctccagaagactgcagactttgtggaggccatcgagggggcccgggcagcatgcgcagaggccggccaggctggggtgcacgcctaccccagcggctcccccttcctcttctgggaacagtatctgggcctgcggcgctgcttcctgctggccgtctgcatcctgctggtgtgcactttcctcgtctgtgctctgctgctcctcaacccctggacggctggcctcatagtgctggtcctggcgatgatgacagtggaactctttggtatcatgggtttcctgggcatcaagctgagtgccatccccgtggtgatccttgtggcctctgtaggcattggcgttgagttcacagtccacgtggctctgggcttcctgaccacccagggcagccggaacctgcgggccgcccatgcccttgagcacacatttgcccccgtgaccgatggggccatctccacattgctgggtctgctcatgcttgctggttcccactttgacttcattgtaaggtacttctttgcggcgctgacagtgctcacgctcctgggcctcctccatggactcgtgctgctgcctgtgctgctgtccatcctgggcccgccgccagaggtgatacagatgtacaaggaaagcccagagatcctgagtccaccagctccacagggaggcgggcttaggcccgaggagatctagcctctgcctcccaccccagcaccccctcatcagacacacggagcgccactgtctggacaggctgaattggtcttcgggtccctaatttctcatacgccattccctctgcctagaacactttctcacctccccttgatgtgaccccatatcacccttcgaggtgaattggatcggatgccatctcctccaggaggggtggggtcgtgcctcctgtgaggtcccagtgcccctgagtgtctgtgcccgtctgtttccccgtccctctctctaagcccggaggcttactgcgggtaaggacggcgggacaggaccttaacccctgggacgaacaccagctccgcaaaggactccgcacccggcgccgcccacggggtgcgggtcccaggaggaccagcagagaggagcataggagagcaaaggagatcagtgacccatggcttccccggtggcgcggaacagcccggagccgcctgtgatttgcatacccatggtgcaccacgaaaagataccctcaagatgcttgcactccctctgtgcgcgcatttctgcactgttttagagcatgatgcctcttacacgcatctgtgtgcataaactacatatagggagtgcgtaccacgcaggcatccaacaaccataagtgtgttaagtgttagttctccctgcgaggttcgaagcggaagtcacgaatatactcgggtttctcttcaaagcgcataaatctttcgccttttactaaagatttccgtggagagaaagttgtgagtttttattcaattttttgaggcctcttatttcctgaggctacatttttaagtattaaaagttaggcaactacaaccaag

SEQ ID NO: 21723 - DNA, 13714 bp, Homo sapiens
  source 1..13714: mol_type = unassigned DNA
tttggaaggaggcgtgatttccacgttcgagcgtcttcgctccccaccccctctcggcaccagccagtgcgcgccaccacctgagcctggcgagagccgggacgcacgcagtcttcagcctgctcctttaagcctctggagagactcggctctgagcgggtccgcccgacacccgccccctccccccactcctgagaactctttactttttgtttggaaaatcggggccatttctttatttatctctgggtcttcccggaggagggcagagaaggggagagcgagcttggcgggccggaccgggggaggggagcgaagggaggggaggggactgggtgtagcctggaattctccgtcctcgtgttcctgggcgggcgcgcagagtctcctggcgatagcgccgtcgccgctccccgcgccaccccgtcgttggccttgggggtcgggtgagtggggtcatgacgagccgcgggggctgccccgggccccgcccgcgctgagaggggacgcggccgcgcggcgcggagcccccctggcggggaggccgcggggggtggggagggcgcacgcggtagggcggagtgggggcggcgcagaggccgccaagctggggggctctccgggagggcgcggccgcgggcaggagggcgtgtctccggctcgaggggaccctcccgaggcgcggcgcgggactccccgatggtggtgccgcggctccgggagagctcagggtctcgccgccgccgccgtcgccgccgccgcgggcgccgctgccgccgccgccgccgccgccgccgccgccgcccgaacccgcgccgagcgtgcgcctcgccctcctcccgcgcccgctctgctctaggatgctgcggcaggttctgcacaggggcttgaggacgtgtttctcccggctcggccacttcattgccagtcaccctgtcttcttcgcctcggcgccggtgctcatctccatcctgctcggcgccagcttcagccgctaccaggtcgaggagagcgtggagcacctgctggcgccccagcacagcctggccaagatcgagcgcaacctcgttaacagcctcttcccggtcaaccgctccaagcaccgtctctactcggacctgcagacccccgggcgctacggccgggtcatcgtcacctccttccagaaagccaacatgctggaccagcatcacaccgacctgatcttaaagttgcatgctgctgtcaccaagatccaggttccaaggcctggttttaattacacgtttgcccatatatgtatcctgaataatgataagacttgcatcgtggatgacatagtgcacgtcctggaagagctaaagaatgctcgggccaccaatcggaccaattttgctatcacatacccaatcactcacttaaaggacgggagggctgtgtacaatgggcaccagcttgggggcgtcactgtgcacagcaaagaccgggtgaaatctgcagaggccatccagctcacctactacctgcagtcaatcaacagtctcaatgacatggtggctgagaggtgggagtccagcttctgcgacactgtcagactgtttcagaaatccaacagcaaagtcaaaatgtacccttacacgtcctcctcactgagggaagatttccagaagaccagccgcgtatcagaacgttacctggtcaccagcctgattctggtggttaccatggccatcctgtgttgctctatgcaggactgcgtccgcagcaaaccctggctaggcctgctcggattggtgaccataagcctggccactctcactgcagccgggatcatcaatcttactggtgggaaatataattccaccttcctgggagtccctttcgtcatgctaggtcatggattatatgggacttttgaaatgttatcctcctggaggaaaactagagaagaccaacatgttaaagagagaactgcagcagtctatgcagactccatgctctccttttctctcaccactgccatgtacctggtcacctttggcataggggccagccctttcacgaacattgaggcagccaggattttctgctgcaattcctgtattgcaatcttcttcaactacctctatgtactctcgttttatggttccagcctagtgttcactggctacatagaaaacaattaccagcatagtatcttctgtagaaaagtcccaaagcctgaggcattgcaggagaagccggcatggtacaggtttctcctgacggccagattcagtgaggacacagctgaaggcgaggaagcgaacacttacgagagtcacctattggtatgtttcctcaaacgctattactgtgactggataaccaacacctatgtcaagccttttgtagttctcttttaccttatttatatttcctttgccttaatgggctatctgcaggtcagtgaagggtcagaccttagtaacattgtagcaaccgcgacacaaaccattgagtacactactgcccagcaaaagtacttcagcaactacagtcctgtgattgggttttacatatatgagtctatagaatactggaacactagtgtccaagaagatgttctagaatacaccaaggggtttgtgcggatatcctggtttgagagctatttaaattaccttcggaaactcaatgtatccactggcttgcctaagaaaaatttcacagacatgttgaggaattcctttctgaaagcccctcaattttcacattttcaagaggacatcatcttctctaaaaaatacaatgatgaggtcgatgtagtggcctccagaatgtttttggtggccaagaccatggaaacaaacagagaagaactctatgatctcttggaaaccctgaggagactttctgtcacctccaaggtgaagttcatcgtcttcaatccgtcctttgtatacatggatcgatatgcctcctctctgggagcccccctgcacaactcctgcatcagtgctttgttcctgctcttcttctcggcattcctggtggcagattcactgattaacgtctggatcactctcacagttgtgtccgtggagtttggagtgataggtttcatgacattatggaaagtagaactggactgcatttctgtgctatgcttaatttatggaattaattacacaattgacaattgtgctccaatgttatccacatttgttctgggcaaggatttcacaagaactaaatgggtaaaaaatgccctggaagtgcatggggtagctattttacagagttacctctgctatattgttggtctgattcctcttgcagctgtgccttcaaatctgacctgtacactgttcaggtgcttgtttttaatagcatttgtcaccttctttcactgctttgccattttacctgtgatactgactttcctgccaccctctaagaaaaaaaggaaagagaagaaaaatcctgagaaccgggaggaaattgagtgtgtagaaatggtagatatcgatagtacccgtgtggttgaccaaattacaacagtgtgataatgtctgcttggcatattttcaccttaggtcttatcaagaccaaagagattatgttaatgaaacaattaaattcaaagttcttcccttttttaaagataggaaacaggcattgccaaaaaaaaaaaaaaaaaaaaaaggaaaggacagtggggagaaatgggcctggcatattttcagtctttaaaacaaaggagttgttatgagaattcacacacacatagacacacacacacacacacacacacacacacacacacacacaccctgggagacctatagtctcttaaactaagatcaagtagaagaaagcttattaacaagcaggatcctgccttatccaaactgcagatgttgctggcattgtgacaaaacccactgattgaaaggtcaactgccaaggcagaaacacctttaagcattgttcaaacaataaggcttccagaacttctgtagagcagtagctccagtcatggtctgtggtttgaggttttagctgtctcacctagctccctaacactgaaggagatacttgtgaaagttctgaccagcaaaagcaagccagagccttggaaactgatatgtggtagagtggccatcactcatggactaaaattgattcaccgctaaatttacccaggtgaagcagtttcgttgtctagaatgaaattatcatattccgccattggtatgcctttaacatttgtatagtttggtttgcttaaaacaccttaaaaccaatgacagctccagcactgcagaattggtgtgattctactttggaatagcttgtcacttgtcaccaaatgggtctgctttattagttacagctcttggcaggaggatccagggacccaaaaccacagggccaaacccaaatacctggcatgatggagcaaaagcaggtgtctacttggacccagatatagtgtctccattttaacaacaacaacaaaatagccagctggtacagctgtttgcattggccctacatgcattttttgcatggatatccagaaacatctgcccacacaaaactgcggggaaaaaaaatgaacactgaaatagttatttgctgttgcttccaacttgtagtgccagtctgcctttgctgtgaaacacacctgctcagagacagagaggggaagaagatctttggtaagtctaagtcctgacgctgagaagctttgtaaaagtgcagggagataaagggccaaaagggagatagatggaaaacactggaaaaagtattcactgatacaaatctatcaatgatggcagtccaattctcttgctaaagtggctgcacctcaccttgctggtcccccccacaccttttttgatgtccttctgcgtcatcatagcaaggcccttctgtaaattaacaagcctagatatttatactcttgacttccagtatctacagaagaatggttcatagatctaaacagaaatggtttagatctaaaaaggctgtatacgttgcccaggcccctgcatttctttaaatttataaaaatgaagctaaaacctggttacatttgaagcaaatatctacagtatttttcccttttagagatgtagcttccttagacatctgtagtggtaagcatttcccaaaagcatcttacctttctgaaccttagcagacatactgtgcagcttacctatcttctgcagaggaggaaactgagacctaggagaataaagtgactcactcaggtcacaccactaaagggttttcatcatttcagcatacctaagacagggcagtccaattttcagtattctcataagatggctattactcctctcaaaatgcatttccaaagtaggaacataggacttcgttggccacagggcagacatttttttagtgtctggaattaaaatgtttgaggtttaggtttgccattgtctttccaaaaggccaaataattcagatgtaaccacaccaagtgcaaacctgtgctttctatttcacgtactgttgtccatacagttctaaatacatgtgcaggggattgtagctaatgcattacacagtcgttcagtcttctctgcagacacactaagtgatcataccaacgtgttatacactcaactagaagataataagctttaatctgagggcaagtacagtcctgacaaaagggcaagtttgcataatagatcttcgatcaattctctctccaaggggcccgcaactaggctattattcataaaacacaactgaagaggggattggttttactgttaaatcatgtgttgctaaatcattttctgaacagtgtgttctaaatcagtcattgatttagtgtcagccacgtggagcacctcggcttaaagcagctccacaaaacctgacacaacacacacaccaattaaatggattttgttgagaatttaatcattcaatttggtcaaccagaatgacttcctgtggaactctgttttatgacagataatagttttccaacttgattgagtctctgtataccctgggatattgtattttttaatgaagggcattttcaaacttgtcaacttctcttttcagcacttgaaatgaaggcttatggaattctgactgtgaaatgaatttttctattgggagattatgcatgccaagatttattatttattgttagataattattatttatttgttaatactgattattgattattgctctgctgcattggtttagccccgctatggagaagacactttagaagtaactcagaatcacatccccataaaatctaagtctttacttcatcaagttttactttttgaattgctataaagacggaaaaattgatccctgcaaacacttgaagaagctgtgttttttttctttcaattaattccaaccaagacattaacgtccactttaccaaagaaacttacttggttggtttttagttggtgtttgttgtttgtttaccaaagaaaatattcgattcatcaaaaatattgctcctggtcaactaaaaaactgtgatactgggacttttttggccattcataaggaaaatttttaaaagtcaaggtaagggtgatattctctcatttagtggaagaagaagatgtcaattcacagggaatgtggtgttcgcaagaaagaaaatgatacttgaaatagggcattattgtttagcctacagcaacatttcaacaagcagcatcagggctcctcaggttaaaagaagtacagtttgtttcagagaaaaaggaagacaaaccctcgtgaaatgtttctccattgttccagctcataagttttactttgttttgggttttggagtttttagtttctttgatgtttgttttgctttaatttggtttgtggtttgtgtttgcttgtgtttgcttctgcctttcctaccttctgccttttactccctcagttttcagtcagaagtgtgataatcagatgccatcctccatggccacgcttatgtatgcaatataccgctccaaatgaggaccttggtaacccttgaccctttaattctaactaaccatcacccaatcgtaagtggcattatgggaccatgataccacttttctccagtgtcaatgacagagctcagctgtgtccatcacaagaaaaggtggaatgggcagctgtcttgggggtgtggcaagaggcagaacctcttggacacaaatgttatcttcctcataatggctttattcttttggatcctattaaagtacccctgtagcttatagtagtgtttgacctctgtgactctgttttctcatctgtaaaatggggataatatcagtaaatgtctttaaattcagcaaatacttatcgagtgccaaatatcgcccagatactgttcgagaggctggggacacaacagtcaacaaatcagattttttaaaatctgctcttgtagagtctacctttgagtgacattgcaggtatattgtggggattgaatgagatgagagatgacatttggaaagcactcttggaaaggcctggcaaagaaaagagactcaagacattatttgtaattcagcaatctcgcacagtagcattagggctcgggatgtaaagctactgagaagtagatttgagcctgagaattagggctacaaatacaatgagttgccacagaaggtagttaattaccagtcattttaggacatcaaaatgaagctgatcaccacatagtggggccactgtaaaggggctgcaagtcctggatgttggcatcatactatgatctttgaaaaaaacagatacaggcacttgcttttggggatggggaagggacaccactgattactgaataactgtggctggcttgtctgagggaatgtaaacattcccttgaggtaatttgcttttaattttgtgtaaaaagcaccaggtatttagagacataaagttcccgttttttaaaagaatagtaaatctgcaatacaaagaaaaatattaagttagtggattcgctggcaaagaactaagaatggctgcagccaacacactgcagagttcctccctgtggtggttacaactgttatttctgtttcatgccagtccaggagaaagcaaagaggaaagtggatgagctataatccgttcacctgaataggcagtgccaggatgtcccccccagcttgcctctcacccgccccgctgctgcccagctgatttgtttgaagtcctctttgatatctatgagagcaccgtggaaggaagaagaagggaggcgaccggagagctatggcctctgtgcagatttttgagttagattaaaattagtaccacctgattaggagcctacctggtgaggaaaaaagccttcttttcaaagtacaaaaaaaagcgatgtgtaccaaggagaaaaccagcagagaaagcttggtggaagaagtgatgttcttgtggaatgtgccagcagcttctccttccagaatgctgacaccagatgaatctttggttagaattaagcctacccctttgtttttcacatgagaaaactgaaccctcgagtaatgaaattatattcacagagctaattagaaacaggagactataattgaaatctagtttttagcctcaattctttctccattttgccactttactgccaaattctattcatctaaattattggggtcttaacctgggggccaaatgagttcatgggaggggtctctgagtttcctacaattaagttacatgcaaaaatgtgtgtatatgttcaacatgtgcattttcctaaactgagggctcagattccaaaagaggtctatgaccgaaaaagggtgaagaaccactgtcctaaattaatacagacctcattgggagtgtgatcctggtgtcctcattttggctaatgagcaatcaagaacttttgaactatcttttctctaaggatccaaaaatgcttcaaaatattggtttcttcatcccaagccaagtgcctacttctattcatttattcttcattcattctttcattcattcatttctttattctgcaaatgtattttcagtgccaattcatgttctagcagcagctaaatatgccctccacagcaggaccaggaaaggagccctctgtactgtgctcttgttggcaagaggaacaccaggttgctaccacattctcactgttgcaacaaattatatatagcctcaaattttcagtaaccatcccacacacacatacacacataaaggcagcagccaacaaagccaacatatagaagtgtgccctgtcaaagaaccaggaagagcagcctatttccaggttatatacagtgatatgctgtttacaactgcataccacatccttagaaggcctgctcccaaatgagccctactctgagatgtctacaccaggcatgctttcacacacgtgcagtaccctactctcaaaacaagtatggagagaataagtctcattcatctcgttaatatttttagtgggcaaagaagcaaccgtggccatggacagatgggtgcatttaaggacaggtgtggccgggcacagtggctcaagcctgtaatcccagcactttgggaggcggaggcgggcagatcacgaggttaagagattgagaccatcctggccagcatggtgaaaccccgcctctactaaaaaatacaaaaaaattagctgggcgtggtggcacgtgcctgtagtcccagctactcaggaggcaggagaatcccttgaacccgggaggtagaagttgcagtgagccgagatttcaccactgccctccagactggcaacagagtgagacttcgtctcaaaaaaataaaggacaagtgtgttttatacacaaatatgcagaagcccagttctcttgactccaagtcagaagctagataaaatagaggttgctgggggaagttggaaaataaatgactatactgtacttgttggctctgctgctgctgatataacttcaggcacaacggaagccgcctcggttggcctatgggaagggctgggtgaatcactgcttggccttgcatgaagcacaaaggacacaccaatggctgatcagtggcccttccatcatcttctgcccagccatgataaggaaagccttctattgagatggaggaatattagctcaactttgtagcatctgatgtaaagtttgaggggtttgtcttttttgtttgtttgtttgtttttttttgagatggagtctcactctgtcacccaggctggagtgcagtggcgccatctcagctcactgcaagctccacctcccaggttcacgacattctcctgcctcagcctcctgagtagctgggactacaggtgcccgccaccgcgcccggctaattgtgtgtgtgtgtgtgtgtgtgtgtgtgtgtgtgtttagtagagatggggtttcaccgtgttacccatgatagtctcgatctcctaacctcgtgatccacccgcctcggcctcccaaagtgctgggattacaggcgtgagccaccgtgcccggcaagggctttgttcattaggatcaacaaagtgctttgtctaattcctgcaaaatggcaaagacccagcccatttccattactcattccaggctcatgctcaggaaaactaataacgttctctttgacaaaacaatttccttaattttctaggatgaatcttgaacatgtttagctcagcctttcagatatttattctttaaattaccatcctgtcaaaattgcctttacgcactgatccagaatcaccaaggcagttgccacgatgcctcccaggactgtgggtgactgggcaaactggtaatgacccgttggctctgcttcacacacacacatacacattgacacacataaatgtacacatgcatatatgtgtgtacaacacaactataaaacatagaaacatatacctgtacatatgcacatgcttacatacacacatatcacagatgtgcatgcacacatacacatgcacaccaccttttacaatatgcctgacacatttgaggcacattaaaatgccttggcaggcccagccctatagttctgtaaggtttggcaggccaaaggcttcggatgtctgcaggataccattgaaaaaatgttatcttccccttctatatgtttcttatgcacgagcacagctaagagcagccaaatagtaagctttaaagaaaagaaacctggaaaagtgaatgtgccttgcaatttaaaaattgctaacagtttcacagtgggaaaattgcatttgttggaattttccaagtcataagcaagaagaatagcatagacccaaaacgacagagatctcttccaaggtatggaattgtggaaatttatttagaatatttgcttggtgatccagagaagggggaaagaagtggtgaggaagaatatatggggtgatccctccaaattgccaactcctcgtcttaggaagaagtgggcagtttccattgatccctagcatcagtttgacgggaaaaccggtgcatttcatcaacctcaaggaaaggaagtgccatgcatggaggcctggtgataggcaacatccatttagaagaacagtcacacaagcaacagaagaactatccaagactagaagcttagaagcttataccaaactctctgtctctctctctctctctcacacacacacacacagagtggatgggaggggacattaagaggaaccctagtgcagttcccccaaaaaaccttggcatagagtataacagggaaaaagtaattactgggaagctgaaaacaatcaaatatgtgaggaatgactgaatatgagctgaggataatgtaaattgttctggattgtctataagataaagatacagagcctgaatctatgtttttctgaataaagagaccccatattctcttttgaattattgacctataattcctcttcagcagctttgaatacactcaagttctcttcctattgtttatgatcccataatacaaccacccactatttgttgtggtttacaatccagcttagaacccttgagcaaaattattgaattattgaatgctaggcccaaacaaaagaaatttcagcttggttttagtaatttcttgatcaaacttctctcattcctctaaatgtacaaaggtttcaaagttgtaaaaaatatgtctacatagccaatgctcttagtatttttaacagcaaagataatctctgccaataattattaatgacaaaatagtgataactgttcaatgttgctttaacagtccaattgtagtaggtgagaaaacaaaaaagaagagaagctatgttgaatatttagtaatgttggaaaagatcctcaccctagacataaaatagtttaaacatttaaacatggcccctctcttattgtcattgctagtgaaagaagttcctgaaattgcatattacattgtaaagttttgggctaaatcacaatacatttttaagttgcttccatggcaatagatcgtaagaccacagcttgtcaaagtaaccactaattcagtattcagaaaccttatcatctgttcctccaaaaagaccccatagttaatgttgtgtttcccagtattttagttgggtttcttcacacttaggcaagtgggtgattctggtcataataaactattttcaaactaggaaaaagtatccaaatgctagagcacataatgagttcagcttggtcagttttgagacagataagcataaaaccctactagaaaaaaataatagtcaaacctaaagctttaaaaaatgtgagtcacatcacttttctccaggaaaggcagaacgtgctcagggtggaatttaatcaaaaatgtacccagaacaatttcccacaaagagctgtaatactttgcagcaaggggcattaataaactctaatttttaccgaaagtcaagagacacacagatcttttttggtaccctctacatcatcatagcaaggcccttctgaacattaacaagcctagatgtttctactgcttatttgcagtatctacaggggaatggttcgtggatataaacagaaatgttttatctgaagaggctgtgtatgccaccccagacccctgcatttcttaatatctataaaaatatgactaaacttgttacatttgaggcaaatatgtacagtatttttcccttttaaagatagtttaaaaaatcaaggtaataaaaaacggccaactctttcaggaaaaaaaaaatccggtattttgtactacttgagtttctctaatgcctaaaatatgcatttaaatcatcccacacctacacagaaacaaaatcagcagggaaaaccatcccactgatgattggcaattccaccgttcctctccatctgaccagctttcaccagagggcgatctttcatgcttgcacatcgagtttatacaatgtagaagcccccaagtcacctgggaaatggctcatgccaaatacatggagtccttagttgactatcttttcatattaaaatcccatcttccaatgaagcatcctgttttcaatactgatatcaaatttcgaatgtaaaggagatttcaaatgtattgctttcaccttttcttttttattcatttatttttaattgacataaaaattgtatatatttatgggatacaatgtgatgttttgatatatgtatgcattgtggaatgattaaatcaagctaattaaca

SEQ ID NO: 21724 - DNA, 5215 bp, Homo sapiens
  source 1..5215: mol_type = unassigned DNA
gcggctccgagaagcttccccctgcgacttccgcgaggagacgagtctgcgcagcgtggtggccgccgccccccgaccctctgcgcactctctcccgcgccggcggctcagcctagccccgttcggccggccgagactatggacacggaggatgaccccttgctgcaggatgtgtggctagaggaggagcaggaggaggaagaagcaacgggtgaaacctttttaggggcccagaagccagggccccaacctggggcagggggacagtgttgctggcggcactggcccctggcttcccgacccccagcttcgggcttctggagtaccctgggctgggccttcaccaatccgtgctgtgctgggctggtgctcttcctgggctgcagcatccccatggccctgtcagccttcatgttcctttactacccaccgctggacattgacatctcctacaacgcctttgagatccgcaaccacgaggcctcacagcgtttcgacgctctcactctggcgcttaagtcccagtttggatcctgggggcggaaccggcgcgatttggccgacttcacctccgagacgcttcagcgccttatctcagagcagctgcagcagctgcatctcggcaaccgctcgcggcaagcctcccgagccccccgcgtcatccccgcggcctcactcggtggcccaggcccttaccgggacacttccgcggctcaaaagcccacagccaatcggagcgggcgacttcggcgtgagaccccgcccctggaggatctggcagccaaccagagtgaagacccgcgaaaccagcggctgagcaagaatgggcggtaccagcccagcatcccgccccacgcggcagtcgcggccaatcagagccgtgcccgccgaggcgcctcgcgctgggactactcgcgcgcctatgtgagtgccaacactcagacgcacgcgcactggcgcatcgagctcatcttcctggcgcgcggcgacgcggagcgcaacattttcaccagtgagcgcctggtcacgatccatgagatcgagcgcaagatcatggaccacccaggcttccgggagttctgctggaagccccacgaggtgctcaaggatctgccgctgggctcctactcctactgctcgccccccagctcgctcatgacctacttttttcccaccgagaggggcggcaagatctactatgacggcatgggccaggacctggcggacatccggggctccctggagctggccatgactcaccctgagttctactggtatgtggatgagggcctctctgcagacaatctgaagagctccctcctgcgcagtgagatcctgtttggagcacccctgcccaactactactcagtagatgaccgctgggaggaacaacgggctaagtttcagagcttcgtggtcacctacgtggccatgctggccaagcagtctaccagcaaagtccaggttctctatggggggacagacctgtttgactatgaagtgcgcaggacgttcaacaatgacatgctcctggccttcatcagcagcagctgcattgctgccctggtctacatcctcacctcctgctcagtgttcctgtccttctttgggattgccagcattggtctcagctgcctggtggccctcttcctgtaccacgtggtctttggtatccagtacttgggcatcctgaatggggtggccgccttcgtgatcgtgggcattggtgtggacgatgtctttgtgttcatcaacacctaccgccaggccacccacctggaagacccacagctgcgcatgatccacaccgtccaaactgcaggcaaggccaccttcttcacctccctgaccacagccgccgcctacgcagctaacgtcttctcccagatcccagccgtccacgactttggcctgttcatgtctctcatcgtgtcctgttgctggctggccgtgcttgtcaccatgcctgcagctctgggcctctggagcctctacctggcaccactggagagctcctgccagaccagctgccaccagaattgcagccggaagacctccctgcacttccccggagacgtgtttgccgctcccgagcaggttggaggcagccctgcccagggccccataccctacctggatgatgacatccccttgctggaggtcgaggaagagccagtgtcactggagctgggagacgtgtccctggtgtctgtgtcccccgagggtctgcagccagcctccaacacgggcagccgcggccatctcatcgtgcagctgcaggagctgctgcaccactgggtcctgtggtcagccgtcaagagccgctgggtgattgtggggctgttcgtctccatcctcatcttgtccctggtgttcgccagccggctccgccccgccagccgggccccgctactcttccggcctgataccaacatccaggtgctgctggacctcaagtacaacctgagcgccgagggcatctcctgcatcacctgttcaggtctgttccaggagaagccccacagcctgcagaacaacatccggacgtccctggagaagaagaggcgaggctcaggggtcccctgggctagccggcctgaggccaccctgcaggatttcccaggcaccgtgtacatctctaaagtgaagagtcaaggccaccccgctgtctacaggctctccctcaatgccagcctgcctgctccttggcaggctgtgtcgcctggggatggagaggtgccctccttccaggtgtatagagcgccttttggtaacttcaccaagaagctgaccgcttgtatgtctacagtagggctgctccaggcggcgagcccctcccgcaagtggatgctgacgaccttggcctgtgatgccaagcggggctggaagtttgacttcagcttctacgtggccaccaaggagcagcagcacacccggaagctgtacttcgcccagtcccacaagccccccttccacgggcgcgtatgcatggcaccccctggctgcctgcttagctccagccccgatgggcctaccaaaggcttcttcttcgtgcctagtgagaaagtgcccaaggcccgtctctcagccaccttcggcttcaacccctgcgtgaacacgggctgcgggaagccggcggtgcggccactagtggataccggggccatggtctttgtggtcttcggcattattggcgtcaaccgcactcggcaggtggacaaccacgtcattggagacccgggtagtgttgtctacgacagcagctttgacctcttcaaggaaattgggcacctgtgtcacctctgcaaggccatcgcagccaactccgagctggtgaagccgggtggggcccagtgcctgccttcaggctacagcatctcctccttcctgcagatgttgcaccctgagtgcaaggagctgcccgagcccaacctgctcccggggcagctgtcccacggggcagtgggcgtcagggagggccgcgtgcagtggatctccatggctttcgagtcgaccacgtacaagggcaaatcctccttccagacctactcggactacctgcgctgggagagcttcctccagcagcagctgcaggccttgcccgagggctcagtcctgcgccggggcttccagacctgcgagcactggaagcagatattcatggaaatcgtaggggtgcagagcgccctgtgcggcctggtgctatccctgctcatctgcgtggccgcggtggccgtgttcaccacccacatcctgctcctgctgcccgtgctcctcagcatcttgggcatcgtgtgcctggtggtgaccatcatgtactggagcggctgggagatgggggctgtggaagccatctccctgtccatcctcgttggctcctccgtggattactgcgtccacctggtcgagggctacctgctggctggagagaacctgcccccccaccaggccgaggacgcccgaacgcagcgccagtggcgtacgctggaggccgtgcggcacgtgggcgtggccatcgtctccagtgccctcaccacggtcatcgccacagtgcccctcttcttctgcatcatcgccccatttgccaagttcggcaagattgtggcactcaacacgggcgtgtccatcctctacacgctgaccgtcagcaccgccctgctgggcatcatggcgcccagctctttcactcggacccggacttccttcctcaaggccctgggtgccgtgctgctggcaggggccctggggctgggtgcctgcctcgtgctcctgcagagcggctataagattcccctgcccgcaggggcctccctatagcccgggacgggctctggacacttgcacctttggtcccatgggtgggggacaggagctgcttcccagctcgacttcagctagctgtgtccccaggcctgggcccagggcgccctgcgggccagcgtggaggctgacacccacacagatggtgtggaccatgctgccttgtggagctgggagttggagacagccgccaccccacaggccgggctactggcagccacactcggctttttgcccagtggcagaagagaccagccctcctcccatgcccggtcaccatgggggtcaggttatttttgtagggggtctccctctcacactgcctcagtgctcacaaccttccagtgtggatgttacagggtggcccccattctaccgatgtgaaaactgaggcgccaggacacagtggctgccctgtcgctggatcagtagcagagccagagctgcctccgagcgccatgccgccctcgggaatcatacaggaagagcacagtggatccagggtgggggcctctcaccccctaaccccgcccccccgcaaccctccccttcagctttacggcggccagtgctgaatggccctgtggccctccctgggccttttggtcttggccagagaagacagaaggacccggcttgggcttctgcatgtcctacccctgaccccagcctcaaggggcccctcaaaggccctctctgggggctctggggctcagcacagctttcctcatggatctaagcccctgtctttcccacctgactctgagtggatgttttgggggatggcccctgtggggaggagctgccatgccggccgcctgctcacggcagaaggttgctattaaaatgacataggattgcagactgctgctgttaatacgagcattttaagcac

SEQ ID NO: 21725 - DNA, 5213 bp, Homo sapiens
  source 1..5213: mol_type = unassigned DNA
gcggctccgagaagcttccccctgcgacttccgcgaggagacgagtctgcgcagcgtggtggccgccgccccccgaccctctgcgcactctctcccgcgccggcggctcagcctagccccgttcggccggccgagactatggacacggaggatgaccccttgctgcaggatgtgtggctagaggaggagcaggaggaggaagaagcaacgggtgaaacctttttaggggcccagaagccagggccccaacctggggcagggggacagtgttgctggcggcactggcccctggcttcccgacccccagcttcgggcttctggagtaccctgggctgggccttcaccaatccgtgctgtgctgggctggtgctcttcctgggctgcagcatccccatggccctgtcagccttcatgttcctttactacccaccgctggacattgacatctcctacaacgcctttgagatccgcaaccacgaggcctcacagcgtttcgacgctctcactctggcgcttaagtcccagtttggatcctgggggcggaaccggcgcgatttggccgacttcacctccgagacgcttcagcgccttatctcagagcagctgcagcagctgcatctcggcaaccgctcgcggcaagcctcccgagccccccgcgtcatccccgcggcctcactcggtggcccaggcccttaccgggacacttccgcggctcaaaagcccacagccaatcggagcgggcgacttcggcgtgagaccccgcccctggaggatctggcagccaaccagagtgaagacccgcgaaaccagcggctgagcaagaatgggcggtaccagcccagcatcccgccccacgcggcagtcgcggccaatcagagccgtgcccgccgaggcgcctcgcgctgggactactcgcgcgcctatgtgagtgccaacactcagacgcacgcgcactggcgcatcgagctcatcttcctggcgcgcggcgacgcggagcgcaacattttcaccagtgagcgcctggtcacgatccatgagatcgagcgcaagatcatggaccacccaggcttccgggagttctgctggaagccccacgaggtgctcaaggatctgccgctgggctcctactcctactgctcgccccccagctcgctcatgacctacttttttcccaccgagaggggcggcaagatctactatgacggcatgggccaggacctggcggacatccggggctccctggagctggccatgactcaccctgagttctactggtatgtggatgagggcctctctgcagacaatctgaagagctccctcctgcgcagtgagatcctgtttggagcacccctgcccaactactactcagtagatgaccgctgggaggaacaacgggctaagtttcagagcttcgtggtcacctacgtggccatgctggccaagcagtctaccagcaaagtccaggttctctatggggggacagacctgtttgactatgaagtgcgcaggacgttcaacaatgacatgctcctggccttcatcagcagcagctgcattgctgccctggtctacatcctcacctcctgctcagtgttcctgtccttctttgggattgccagcattggtctcagctgcctggtggccctcttcctgtaccacgtggtctttggtatccagtacttgggcatcctgaatggggtggccgccttcgtgatcgtgggcattggtgtggacgatgtctttgtgttcatcaacacctaccgccaggccacccacctggaagacccacagctgcgcatgatccacaccgtccaaactgcaggcaaggccaccttcttcacctccctgaccacagccgccgcctacgcagctaacgtcttctcccagatcccagccgtccacgactttggcctgttcatgtctctcatcgtgtcctgttgctggctggccgtgcttgtcaccatgcctgcagctctgggcctctggagcctctacctggcaccactggagagctcctgccagaccagctgccaccagaattgcagccggaagacctccctgcacttccccggagacgtgtttgccgctcccgagcaggttggaggcagccctgcccagggccccataccctacctggatgatgacatccccttgctggaggtcgaggaagagccagtgtcactggagctgggagacgtgtccctggtgtctgtgtcccccgagggtctgcagccagcctccaacacgggcagccgcggccatctcatcgtgcagctgcaggagctgctgcaccactgggtcctgtggtcagccgtcaagagccgctgggtgattgtggggctgttcgtctccatcctcatcttgtccctggtgttcgccagccggctccgccccgccagccgggccccgctactcttccggcctgataccaacatccaggtgctgctggacctcaagtacaacctgagcgccgagggcatctcctgcatcacctgttcaggtctgttccaggagaagccccacagcctgcagaacaacatccggacgtccctggagaagaagaggcgaggctcaggggtcccctgggctagccggcctgaggccaccctgcaggatttcccaggcaccgtgtacatctctaaagtgaagagtcaaggccaccccgctgtctacaggctctccctcaatgccagcctgcctgctccttggcaggctgtgtcgcctggggatggagaggtgccctccttccaggtgtatagagcgccttttggtaacttcaccaagaagctgaccgcttgtatgtctacagtagggctgctccaggcggcgagcccctcccgcaagtggatgctgacgaccttggcctgtgatgccaagcggggctggaagtttgacttcagcttctacgtggccaccaaggagcagcagcacacccggaagctgtacttcgcccagtcccacaagccccccttccacgggcgcgtatgcatggcaccccctggctgcctgcttagctccagccccgatgggcctaccaaaggcttcttcttcgtgcctagtgagaaagtgcccaaggcccgtctctcagccaccttcggcttcaacccctgcgtgaacacgggctgcgggaagccggcggtgcggccactagtggataccggggccatggtctttgtggtcttcggcattattggcgtcaaccgcactcggcaggtggacaaccacgtcattggagacccgggtagtgttgtctacgacagcagctttgacctcttcaaggaaattgggcacctgtgtcacctctgcaaggccatcgcagccaactccgagctggtgaagccgggtggggcccagtgcctgccttcaggctacagcatctcctccttcctgcagatgttgcaccctgagtgcaaggagctgcccgagcccaacctgctcccggggcagctgtcccacggggcagtgggcgtcagggagggccgcgtgcagtggatctccatggctttcgagtcgaccacgtacaagggcaaatcctccttccagacctactcggactacctgcgctgggagagcttcctccagcagcagctgcaggccttgcccgagggctcagtcctgcgccggggcttccagacctgcgagcactggaagcagatattcatggaaatcgccggggtgcagagcgccctgtgcggcctggtgctatccctgctcatctgcgtggccgcggtggccgtgttcaccacccacatcctgctcctgctgcccgtgctcctcagcatcttgggcatcgtgtgcctggtggtgaccatcatgtactggagcggctgggagatgggggctgtggaagccatctccctgtccatcctcgttggctcctccgtggattactgcgtccacctggtcgagggctacctgctggctggagagaacctgcccccccaccaggccgaggacgcccgaacgcagcgccagtggcgtacgctggaggccgtgcggcacgtgggcgtggccatcgtctccagtgccctcaccacggtcatcgccacagtgcccctcttcttctgcatcatcgccccatttgccaagttcggcaagattgtggcactcaacacgggcgtgtccatcctctacacgctgaccgtcagcaccgccctgctgggcatcatggcgcccagctctttcactcggacccggacttccttcctcaaggccctgggtgccgtgctgctggcaggggccctggggctgggtgcctgcctcgtgctcctgcagagcggctataagattcccctgcccgcaggggcctccctatagcccgggacgggctctggacacttgcacctttggtcccatgggtgggggacaggagctgcttcccagctcgacttcagctagctgtgtccccaggcctgggcccagggcgccctgcgggccagcgtggaggctgacacccacacagatggtgtggaccatgctgccttgtggagctgggagttggagacagccgccaccccacaggccgggctactggcagccacactcggctttttgcccagtggcagaagagaccagccctcctcccatgcccggtcaccatgggggtcaggttatttttgtagggggtctccctctcacactgcctcagtgctcacaaccttccagtgtggatgttacagggtggcccccattctaccgatgtgaaaactgaggcgccaggacacagtggctgccctgtcgctggatcagtagcagagccagagctgcctccgagcgccatgccgccctcgggaatcatacaggaagagcacagtggatccagggtgggggcctctcaccccctaaccccgcccccccgcaaccctccccttcagctttacggcggccagtgctgaatggccctgtggccctccctgggccttttggtcttggccagagaagacagaaggacccggcttgggcttctgcatgtcctacccctgaccccagcctcaaggggcccctcaaaggccctctctgggggctctggggctcagcacagctttcctcatggatctaagcccctgtctttcccacctgactctgagtggatgttttgggggatggcccctgtggggaggagctgccatgccggccgcctgctcacggcagaaggttgctattaaaatgacataggattgcagactgctgctgttaatacgagcattttaagc

SEQ ID NO: 21726 - DNA, 2529 bp, Homo sapiens
  source 1..2529: mol_type = unassigned DNA
aggaaaccgttgggtggggccaggagagcgttgggtggggccaggaaaccgtctggtgggatctccgcagctgcttttcacctgctgttcctcctgcgcttcctaagaggaagaatcaatgccgtgggtggagcccaagcccaggccggggccggagcagaagcccaagctcaccaaaccggactctgccaccgggccgcagtggtaccaggaatctcaggaatcggagtcggaaggcaagcagccacccccgggacccctggcacccccgaaatcccccgaaccctcaggacccctggcgtcggagcaggatgcacccctgccagagggggacgatgcacccccccggccgtcgatgctggacgatgcaccccgcctgccgctggagctggacgatgcacccctgccggaggaggaaacccccgaacccacggccatctgcaggcaccggcaccgctgtcacaccgactgcctagaggggctgctgtcccgcaccttccagtggctggggtggcaggtgggcgcgcacccctggatcttcctgctggcgcccttgatgctgacagccgcgctgggcaccggcttcctgtacctacccaaggacgaagaggaagacctagaggagcattacacccctgtggggagcccggccaaggcggagcggcgcttcgtgcagggccatttcaccaccaacgactcctaccgcttctccgcctccaggaggagcaccgaagccaatttcgtctcgcttctggtggtctcctacagcgactcactgctggacccagctacctttgcagaagtcagcaaactggacggcgcggtgcaggatctgcgcgtggcgcgggaaaagggaagccagatccagtaccagcaggtgtgcgcgaggtacagggcgctctgcgtgccccccaacccgatcctgtacgcctggcaggtgaacaaaacgctcaacctgagcagcatctccttccccgcctacaaccacggcaggcatcccctctacctgaccggcttcttcggaggatacatcttggggggcagcctaggaatgggccagttactcctgcgggccaaagccatgcggctgctgtactacctgaagaccgaggaccctgagtacgacgtgcagagcaagcagtggctcacccatttgctcgatcaatttaccaacattaagaacatcttggccttgaaaaaaattgaggtagtccactttacatcgctttccagacaactggaatttgaggcaacttctgtgactgtgatccctgtgtttcacctggcatacattctcatcattctgtttgcagtcacatcatgctttaggtttgactgcatacgaaacaaaatgtgtgttgcggcctttggagtgatttctgctttcttggcagtggtgagcggctttggcctgctgttgcacattggggtgccatttgtcatcatagttgccaattcaccatttcttattctaggtgttggggtcgatgacatgtttatcatgatttctgcctggcataagaccaaccttgcagatgacatacgagagcggatgtccaatgtctattcaaaagcggcagtgtctattacaatcaccaccatcactaacatcctggccttatatacagggattatgagctcttttaggtctgtacaatgtttttgcatctatacaggaatgaccctgttattttgctatttttataacatcacgtgttttggagcatttatggccttggatggtaaaagagaagtagtctgcctatgctggttgaaaaaggctgacccaaaatggccctcatttaaaaagttctgctgtttcccatttggttctgtcccagatgaacatggaactgatatccatccaataagtttgttttttagagactattttggcccctttctcacaaggagtgagtccaagtattttgtagtctttatatatgttttgtacatcataagcagtatatatgggtgtttccatgtgcaggaaggtttagaccttcgaaatctggcaagtgacgattcctacatcacaccatattttaacgtagaggagaattatttttcagattatggtcccagggttatggttattgttactaaaaaagttgactactgggataaagatgttaggcaaaaactggaaaactgtactaaaatttttgaaaaaaatgtctatgtagataaaaatcttacagagttttggttagatgcatatgtgcaatatttaaaaggtaacagccaagatcctaatgagaagaatacttttatgaacaatattcctgattttttaagcaattttccaaattttcagcatgatattaatatttcttcatcaaatgaaatcatttcttcccggggcttcattcagacaacagatgtttcttcctcagccaaaaagaaaatattgttattctaattacgacgcatagctgaagactgtcaaattcccctaatggtgtataaccaggcatttatatattttgatcagtatgctgcaatattagaagacactgttagaaatgt

SEQ ID NO: 21727 - DNA, 6618 bp, Homo sapiens
  source 1..6618: mol_type = unassigned DNA
ctcctcggtgcaacctatataaggctcacagtctgcgctcctggtacacgcgcttcaacttcggttggtgtgtgtcgaagaaacctgactgcgccctgaggagaacagcggagaaggtccaccgagcctggcgaaaggtccgctgagcgggctgtcgtccggagccactccgggctgcggagcacccagtggagaccgcgcctggctcaggtgtgggaccccatccttcctgtcttcgcagaggagtcctcgcgtgaaataagcgggttttgaaaacaaaaaaaagaaggagtggaagagggggccaggatccaggcctccatccccacagaagtgaagctacagctgggaggtctcctcccaccccaaccgtcaccctgggtcccgactgcccacctcctcctcctccccctccccccaacaacaacaacaacaacaactccaagcacaccggccataagagtgcgtgtgtccccaacatgaccgaacgaagaagggacgagctctctgaagagatcaacaacttaagagagaaggtcatgaagcagtcggaggagaacaacaacctgcagagccaggtgcagaagctcacagaggagaacaccacccttcgagagcaagtggaacccacccctgaggatgaggatgatgacatcgagctccgcggtgctgcagcagctgctgccccaccccctccaatagaggaagagtgcccagaagacctcccagagaagttcgatggcaacccagacatgctggctcctttcatggcccagtgccagatcttcatggaaaagagcaccagggatttctcagttgatcgtgtccgtgtctgcttcgtgacaagcatgatgaccggccgtgctgcccgttgggcctcagcaaagctggagcgctcccactacctgatgcacaactacccagctttcatgatggaaatgaagcatgtctttgaagaccctcagaggcgagaggttgccaaacgcaagatcagacgcctgcgccaaggcatggggtctgtcatcgactactccaatgctttccagatgattgcccaggacctggattggaacgagcctgcgctgattgaccagtaccacgagggcctcagcgaccacattcaggaggagctctcccacctcgaggtcgccaagtcgctgtctgctctgattgggcagtgcattcacattgagagaaggctggccagggctgctgcagctcgcaagccacgctcgccaccccgggcgctggtgttgcctcacattgcaagccaccaccaggtagatccaaccgagccggtgggaggtgcccgcatgcgcctgacgcaggaagaaaaagaaagacgcagaaagctgaacctgtgcctctactgtggaacaggaggtcactacgctgacaattgtcctgccaaggcctcaaagtcttcgccggcgggaaactccccggccccgctgtagagggaccttcagcgaccgggccagaaataataaggtccccacaagatgatgcctcatctccacacttgcaagtgatgctccagattcatcttccgggcagacacaccctgttcgtccgagccatgatcgattctggtgcttctggcaacttcattgatcacgaatatgttgctcaaaatggaattcctctaagaatcaaggactggccaatacttgtggaagcaattgatgggcgccccatagcatcgggcccagttgtccacgaaactcacgacctgatagttgacctgggagatcaccgagaggtgctgtcatttgatgtgactcagtctccattcttccctgtcgtcctaggggttcgctggctgagcacacatgatcccaatatcacatggagcactcgatctatcgtctttgattctgaatactgccgctaccactgccggatgtattctccaataccaccatcgctcccaccaccagcaccacaaccgccactctattatccagtagatggatacagagtttaccaaccagtgaggtattactatgtccagaatgtgtacactccagtagatgagcacgtctacccagatcaccgcctggttgaccctcacatagaaatgatacctggagcacacagtattcccagtggacatgtgtattcactgtccgaacctgaaatggcagctcttcgagattttgtggcaagaaatgtaaaagatgggctaattactccaacgattgcacctaatggagcccaagttctccaggtgaagagggggtggaaactgcaagtttcttatgattgccgagctccaaacaattttactatccagaatcagtatcctcgcctatctattccaaatttagaagaccaagcacacctggcaacgtacactgaattcgtacctcaaatacctggataccaaacataccccacatatgccgcgtacccgacctacccagtaggattcgcctggtacccagtgggacgagacggacaaggaagatcactatatgtacctgtgatgatcacttggaatccacactggtaccgccagcctccggtaccacagtacccgccgccacagccgccgcctccaccaccaccaccgccgccgcctccatcttacagtaccctgtaaatacctgtcatgtccttcaggatctctgccctcaaaatttattcctgttcagcttctcaatcagtgactgtgtgctaaattttaggctactgtatcttcaggccacctgaggcacatcctctctgaaacggctatggaaggttagggccactctggactggcacacatcctaaagcaccaaaagaccttcaacattttctgagagcaacagagtatttgccaataaatgatctctcatttttccaccttgactgccaatctaactaaaataattaataagtttactttccagccagtcctggaagtctgggttttacctgccaaaacctccatcaccatctaaattataggctgccaaatttgctgtttaacatttacagagaagctgatacaaacgcaggaaatgctgatttctttatggagggggagacgaggaggaggaggacatgacttttcttgcggtttcggtaccctctttttaaatcactggaggactgaggccttattaaggaagccaaaattatcggtgcagtgtggaaaggcttccgtgatcctctcgctgcacccttagaaacttcaccgtcttcaaactccatttccatggttctgttaattctcaaggagcagcaactcgactggttctcccaggagcaggaaaaacccttgtgacatgaaacatctcaggcctgaaaagaaagtgctctctcagatggactcttgcatgttaagactatgtcttcacatcatggtgcaaatcacatgtacccaatgactccggctttgacacaacaccttaccatcatcatgccatgatggcttccacaaagcattaaacctggtaaccagagattactggtggctccagcgttgttagatgttcatgaaatgtgaccacctctcaatcacctttgagggctaaagagtagcacatcaaaaggactccaaaatcccatacccaactcttaagagatttgtcctggtacttcagaaagaattttcatgagtgttcttaattggctggaaaagcaccagctgacgttttggaagaatctatccatgtgtctgcctccatatgcatctgggcatttcatcttcagtcccctcattagactgtagcattaggatgtgtggagagaggagaaatgatttagcacccagattcacactcctatgcctggaagggggacatctttgaagaagaggaattagggctgtggacactgtcttgaggatgtggacttccttagtgagctccacattacttgatggtaaccacttcaaaaggatcagaatccacgtaatgaaaaaggtccctctagaggatggagctgatgtgaagctgccaatggatgaaaagcctcagaaagcaactcaaaggactcaaagcaacggacaacacaagagttgtcttcagcccagtgacacctctgatgtcccctggaagctttgtgctaacctgggactgcctgacttcctttagcctggtcccttgctactaccttgaactgttttatctaacctctctttttctgtttaattctttgctactgccattgaccctgctgcaggatttgtgtcattttcctgcctggttgctgagactccattttgctgccacacacagagatgtaagaggcaggctttaattgccaaagcacagtttgagcagtagaaaacaacatggtgtatatctcaaattgcctgacatgaagaggagtctaacggtgaagtttcacttttcatcagcatcatctttcacatgttcattatcatctgctcttattcttgcatgtttaaacacttaaaatttttagtataatttttagtgtgttttgaagtggtgactaggctttcaaaaacttccattgaattacaaagcactatccagttcttattgttaaactaagtaaaaatgataagtaacatagtgtaaaatattcctttactgtgaacttcttacaatgctgtgaatgagaggctcctcagaactggagcatttgtataataattcatcctgttcatcttcaattttaacatcatatataatttcaattctatcaattgggcctttaaaaatcatataaaaggatataaaatttgaaaagagaaacctaattggctatttaatccaaaacaactttttttttccttcaatggaatcagaaagcttgtcaatcactcatgtgttttagagtaattacttttaaaatggtgcatttgtgcttctgaactattttgaagagtcacttctgtttacctcaagtatcaattcatcctccatacatttgaattcaagttgtttttttgtcaaatttacagttgtcaattgatcttcaagctgcagggtgcctagaaatgggccgttgtctgtagccctggcatgtgcacacggacatttgccaccactgcaagcaaaagtctggagaagttcaccaacgacaagaacgattagggaaaatatgctgctgtgggttaacaactcagaaagtccctgatccacatttggctgtttactaaagcttgtgattaactttttggcagtgtgtactatgctctattgctatatatgctatctataaatgtagatgttaaggataagtaattctaaatttattattctatagttttgaagtttggttaagtttcctttcactcaattgatttattttgttgttaatcaaatttatgttaattggatcctttaaattttttttggcattttccaacaaaaatggctttattcataagaaaggaaaaaaatcaatggaatttgatatctaaagaagttagaaagggagcaaaataaaaaacataaaggagatagatgaattagtaagcaaatcagtagtcgagtttttcaaactggcaaaattaattaattgacttttagcccaaatttacattgttaattaaatcaagaaggaagaagatctaagagctcccattgataggcaagcctagagagaactagctaaatttatcatgctaggatattgaaacacagaaagtttacatacatttatgaagggtcaatttagtttggacagtgaggtatttgtcttagtggaaaaaaggagaattagtctgatcaaatcgtgaagtaatacagtgaacttgcaggtgcacaaaataagagggccacatctatatggtgcagtctggaattctgtttaagtttgtaggtacctcttggacttctgaattgatccagttgtcatccaccacagacatctcacatcagatacagacagttccaagattgacaacagagaacaacctgctggaaagacctgggcagaaatggagagccctgcgggaaccatgctacattttcatctaaagagagaatgcacatctgatgagactgaaagttctttgttgttttagattgtagaatggtattgaattggtctgtggaaaattgcattgcttttatttctttgtgtaatcaagtttaagtaataggggatatataatcataagcattttagggtgggagggactattaagtaattttaagtgggtggggttatttagaatgttagaataatattatgtattagatatcgctataagtggacatgcgtacttacttgtaaccctttaccctataattgctatccttaaagatttcaaataaactcggagggaactgcagggagaccaacttatttagagcgaattggacatggataaaaaccccagtgggagaaagttcaaaggtgattagattaataatttaatagaggatgagtgacctctgataaattactgctagaatgaacttgtcaatgatggatggtaaattttcatggaagttataaaagtgataaataaaaacccttgcttttacccctgtcagtagccctcctcctaccactgaaccccattgcccctacccctccttctaactttattgctgtattctcttcactctatatttctctctatttgctaatattgcattgctgttacaataaaaattcaataaagatttagtggttaagtgcaaa

SEQ ID NO: 21728 - DNA, 2587 bp, Homo sapiens
  source 1..2587: mol_type = unassigned DNA
acacgcgcttcaacttcggttggtgtgtgtcgaagaaacctgactgcgccctgaggagaacagcggagaaggtccaccgagcctggcgaaaggtccgctgagcgggctgtcgtccggagccactccgggctgcggagcacccagtggagaccgcgcctggctcaggtgtgggaccccatccttcctgtcttcgcagaggagtcctcgcgtggtgagtatgcgaaataagcgggttttgaaaacaaaaaaaagaaggagtggaagagggggccaggatccaggcctccatccccacagaagtgaagctacagctgggaggtctcctcccaccccaaccgtcaccctgggtcccgactgcccacctcctcctcctccccctccccccaacaacaacaacaacaacaactccaagcacaccggccataagagtgcgtgtgtccccaacatgaccgaacgaagaagggacgagctctctgaagagatcaacaacttaagagagaaggtcatgaagcagtcggaggagaacaacaacctgcagagccaggtgcagaagctcacagaggagaacaccacccttcgagagcaagtggaacccacccctgaggatgaggatgatgacatcgagctccgcggtgctgcagcagctgctgccccaccccctccaatagaggaagagtgcccagaagacctcccagagaagttcgatggcaacccagacatgctggctcctttcatggcccagtgccagatcttcatggaaaagagcaccagggatttctcagttgatcgtgtccgtgtctgcttcgtgacaagcatgatgaccggccgtgctgcccgttgggcctcagcaaagctggagcgctcccactacctgatgcacaactacccagctttcatgatggaaatgaagcatgtctttgaagaccctcagaggcgagaggttgccaaacgcaagatcagacgcctgcgccaaggcatggggtctgtcatcgactactccaatgctttccagatgattgcccaggacctggattggaacgagcctgcgctgattgaccagtaccacgagggcctcagcgaccacattcaggaggagctctcccacctcgaggtcgccaagtcgctgtctgctctgattgggcagtgcattcacattgagagaaggctggccagggctgctgcagctcgcaagccacgctcgccaccccgggcgctggtgttgcctcacattgcaagccaccaccaggtagatccaaccgagccggtgggaggtgcccgcatgcgcctgacgcaggaagaaaaagaaagacgcagaaagctgaacctgtgcctctactgtggaacaggaggtcactacgctgacaattgtcctgccaaggcctcaaagtcttcgccggcgggaaactccccggccccgctgtagagggaccttcagcgaccgggccagaaataataaggtccccacaagatgatgcctcatctccacacttgcaagtgatgctccagattcatcttccgggcagacacaccctgttcgtccgagccatgatcgattctggtgcttctggcaacttcattgatcacgaatatgttgctcaaaatggaattcctctaagaatcaaggactggccaatacttgtggaagcaattgatgggcgccccatagcatcgggcccagttgtccacgaaactcacgacctgatagttgacctgggagatcaccgagaggtgctgtcatttgatgtgactcagtctccattcttccctgtcgtcctaggggttcgctggctgagcacacatgatcccaatatcacatggagcactcgatctatcgtctttgattctgaatactgccgctaccactgccggatgtattctccaataccaccatcgctcccaccaccagcaccacaaccgccactctattatccagtagatggatacagagtttaccaaccagtgaggtattactatgtccagaatgtgtacactccagtagatgagcacgtctacccagatcaccgcctggttgaccctcacatagaaatgatacctggagcacacagtattcccagtggacatgtgtattcactgtccgaacctgaaatggcagctcttcgagattttgtggcaagaaatgtaaaagatgggctaattactccaacgattgcacctaatggagcccaagttctccaggtgaagagggggtggaaactgcaagtttcttatgattgccgagctccaaacaattttactatccagaatcagtatcctcgcctatctattccaaatttagaagaccaagcacacctggcaacgtacactgaattcgtacctcaaatacctggataccaaacataccccacatatgccgcgtacccgacctacccagtaggattcgcctggtacccagtgggacgagacggacaaggaagatcactatatgtacctgtgatgatcacttggaatccacactggtaccgccagcctccggtaccacagtacccgccgccacagccgccgcctccaccaccaccaccgccgccgcctccatcttacagtaccctgtaaatacctgtcatgtcct

SEQ ID NO: 21729 - DNA, 5483 bp, Homo sapiens
  source 1..5483: mol_type = unassigned DNA
gaatattgatgcggcgcgcgtcggcgtcgccctcctcccattgagcgaggctgtgtcgcgtggcccagcgtcggcgtgacggttggacgcgggcgcggcactgcgggtcccgattgctgcagccgcttgtcagtgtgatgaagattggcacccagacaccattcgcttttcacccaagatgatttgatgtcttataaaactctgatgaaccatgatggctacacagacattaagtatagacagctatcaagatgggcaacagatgcaagtagtaacagagttaaagacagaacaagatccaaactgctctgaacccgatgcagaaggagtgagccctccccctgtggagtctcagaccccgatggatgtggacaagcaggccatttataggcatccactatttccattattagctttgttgtttgaaaaatgtgaacaatctacacagggctctgaaggcacaacttctgccagttttgatgtagacatcgaaaattttgtaagaaagcaagagaaggaagggaaacctttcttttgtgaagatccagaaactgataatttaatggtaaaagcaatccaggttttgcgcattcatcttcttgagctggaaaaggttaacgaactctgcaaagatttctgcagtcgatacattgcttgtctgaaaacaaaaatgaacagtgaaactctgttgagtggagagcctggaagcccgtactcaccagtgcagtcccagcagattcaaagtgccatcacaggcaccatcagccctcagggaattgtggtgccggcgtccgcgctgcagcagggaaacgtagccatggcgacggtggcaggtggcacagtgtatcagcctgtcacggtcgtcactccccaaggccaagtggtcacacagacattgtcgcctgggacaattaggatccagaactcccagcttcagttacagttaaaccaagatctcagcatcttgcatcaagatgatggttcatctaagaacaagaggggcgtcctgccaaagcatgccacgaacgtgatgcggtcctggctcttccagcacatcgggcatccctacccaacagaggatgagaaaaaacagattgctgctcagacaaatttgacactactccaagtcaacaactggttcatcaatgccagaagacgaattcttcagccaatgttggattcaagttgttcagagacccccaaaacaaagaaaaaaactgctcagaaccggccagttcagaggttttggcctgattctattgcatcaggagtcgcacagccaccgccgagcgagctcaccatgtcggaaggagctgttgtcaccatcaccacgcccgtgaacatgaacgtggacagccttcagtctctgtcctcggacggggccaccctggcggtgcagcaggtcatgatggcagggcagagcgaggacgagtctgtggacagcacagaggaggatgcgggtgccctggcccctgcccacatcagcgggctggtcttggagaacagtgactccctgcagtaggggcaggagcagacgcacctgactttttggagtttgcacagcaaacattttacacagttttatttctaatatgttttatatgtagatatagaagagtgcacttttgtatttcatagtaagcttaaagcgcgtctttgccggtgcagcgacttctttcaagtgtgtgtgtgtgtgtgtgtgtgtgtgtgtgtgcgtgtgtgcgtgtgtgtggatttttaaagaaattctttaaaggtttaacgctagattgtgaggaatgacacaccactccctccccaccttgaatccctaattagattaaggaatagcgctgccattttctaaaccgtgatgcggttgtcacttagttctgtggttccagcagatctcagtgggctggttgatttgtgtggcccatggatttgaaagaagctgctgcacccgaaactgccagtgtgcggtgacaacggcacacgcctagactgagtgtggtttcgtcgtgagtggatggacggcaagcttagcaagcctaagtcccctcatgttcagtgagcctgtttcatttgctatatagaaaaagaaactcctatttttaccttgctggaattattggataaaaaagctatttttataaattcgttatgaattggatgatgactatattgaggataaaatttctagagaagaaacaatacatgcttgctattaatatttcaatttggaatgttctgaattgaccaaatttaatgaacctgcccaaagttagctaccgttccatggttctttgctctccccgggtagtgatgaacatttactactataaaagaaacagctatttaatgaaattttgatatctgcaaatttttgttgatatgtaatgctcagattgcattttacacttgatctaaacatatatcgaaagatatctgctaaacaggacttcaggtaagtgaggtgaaatggtagccagtgacccgttaggagctctcaccgtacatactccagtctaatttaaatctgaccacagttgcatggtcgctttaccatgttagctgtgtattgttttaaaagttttaacttcaaaatatgttatgcacagaatgtttattataaactaatataaaatgtgctctaccccattggctcagagctagggcaaacagcagatattcagactttattacttaactagcggacatccctggagtcccagcagcgagctggtctggcgagggcacctcggcagcccccacgggttggctcctacgtttgcgtttgtggctggtctcctggtgtcagtgttctcttgtacgttgttgctttcgacttttcagagccctcctgctcacttgaccacgtgagatttggaataactgtaggacttctgtttcctggtaacaagatgaaccgagagagtgggctgggttctgttttctttggttttgatttgttttcattgtttacttaggagtggtgctttttctcagaaaacaggccacggtgtttcatacagaatgtcttcatatcatctgaaatggtatggctgaagttcatttgtttacagggtcgggaatgtcttcagttcttgagagtcaacagtaatgattggttgtaagccaagggacattttaagctagtgaagagttttttctggaattgatttttcccaaaagaatatattaattgaggttaagaagtcagtgggaaacacacagaaatttgttttaaaatctttcaggagctttactgaaagacttggttatcaagtcttttggggagagaatgacattttttttttgagacagagttttgctcttgttgcccaggctggagggcaatggtgcaatctcagctcactgcaacctccacctcttatgttcaagcaattctccttccttagcctcctgagtagctgggattacaggcatgcgccaccacacccggctaattttgtatttttagtagagatgggtttctccatgttggtcgggctggtctcgaactcccgacctcaggtgatctgcctgcctcagcctcccaaagtgctgggattacaggtgtgagccaccgcgcccggccgagaatgacatcttaaagccaccattgcgttcctcatttgtgaactgtcttctcatattttaagtcaagtctataagatcatttttaacctaagttccaactttgttggactccttaaaataagcacccatgaaagccagccagcccttcctccttccctcaccaccctccgtctcttcggctgcttgctctttagtgtagattagtggaagccattcacagaatgtagactcatgtataggtcaccgtttctttcccccactagaaatcacattcactaagcagtggattgaatttaagagtgctgcccctgcccggcgcagtagggcgtgcctctagttccagctactcgggagtctgaggcagaggatggcatgtgccaggagtttgaggctgcagtgcactatgcttgcacctgtgaatagccactgcactccatcttgggcaacacagtgagacccccatctataaaaagagagcactgcctgaacctcggtggcactgggaagctctggcctgagagttaaacacccatgctgaatgatacagtgtgcattctctccagctgcaaactttcttcaactttcctaaattcttactaaattcagaggaataggataaagatcacttagagaaagggtgcttatggacatagcctgagtttcctttaacctctctgcaatgggtgcttttaactagcttctacatggcaagctgtttcagtttgcaaaatcactgcccagcatgtttgaggtcagttggcaccttaaaacacctgttctccagcccttggacagtggagagaatctgtaaaagtgtgaccccctctaagatttcgttttaaatgatcagattcggttccagttttattcttgttgagtttttccctatgaaggctccttttgaatgtgtcttgagacccaaattgagcatgttgctgttattcctgccctgcacctgtggagcaggagtggcagggctggctgtgctgggttccagctcgctcccaccgagggactagcttggcctttgcgctttgattccagatagtaagatgagtggaagtgtttatcgagcatgcaaaagaaaccctcacggctaagggctctgggagttgtgtctgtgtgacctgagagtgatccatctcctgcctgtgtgaggtagcagtgggcacttttcattgagacaaactccagggtgtccagagggggttctgccccttgtgaaggcccattcctggcacttagagacagaaagaactcagcaatctttcgttctagttatattcggtctttgaaactgacaatctttgaaatgtgaatactgtaacaatatgttttcttggattgttgtctttaaaaaggatttttgtgaagcaattgatttatcaaagcaaaaaaattaaaaatagaaacttgctttatggatgttttattttataaagctcatgtcaccaaaagctgcttctccattttatgtaaaacattgagaatgttttcatgttttctggtgacatgtagggtctgtagtcacccctgcatattgagaaactaggaccacactgcatcggactagtcaggtccatttacatgtccaagaatcttttcttaaattccttactttgttcattcattggctgttcaggcagaaaatggaaacaggtagcttttatgttttttattatagttttccacaaatctaattattttgatagttacaagaagataatgattcatcagtaagctaacataatccctttcatagttcatattataaattttcatgacaagaaagttcctgaagatttaaaaggtacattaaaacaatttcagagggtttttaatctttgttgtccagagtgttataactcccaacaactgttcatgcttagaggctaaagtca

SEQ ID NO: 21730 - DNA, 1449 bp, Homo sapiens
  source 1..1449: mol_type = unassigned DNA
agtgtgatgaagattggcacccagacaccattcgcttttcacccaagatgatttgatgtcttataaaactctgatgaaccatgatggctacacagacattaagtatagacagctatcaagatgggcaacagatgcaagtagtaacagagttaaagacagaacaagatccaaactgctctgaacccgatgcagaaggagtgagccctccccctgtggagtctcagaccccgatggatgtggacaagcaggccatttatagatggtaaaagcaatccaggttttgcgcattcatcttcttgagctggaaaaggttaacgaactctgcaaagatttctgcagtcgatacattgcttgtctgaaaacaaaaatgaacagtgaaactctgttgagtggagagcctggaagcccgtactcaccagtgcagtcccagcagattcaaagtgccatcacaggcaccatcagccctcagggaattgtggtgccggcgtccgcgctgcagcagggaaacgtagccatggcgacggtggcaggtggcacagtgtatcagcctgtcacggtcgtcactccccaaggccaagtggtcacacagacattgtcgcctgggacaattaggatccagaactcccagcttcagttacagttaaaccaagatctcagcatcttgcatcaagatgatggttcatctaagaacaagaggggcgtcctgccaaagcatgccacgaacgtgatgcggtcctggctcttccagcacatcgggcatccctacccaacagaggatgagaaaaaacagattgctgctcagacaaatttgacactactccaagtcaacaactggttcatcaatgccagaagacgaattcttcagccaatgttggattcaagttgttcagagacccccaaaacaaagaaaaaaactgctcagaaccggccagttcagaggttttggcctgattctattgcatcaggagtcgcacagccaccgccgagcgagctcaccatgtcggaaggagctgttgtcaccatcaccacgcccgtgaacatgaacgtggacagccttcagtctctgtcctcggacggggccaccctggcggtgcagcaggtcatgatggcagggcagagcgaggacgagtctgtggacagcacagaggaggatgcgggtgccctggcccctgcccacatcagcgggctggtcttggagaacagtgactccctgcagtaggggcaggagcagacgcacctgactttttggagtttgcacagcaaacattttacacagttttatttctaatatgttttatatgtagatatagaagagtgcacttttgtatttcatagtaagcttaaagcgcgtctttgccggtgcagcgacttctttcaagtgtgtgtgtgtgtgtgtgtgtgtgtgtgtgtgcgtgtgtgcgtgtgtgtggatttttaaagaaattcttt

SEQ ID NO: 21731 - DNA, 2788 bp, Homo sapiens
  source 1..2788: mol_type = unassigned DNA
gcgtcgccctcctcccattgagcgaggctgtgtcgcgtggcccagcgtcggcgtgacggttggacgcgggcgcggcactgcgggtcccgattgctgcagccgcttgtcagtgtgatgaagattggcacccagacaccattcgcttttcacccaagatgatttgatgtcttataaaactctgatgaaccatgatggctacacagacattaagtatagacagctatcaagatgggcaacagatgcaagtagtaacagagttaaagacagaacaagatccaaactgctctgaacccgatgcagaaggagtgagccctccccctgtggagtctcagaccccgatggatgtggacaagcaggccatttataggcatccactatttccattattagctttgttgtttgaaaaatgtgaacaatctacacagggctctgaaggcacaacttctgccagttttgatgtagacatcgaaaattttgtaagaaagcaagagaaggaagggaaacctttcttttgtgaagatccagaaactgataatttaatggtaaaagcaatccaggttttgcgcattcatcttcttgagctggaaaaggttaacgaactctgcaaagatttctgcagtcgatacattgcttgtctgaaaacaaaaatgaacagtgaaactctgttgagtggagagcctggaagcccgtactcaccagtgcagtcccagcagattcaaagtgccatcacaggcaccatcagccctcagggaattgtggtgccggcgtccgcgctgcagcagggaaacgtagccatggcgacggtggcaggtggcacagtgtatcagcctgtcacggtcgtcactccccaaggccaagtggtcacacagacattgtcgcctgggacaattaggatccagaactcccagcttcagttacagttaaaccaagatctcagcatcttgcatcaagatgatggttcatctaagaacaagaggggcgtcctgccaaagcatgccacgaacgtgatgcggtcctggctcttccagcacatcgggcatccctacccaacagaggatgagaaaaaacagattgctgctcagacaaatttgacactactccaagtcaacaactggttcatcaatgccagaagacgaattcttcagccaatgttggattcaagttgttcagagacccccaaaacaaagaaaaaaactgctcagaaccggccagttcagaggttttggcctgattctattgcatcaggagtcgcacagccaccgccgagcgagctcaccatgtcggaaggtacaggtggccggccaaggccagacatggtggaccatggggtggggattatgaacaagaggcctggatcaggcctgttagctccaccgcgcccggccgagaatgacatcttaaagccaccattgcgttcctcatttgtgaactgtcttctcatattttaagtcaagtctataagatcatttttaacctaagttccaactttgttggactccttaaaataagcacccatgaaagccagccagcccttcctccttccctcaccaccctccgtctcttcggctgcttgctctttagtgtagattagtggaagccattcacagaatgtagactcatgtataggtcaccgtttctttcccccactagaaatcacattcactaagcagtggattgaatttaagagtgctgcccctgcccggcgcagtagggcgtgcctctagttccagctactcgggagtctgaggcagaggatggcatgtgccaggagtttgaggctgcagtgcactatgcttgcacctgtgaatagccactgcactccatcttgggcaacacagtgagacccccatctataaaaagagagcactgcctgaacctcggtggcactgggaagctctggcctgagagttaaacacccatgctgaatgatacagtgtgcattctctccagctgcaaactttcttcaactttcctaaattcttactaaattcagaggaataggataaagatcacttagagaaagggtgcttatggacatagcctgagtttcctttaacctctctgcaatgggtgcttttaactagcttctacatggcaagctgtttcagtttgcaaaatcactgcccagcatgtttgaggtcagttggcaccttaaaacacctgttctccagcccttggacagtggagagaatctgtaaaagtgtgaccccctctaagatttcgttttaaatgatcagattcggttccagttttattcttgttgagtttttccctatgaaggctccttttgaatgtgtcttgagacccaaattgagcatgttgctgttattcctgccctgcacctgtggagcaggagtggcagggctggctgtgctgggttccagctcgctcccaccgagggactagcttggcctttgcgctttgattccagatagtaagatgagtggaagtgtttatcgagcatgcaaaagaaaccctcacggctaagggctctgggagttgtgtctgtgtgacctgagagtgatccatctcctgcctgtgtgaggtagcagtgggcacttttcattgagacaaactccagggtgtccagagggggttctgccccttgtgaaggcccattcctggcacttagagacagaaagaactcagcaatctttcgttctagttatattcggtctttgaaactgacaatctttgaaatgtgaatactgtaacaatatgttttcttggattgttgtctttaaaaaggatttttgtgaagcaattgatttatcaaagcaaaaaaatt

SEQ ID NO: 21732 - DNA, 3653 bp, Homo sapiens
  source 1..3653: mol_type = unassigned DNA
gtcccgagcagtgctgggaagtataggctgtgttgtcacgccggtgtcagtctgatgaagattggcatcaggtgaagtctggagcaggacttctgaggctttctatcctccatgctgctcactagaaaaggggctgtgaactgtgctttggctctagcagacaggaagaaattctggcccagctggaagtagaaagaggggagtgagtctcctgaggaccatctcagaggccccgggatcacccgaacagtcctccatgtgaatcaatcccatgatgcaacatgcctccccagcccccgctctgacgatgatggccacgcagaatgtcccgcccccaccctaccaggacagcccacagatgacggcaaccgcccagccaccctccaaggcccaggctgtccacatctctgccccctcagctgctgccagcacacctgtgcccagtgcccccatcgacccccaggcccagctggaggctgacaagcgagctgtatacaggcaccctcttttcccgctcctgacgctgctgtttgagaaatgtgaacaggccacccagggctctgagtgcatcacctccgccagctttgatgtggacatcgagaactttgtccaccagcaggaacaggagcacaaacccttcttcagcgatgacccagaactggacaatctgatggtgaaggcaatccaggtcctgagaatccacctgctggagctggagaaagtcaatgaactctgcaaggacttttgtaaccgttacatcacctgcctcaaaaccaagatgcacagcgacaacctgctcaggaatgatctaggggggccctactcccccaaccagccctccatcaaccttcactcacaggacctcctgcagaattcccccaattccatgtccggagtctccaataacccccaggggattgtggtcccagcctcagcgctccagcagggcaacatcgccatgacaaccgtcaactcacaagttgtgtcaggtggagccttataccaaccggttaccatggtaacctcccagggtcaggtggtcacccaagcaatcccccagggagccatccagatccagaacacacaggttaaccttgacctcacctccctcctggacaatgaggataagaagtccaagaacaaacgaggagtcttgcccaagcatgccaccaatataatgcgttcttggctcttccagcatctcatgcacccctaccccacggaggatgagaagaggcagatcgcagcccagaccaacctcaccctcctgcaagtaaacaactggttcatcaatgcccggaggcgcatcctgcagcccatgcttgatgccagcaacccagatcctgcccccaaagccaagaagatcaagtctcagcaccggcccacccaaagattctggcccaactccatcgctgcgggggtgctgcagcagcagggcggtgccccagggacaaaccccgatggttccatcaacttggacaacctgcagtccctgtcctcagacagtgccaccatggccatgcagcaggctatgatggctgcacacgatgactcattggatgggacagaagaagaggatgaggatgagatggaagaggaggaggaggaggagctggaggaggaggtcgacgagctgcagacgacaaatgtcagcgacctgggcttggaacacagtgactccctggagtagtcgggcagcccagatggcactgatcactgagcaggagaggagtgtcgccgggaggccttcagggtgggggggaaggggacatgggcaggaagcaccgagggagttgggccctagcttccccaaatcagtagcttgaagaaaggcaaaggagacacctgttccttcccaaccaccgagcttcaatgaggaccccagccccacttccctggaactgccgaggactctgtttggcggggccagtcgagcagcctgtgtggaaagacaggagtgagatctggactcaccaaatccctgaggatagatggcacccatggcccccacccacggaaggacttgagttgtttacaagccctgcactgaggcagattggtgctgttcgcagagtaggcctttgcccgggggcagacttagaaggaaggggagagacaaagggggactgagtttcatccccagaagtttctcagctcctttgacagacattcaagggcaggagggagccccaaagcataaccagtggccagaggagtgggagggcctgaggcatcacatcttgcagatcagaatgggatggaatccaccaggctccagctcatccctccaaggccctgtctctgcgcacagcaaccatggacatgggagaaagggatgggagccacagtgcccttcactctctcctggaaaccaactgtaagctggtgggctcaacctgtgggaggttaagaggagtcccttctgggttgactccaagagccaaggagatggcagaccctgggctaggaaccatatggaggtgactttgaggccacagctgtccctaggtgatcacagaacttagctcctttaacaacaggacaatggttttttaccctagatgttcccaccttcagtgctccacgccctccatagaccttcagagaaggtgaaaccaggttatctgggaatctttccagcccgcaggtcgccacggccatccctttgctcccagcctggctccatcagcctccagcttcctttcttcattctgtccttcagggaaggcagaagaaacattggaaagcatctagtccagtgggaagccaggggttggagaaggtgctacatccctcttcccatcaatatcctaaatgtgggggagggcccagagaatggcacccaagagcctgcggggatgcccatcccacacaccccacccagctgttctaaccctgctatccacagccctggaggaactggggctcctggaaggaggaggaggctctccactgtccaccctaacacataccctcccacccaccttccagacccccttggttggcaccctctcctccggttccctctcaccccatggctgtgaatgacaggacaggtcacacgtgtgttttccattgggtttaatttaatggacgtgcagtttcatttgtaaattgtgcattggccacctccttcagtggcaggatgtgagtggctacctggctcaactggaggggaccccttgggccctctggggcttcccctcccccacctggttggggtagagcaaaaggatggtcactcttccgaggtctccctgaaatgaatgtatttctcccccaaaagagctgatatttaatgttttaataaggatttttgagaaacaaataaccttatttataatctgggtgatccaatcattttttactcccttttgatgccatacatagaggaaagtctagcttttttggcgtgagacttttgcaatgtgcagtgggataaaatgcatttccttttctggttcgtttttcttgttaacacgcgcacacagacacacacacacaccgttccactcaccacctggacaggcgtcccccagcacggacacactggcacacaggtgcccacatctcttcctctcagcccctccacctgcctaatgttatgcaacctccttctgatgtatccaccaaaccagtactgaatgtggccg

SEQ ID NO: 21733 - DNA, 545 bp, Homo sapiens
  source 1..545: mol_type = unassigned DNA
gtgttgtcacgccggtgtcagtctgatgaagattggcatcaggtgaagtctggagcaggacttctgaggctttctatcctccatgctgctcactagaaaaggggctgtgaactattgcatctacagacagtcagagtgcccgcaagaaatcaggcaatgagcgtaaaaacaacagactcgatccaccccgctcgaccagatcttgatgggaacctatgctcgaagggtgctttggctctagcagacaggaagaaattctggcccagctggaagtagaaagaggggagtgagtctcctgaggaccatctcagaggccccgggatcacccgaacatatgccatgataagggctggatctgttatggtgagattgggccccaactccaaaggaccttgcccaggattttgtcctccatgtgaatcaatcccatgatgcaacatgcctccccagcccccgctctgacgatgatggccacgcagaatgtcccgcccccaccctaccaggacagcccacagatgacggcaaccgcccagccaccctccaag

SEQ ID NO: 21734 - DNA, 1709 bp, Homo sapiens
  source 1..1709: mol_type = unassigned DNA
gggtccctgtgccgctgacgtcccgagcagtgctgggaagtataggctgtgttgtcacgccggtgtcagtctgatgaagattggcatcaggtgaagtctggagcaggacttctgaggctttctatcctccatgctgctcactagaaaaggggctgtgaactgtgctttggctctagcagacaggaagaaattctggcccagctggaagtagaaagaggggagtgagtctcctgaggaccatctcagaggccccgggatcacccgaacaatgacggcaaccgcccagccaccctccaaggcccaggctgtccacatctctgccccctcagctgctgccagcacacctgtgcccagtgcccccatcgacccccaggcccagctggaggctgacaagcgagctgtatacaggcaccctcttttcccgctcctgacgctgctgtttgagaaatgtgaacaggccacccagggctctgagtgcatcacctccgccagctttgatgtggacatcgagaactttgtccaccagcaggaacaggagcacaaacccttcttcagcgatgacccagaactggacaatctgatggtgaaggcaatccaggtcctgagaatccacctgctggagctggagaaagtcaatgaactctgcaaggacttttgtaaccgttacatcacctgcctcaaaaccaagatgcacagcgacaacctgctcaggaatgatctaggggggccctactcccccaaccagccctccatcaaccttcactcacaggacctcctgcagaattcccccaattccatgtccggagtctccaataacccccaggggattgtggtcccagcctcagcgctccagcagggcaacatcgccatgacaaccgtcaactcacaagttgtgtcaggtggagccttataccaaccggttaccatggtaacctcccagggtcaggtggtcacccaagcaatcccccagggagccatccagatccagaacacacaggttaaccttgacctcacctccctcctggacaatgaggataagaagtccaagaacaaacgaggagtcttgcccaagcatgccaccaatataatgcgttcttggctcttccagcatctcatgcacccctaccccacggaggatgagaagaggcagatcgcagcccagaccaacctcaccctcctgcaagtaaacaactggttcatcaatgcccggaggcgcatcctgcagcccatgcttgatgccagcaacccagatcctgcccccaaagccaagaagatcaagtctcagcaccggcccacccaaagattctggcccaactccatcgctgcgggggtgctgcagcagcagggcggtgccccagggacaaaccccgatggttccatcaacttggacaacctgcagtccctgtcctcagacagtgccaccatggccatgcagcaggctatgatggctgcacacgatgactcattggatgggacagaagaagaggatgaggatgagatggaagaggaggaggaggaggagctggaggaggaggtcgacgagctgcagacgacaaatgtcagcgacctgggcttggaacacagtgactccctggagtagtcgggcagcccagatggcactgatcactgagcaggagaggagtgtcgccgggaggccttcagggtgggggggaaggggacatgggcaggaagcaccgagggagttgggc

SEQ ID NO: 21735 - DNA, 1673 bp, Homo sapiens
  source 1..1673: mol_type = unassigned DNA
gtgccgctgacgtcccgagcagtgctgggaagtataggctgtgttgtcacgccggtgtcagtctgatgaagattggcatcaggtgctttggctctagcagacaggaagaaattctggcccagctggaagtagaaagaggggagtgagtctcctgaggaccatctcagaggccccgggatcacccgaacaatgacggcaaccgcccagccaccctccaaggcccaggctgtccacatctctgccccctcagctgctgccagcacacctgtgcccagtgcccccatcgacccccaggcccagctggaggctgacaagcgagctgtatacaggcaccctcttttcccgctcctgacgctgctgtttgagaaatgtgaacaggccacccagggctctgagtgcatcacctccgccagctttgatgtggacatcgagaactttgtccaccagcaggaacaggagcacaaacccttcttcagcgatgacccagaactggacaatctgatggtgaaggcaatccaggtcctgagaatccacctgctggagctggagaaagtcaatgaactctgcaaggacttttgtaaccgttacatcacctgcctcaaaaccaagatgcacagcgacaacctgctcaggaatgatctaggggggccctactcccccaaccagccctccatcaaccttcactcacaggacctcctgcagaattcccccaattccatgtccggagtctccaataacccccaggggattgtggtcccagcctcagcgctccagcagggcaacatcgccatgacaaccgtcaactcacaagttgtgtcaggtggagccttataccaaccggttaccatggtaacctcccagggtcaggtggtcacccaagcaatcccccagggagccatccagatccagaacacacaggttaaccttgacctcacctccctcctggacaatgaggataagaagtccaagaacaaacgaggagtcttgcccaagcatgccaccaatataatgcgttcttggctcttccagcatctcatgcacccctaccccacggaggatgagaagaggcagatcgcagcccagaccaacctcaccctcctgcaagtaaacaactggttcatcaatgcccggaggcgcatcctgcagcccatgcttgatgccagcaacccagatcctgcccccaaagccaagaagatcaagtctcagcaccggcccacccaaagattctggcccaactccatcgctgcgggggtgctgcagcagcagggcggtgccccagggacaaaccccgatggttccatcaacttggacaacctgcagtccctgtcctcagacagtgccaccatggccatgcagcaggctatgatggctgcacacgatgactcattggatgggacagaagaagaggatgaggatgagatggaagaggaggaggaggaggagctggaggaggaggtcgacgagctgcagacgacaaatgtcagcgacctgggcttggaacacagtgactccctggagtagtcgggcagcccagatggcactgatcactgagcaggagaggagtgtcgccgggaggccttcagggtgggggggaaggggacatgggcaggaagcaccgagggagttgggccctagcttccccaaatcagtagcttgaagaaaggcaaaggaga

SEQ ID NO: 21736 - DNA, 521 bp, Homo sapiens
  source 1..521: mol_type = unassigned DNA
attgccaaatgagcgacactaacaagagtgatgctctcagaggaaggacagactgagtggactgcaaggataggggagacttctggaagaggtggatggtgtggcagacccttgacactcattccccttcagcaggcttggaatgtggggatgactatccccattttcacatatggcaaaggcccaagccacacagctggtgaagtctggagcaggacttctgaggctttctatcctccatgctgctcactagaaaaggggctgtgaactgtgctttggctctagcagacaggaagaaattctggcccagctggaagtagaaagaggggagtgagtctcctgaggaccatctcagaggccccgggatcacccgaacagtcctccatgtgaatcaatcccatgatgcaacatgcctccccagcccccgctctgacgatgatggccacgcagaatgtcccgcccccaccctaccaggacagcccacagatgacggcaaccgcccagccaccctccaaggccca

SEQ ID NO: 21737 - DNA, 3175 bp, Homo sapiens
  source 1..3175: mol_type = unassigned DNA
acatgcctccccagcccccgctctgacgatgatggccacgcagaatgtcccgcccccaccctaccaggacagcccacagatgacggcaaccgcccagccaccctccaaggcccaggctgtccacatctctgccccctcagctgctgccagcacacctgtgcccagtgcccccatcgacccccaggcccagctggaggctgacaagcgagctgtatacaggcaccctcttttcccgctcctgacgctgctgtttgagaaatgtgaacaggccacccagggctctgagtgcatcacctccgccagctttgatgtggacatcgagaactttgtccaccagcaggaacaggagcacaaacccttcttcagcgatgacccagaactggacaatctgatggtgaaggcaatccaggtcctgagaatccacctgctggagctggagaaagtcaatgaactctgcaaggacttttgtaaccgttacatcacctgcctcaaaaccaagatgcacagcgacaacctgctcaggaatgatctaggggggccctactcccccaaccagccctccatcaaccttcactcacaggacctcctgcagaattcccccaattccatgtccggagtctccaataacccccaggggattgtggtcccagcctcagcgctccagcagggcaacatcgccatgacaaccgtcaactcacaagttgtgtcaggtggagccttataccaaccggttaccatggtaacctcccagggtcaggtggtcacccaagcaatcccccagggagccatccagatccagaacacacaggttaaccttgacctcacctccctcctggacaatgaggataagaagtccaagaacaaacgaggagtcttgcccaagcatgccaccaatataatgcgttcttggctcttccagcatcatgcacccctaccccacggaggatgagaagaggcagatcgcagcccagaccaacctcaccctcctgcaagtaaacaactggttcatcaatgcccggaggcgcatcctgcagcccatgcttgatgccagcaacccagatcctgcccccaaagccaagaagatcaagtctcagcaccggcccacccaaagattctggcccaactccatcgctgcgggggtgctgcagcagcagggcggtgccccagggacaaaccccgatggttccatcaacttggacaacctgcagtccctgtcctcagacagtgccaccatggccatgcagcaggctatgatggctgcacacgatgactcattggatgggacagaagaagaggatgaggatgagatggaagaggaggaggaggaggagctggaggaggaggtcgacgagctgcagacgacaaatgtcagcgacctgggcttggaacacagtgactccctggagtagtcgggcagcccagatggcactgatcactgagcaggagaggagtgtcgccgggaggccttcagggtgggggggaaggggacatgggcaggaagcaccgagggagttgggccctagcttccccaaatcagtagcttgaagaaaggcaaaggagacacctgttccttcccaaccaccgagcttcaatgaggaccccagccccacttccctggaactgccgaggactctgtttggcggggccagtcgagcagcctgtgtggaaagacaggagtgagatctggactcaccaaatccctgaggatagatggcacccatggcccccacccacggaaggacttgagttgtttacaagccctgcactgaggcagattggtgctgttcgcagagtaggcctttgcccgggggcagacttagaaggaaggggagagacaaagggggactgagtttcatccccagaagtttctcagctcctttgacagacattcaagggcaggagggagccccaaagcataaccagtggccagaggagtgggagggcctgaggcatcacatcttgcagatcagaatgggatggaatccaccaggctccagctcatccctccaaggccctgtctctgcgcacagcaaccatggacatgggagaaagggatgggagccacagtgcccttcactctctcctggaaaccaactgtaagctggtgggctcaacctgtgggaggttaagaggagtcccttctgggttgactccaagagccaaggagatggcagaccctgggctaggaaccatatggaggtgactttgaggccacagctgtccctaggtgatcacagaacttagctcctttaacaacaggacaatggttttttaccctagatgttcccaccttcagtgctccacgccctccatagaccttcagagaaggtgaaaccaggttatctgggaatctttccagcccgcaggtcgccacggccatccctttgctcccagcctggctccatcagcctccagcttcctttcttcattctgtccttcagggaaggcagaagaaacattggaaagcatctagtccagtgggaagccaggggttggagaaggtgctacatccctcttcccatcaatatcctaaatgtgggggagggcccagagaatggcacccaagagcctgcggggatgcccatcccacacaccccacccagctgttctaaccctgctatccacagccctggaggaactggggctcctggaaggaggaggaggctctccactgtccaccctaacacataccctcccacccaccttccagacccccttggttggcaccctctcctccggttccctctcaccccatggctgtgaatgacaggacaggtcacacgtgtgttttccattgggtttaatttaatggacgtgcagtttcatttgtaaattgtgcattggccacctccttcagtggcaggatgtgagtggctacctggctcaactggaggggaccccttgggccctctggggcttcccctcccccacctggttggggtagagcaaaaggatggtcactcttccgaggtctccctgaaatgaatgtatttctcccccaaaagagctgatatttaatgttttaataaggatttttgagaaacaaataaccttatttataatctgggtgatccaatcattttttactcccttttgatgccatacatagaggaaagtctagcttttttggcgtgagacttttgcaatgtgcagtgggataaaatgcatttccttt

SEQ ID NO: 21738 - DNA, 1870 bp, Homo sapiens
  source 1..1870: mol_type = unassigned DNA
agtctgatgaagattggcatcaggtgaagtctggagcaggacttctgaggctttctatcctccatgctgctcactagaaaaggggctgtgaactgtgctttggctctagcagacaggaagaaattctggcccagctggaagtagaaagaggggagtgagtctcctgaggaccatctcagaggccccgggatcacccgaacagtcctccatgtgaatcaatcccatgatgcaacatgcctccccagcccccgctctgacgatgatggccacgcagaatgtcccgcccccaccctaccaggacagcccacaggcaccctcttttcccgctcctgacgctgctgtttgagaaatgtgaacaggccacccagggctctgagtgcatcacctccgccagctttgatgtggacatcgagaactttgtccaccagcaggaacaggagcacaaacccttcttcagcgatgacccagaactggacaatctgatggtgaaggcaatccaggtcctgagaatccacctgctggagctggagaaagtcaatgaactctgcaaggacttttgtaaccgttacatcacctgcctcaaaaccaagatgcacagcgacaacctgctcaggaatgatctaggggggccctactcccccaaccagccctccatcaaccttcactcacaggacctcctgcagaattcccccaattccatgtccggagtctccaataacccccaggggattgtggtcccagcctcagcgctccagcagggcaacatcgccatgacaaccgtcaactcacaagttgtgtcaggtggagccttataccaaccggttaccatggtaacctcccagggtcaggtggtcacccaagcaatcccccagggagccatccagatccagaacacacaggttaaccttgacctcacctccctcctggacaatgaggataagaagtccaagaacaaacgaggagtcttgcccaagcatgccaccaatataatgcgttcttggctcttccagcatctcatgcacccctaccccacggaggatgagaagaggcagatcgcagcccagaccaacctcaccctcctgcaagtaaacaactggttcatcaatgcccggaggcgcatcctgcagcccatgcttgatgccagcaacccagatcctgcccccaaagccaagaagatcaagtctcagcaccggcccacccaaagattctggcccaactccatcgctgcgggggtgctgcagcagcagggcggtgccccagggacaaaccccgatggttccatcaacttggacaacctgcagtccctgtcctcagacagtgccaccatggccatgcagcaggctatgatggctgcacacgatgactcattggatgggacagaagaagaggatgaggatgagatggaagaggaggaggaggaggagctggaggaggaggtcgacgagctgcagacgacaaatgtcagcgacctgggcttggaacacagtgactccctggagtagtcgggcagcccagatggcactgatcactgagcaggagaggagtgtcgccgggaggccttcagggtgggggggaaggggacatgggcaggaagcaccgagggagttgggccctagcttccccaaatcagtagcttgaagaaaggcaaaggagacacctgttccttcccaaccaccgagcttcaatgaggaccccagccccacttccctggaactgccgaggactctgtttggcggggccagtcgagcagcctgtgtggaaagacaggagtgagatctggactcaccaaatccctgaggatagatggcacccatggcccccacccacggaaggacttgagttgtttacaagccctgcactgaggcagatt

SEQ ID NO: 21739 - DNA, 554 bp, Homo sapiens
  source 1..554: mol_type = unassigned DNA
tatctcccaggtttgctgctggggtggccgcagaaccgggagtcggtcacagagttcacagacgaggtcacatggaggagaagcctggtgccaggaacaagctaggagtaactggaccacgatgacgcctgtgctttggctctagcagacaggaagaaattctggcccagctggaagtagaaagaggggagtgagtctcctgaggaccatctcagaggccccgggatcacccgaacagtcctccatgtgaatcaatcccatgatgcaacatgcctccccagcccccgctctgacgatgatggccacgcagaatgtcccgcccccaccctaccaggacagcccacagatgacggcaaccgcccagccaccctccaaggcccaggctgtccacatctctgccccctcagctgctgccagcacacctgtgcccagtgcccccatcgacccccaggcccagctggaggctgacaagcgagctgtatacaggcaccctcttttcccgctcctgacgctgctgtttgagaaatgtgaacaggccacccagggctctgagt

SEQ ID NO: 21740 - DNA, 604 bp, Homo sapiens
  source 1..604: mol_type = unassigned DNA
aaggcactttagcaggaatctggcggcagagaggccgattgatgagatgccgaggtctgcagccccaactggaggcgccccggaagagtgagatggagtggggagggggtggaccgggcaggggaggaggcaaagagtctgtttccctggcccaaggaggccgagtggagccggcccagagatgaacgcatctgggagctgccaaggtgctttggctctagcagacaggaagaaattctggcccagctggaagtagaaagaggggagtgagtctcctgaggaccatctcagaggccccgggatcacccgaacagtcctccatgtgaatcaatcccatgatgcaacatgcctccccagcccccgctctgacgatgatggccacgcagaatgtcccgcccccaccctaccaggacagcccacagatgacggcaaccgcccagccaccctccaaggcccaggctgtccacatctctgccccctcagctgctgccagcacacctgtgcccagtgcccccatcgacccccaggcccagctggaggctgacaagcgagctgtatacagatggtgaaggcaatccaggtcctgagaatccacctgctggag

SEQ ID NO: 21741 - DNA, 1966 bp, Homo sapiens
  source 1..1966: mol_type = unassigned DNA
gccgagcgggagccgcgcgggagcagcgcagctacggcggcggcagcggcggcgcggttgcgattccgagccgttgagacgcctctgcggcagctggtggcgcaggtggcttgcgtggacgcgggtagaggcgaccggccagcaaccgcagcgtcggcgcccgcggccccggcaggcgcgtcgggacgccccgaggcatcctcccccgcccgcgggcccggtagctgggcccgcgtccgccgcccgcatccccgcgccgccgcatctcctcgccgcctcccgggcttcggacccccggtctcgcccccgaaacatgactcgcgatttcaaacctggagacctcatcttcgccaagatgaaaggttatccccattggccagctcgagtagacgaagttcctgatggagctgtaaagccacccacaaacaaactacccattttcttttttggaactcatgagactgcttttttaggaccaaaggatatatttccttactcagaaaataaggaaaagtatggcaaaccaaataaaagaaaaggttttaatgaaggtttatgggagatagataacaatccaaaagtgaaattttcaagtcaacaggcagcaactaaacaatcaaatgcatcatctgatgttgaagttgaagaaaaggaaactagtgtttcaaaggaagataccgaccatgaagaaaaagccagcaatgaggatgtgactaaagcagttgacataactactccaaaagctgccagaagggggagaaagagaaaggcagaaaaacaagtagaaactgaggaggcaggagtagtgacaacagcaacagcatctgttaatctaaaagtgagtcctaaaagaggacgacctgcagctacagaagtcaagattccaaaaccaagaggcagacccaaaatggtaaaacagccctgtccttcagagagtgacatcattactgaagaggacaaaagtaagaaaaaggggcaagaggaaaaacaacctaaaaagcagcctaagaaggatgaagagggccagaaggaagaagataagccaagaaaagagccggataaaaaagaggggaagaaagaagttgaatcaaaaaggaaaaatttagctaaaacaggggttacttcaacctccgattctgaagaagaaggagatgatcaagaaggtgaaaagaagagaaaaggtgggaggaactttcagactgctcacagaaggaatatgctgaaaggccaacatgagaaagaagcagcagatcgaaaacgcaagcaagaggaacaaatggaaactgagcattttgctctgtaaagcatttcagatgcagcttgtgtgaaatgcattatgcaaaataaagtttattgtattgtattcccagccaaacaacatgtaatctacagtaataaaaaatatatctcattttgggctcaaagcattaatccagttactgaaaagagaatacaagtggagcaaacaagagatgaagatcttgatacagactcattggactgaatttcccccttccccccattgatggaagaatgttccagattctaaattgaggacttcattattaatggcattactgtgttatgattaacaaatttcctgtaaggtacacactacatactaaggtcggccatcattcctgttttttttttttttttttttttttaaccaagcttaaaatgaagctttgtgtttgaaagtaataacaagctcagacgaagatggtggttgtacattattcatctagaaaatataaaaattcattttgttttgaagctagttattaaactggaatagcagttatatccctgagaatggggcccttctcttgacattcctttgttgtttaattctttagaatcttaataaatgtttttttaatcctgagagattaaacagtagtagacttgttaagaatgaaactgtaaccaaaattttaaaataaagttttttttaaaaaaaaaa

SEQ ID NO: 21742 - DNA, 1889 bp, Homo sapiens
  source 1..1889: mol_type = unassigned DNA
ggcgccgagcgggagccgcgcgggagcagcgcagctacggcggcggcagcggcggcgcggttgcgattccgagccgttgagacgcctctgcggcagctggtggcgcaggtggcttgcgtggacgcgggtagaggcgaccggccagcaaccgcagcgtcggcgcccgcggccccggcaggcgcgtcgggacgccccgaggcatcctcccccgcccgcgggcccggtagctgggcccgcgtccgccgcccgcatccccgcgccgccgcatctcctcgccgcctcccgggcttcggacccccggtctcgcccccgaaacatgactcgcgatttcaaacctggagacctcatcttcgccaagatgaaaggttatccccattggccagctcgagtagacgaagttcctgatggagctgtaaagccacccacaaacaaactacccattttcttttttggaactcatgagactgcttttttaggaccaaaggatatatttccttactcagaaaataaggaaaagtatggcaaaccaaataaaagaaaaggttttaatgaaggtttatgggagatagataacaatccaaaagtgaaattttcaagtcaacaggcagcaactaaacaatcaaatgcatcatctgatgttgaagttgaagaaaaggaaactagtgtttcaaaggaagataccgaccatgaagaaaaagccagcaatgaggatgtgactaaagcagttgacataactactccaaaagctgccagaagggggagaaagagaaaggcagaaaaacaagtagaaactgaggaggcaggagtagtgacaacagcaacagcatctgttaatctaaaagtgagtcctaaaagaggacgacctgcagctacagaagtcaagattccaaaaccaagaggcagacccaaaatggtaaaacagccctgtccttcagagagtgacatcattactgaagaggacaaaagtaagaaaaaggggcaagaggaaaaacaacctaaaaagcagcctaagaaggatgaagagggccagaaggaagaagataagccaagaaaagagccggataaaaaagaggggaagaaagaagttgaatcaaaaaggaaaaatttagctaaaacaggggttacttcaacctccgattctgaagaagaaggagatgatcaagaaggtgaaaagaagagaaaaggtgggaggaactttcagactgctcacagaaggaatatgctgaaaggccaacatgagaaagaagcagcagatcgaaaacgcaagcaagaggaacaaatggaaactgagcaccaaacaacatgtaatctacagtaataaaaaatatatctcattttgggctcaaagcattaatccagttactgaaaagagaatacaagtggagcaaacaagagatgaagatcttgatacagactcattggactgaatttcccccttccccccattgatggaagaatgttccagattctaaattgaggacttcattattaatggcattactgtgttatgattaacaaatttcctgtaaggtacacactacatactaaggtcggccatcattcctgttttttttttttttttttttttttaaccaagcttaaaatgaagctttgtgtttgaaagtaataacaagctcagacgaagatggtggttgtacattattcatctagaaaatataaaaattcattttgttttgaagctagttattaaactggaatagcagttatatccctgagaatggggcccttctcttgacattcctttgttgtttaattctttagaatcttaataaatgtttttttaatcctgagagattaaacagtagtagacttgttaagaatgaaactgtaaccaaaattttaaaataaagttttttttaaaaaaaaaa

SEQ ID NO: 21743 - DNA, 3391 bp, Homo sapiens
  source 1..3391: mol_type = unassigned DNA
agttggtcgcgccccagtgctagcgggcgccgagcgggagccgcgcgggagcagcgcagctacggcggcggcagcggcggcgcggttgcgattccgagccgttgagacgcctctgcggcagctggtggcgcaggtggcttgcgtggacgcgggtagaggcgaccggccagcaaccgcagcgtcggcgcccgcggccccggcagcaggcgcgtcgggacgccccgaggcatcctcccccgcccgcgggcccggtagctgggcccgcgtccgccgcccgcatccccgcgccgccgcatctcctcgccgcctcccgggcttcggacccccggtctcgcccccgaaacatgactcgcgatttcaaacctggagacctcatcttcgccaagatgaaaggttatccccattggccagctcgagtagacgaagttcctgatggagctgtaaagccacccacaaacaaactacccattttcttttttggaactcatgagactgcttttttaggaccaaaggatatatttccttactcagaaaataaggaaaagtatggcaaaccaaataaaagaaaaggttttaatgaaggtttatgggagatagataacaatccaaaagtgaaattttcaagtcaacaggcagcaactaaacaatcaaatgcatcatctgatgttgaagttgaagaaaaggaaactagtgtttcaaaggaagataccgaccatgaagaaaaagccagcaatgaggatgtgactaaagcagttgacataactactccaaaagctgccagaagggggagaaagagaaaggcagaaaaacaagtagaaactgaggaggcaggagtagtgacaacagcaacagcatctgttaatctaaaagtgagtcctaaaagaggacgacctgcagctacagaagtcaagattccaaaaccaagaggcagacccaaaatggtaaaacagccctgtccttcagagagtgacatcattactgaagaggacaaaagtaagaaaaaggggcaagaggaaaaacaacctaaaaagcagcctaagaaggatgaagagggccagaaggaagaagataagccaagaaaagagccggataaaaaagaggggaagaaagaagttgaatcaaaaaggaaaaatttagctaaaacaggggttacttcaacctccgattctgaagaagaaggagatgatcaagaaggtgaaaagaagagaaaaggtgggaggaactttcagactgctcacagaaggaatatgctgaaaggccaacatgagaaagaagcagcagatcgaaaacgcaagcaagaggaacaaatggaaactgagcagcagaataaagatgaaggaaagaagccagaagttaagaaagtggagaagaagcgagaaacatcaatggattctcgacttcaaaggatacatgctgagattaaaaattcactcaaaattgataatcttgatgtgaacagatgcattgaggccttggatgaacttgcttcacttcaggtcacaatgcaacaagctcagaaacacacagagatgattactacactgaaaaaaatacggcgattcaaagttagtcaggtaatcatggaaaagtctacaatgttgtataacaagtttaagaacatgttcttggttggtgaaggagattccgtgatcacccaagtgctgaataaatctcttgctgaacaaagacagcatgaggaagcgaataaaaccaaagatcaagggaagaaagggccaaacaaaaagctagagaaggaacaaacagggtcaaagactctaaatggaggatctgatgctcaagatggtaatcagccacaacataacggggagagcaatgaagacagcaaagacaaccatgaagccagcacgaagaaaaagccatccagtgaagagagagagactgaaatatctctgaaggattctacactagataactaggttgacatacctggaatatagagaacacttgagaagtttgtaatggttttcatttgaaatagactgctgaaagttttaaatttttataagcataggtttgatgttgaaaacttgttttgagggagaaaatccctttgttttaaagtaaagtaaacattatcgctaagtgtacttgtgcagtattaacagctacattatacagtaaatgtgggataaaatccatttagaaaatgttaaactgcttttccagacatggttgtagcatattttcaattagtgtgtgtatgttaatgtgtaattgatagtagaacaaagttacatttttaaaactgctacttgtataaaccttgcctcttttcccaaatactgtgggttttgtgcatagtttttacaaaccttggatttaccagactgtcttttcactgtttgtgggttttgtagaagttacacatttttatggtagataaaatgttacttctatacaagtactcactccctttttatcaaaagttaattttaatctcacagtctacattgtgctacattatccagcttctttggaacaatgtgtgctctgtatggttttttttggtatgacaactaattaagcaactgacatggaactgagaattctacaaactataaaacattaatttttgaaggtaatttagttttgtggctgggcattcagtgaagtcttaggacttctttgcagacaactgactgggtatatataggaatgaatctggctttagggttaaatcatttaaggtccttttataggcaggcactagtaactaaaactgaaaactaagtaagtttatttttgaggaatgttgttaaaaatgtctttaggaagtcactaaaacttaattggaagaaaaaatcatgatgcttatacaataaatatgaataaatgttatataaggaaactcacctatttgaaatcatggctatattgtttttattttctagattccaaaaatacaaacactagttgttccagcattgtactttgataagtctgtacattgacgtgtatggactaaatccagggtaaaatcaatgttacaaaatttaagggtatgttaactaaaggatagcatttctaagatattttgaatattagggtcatttggcacttctcagcaagtaggatacttctcatgttttgaaattatatgaatatggaaaaaaatggcttaagaccagcgtctctgtatgacattgtgtggttgaccctctgagataactgttttcatctacagaattgcatttttgcttttaaagaggtcttataatggaactaggaatcaccgttttgagagaacctgcatatataccagtcattatctgtttggtccttatacagttttaacttacttagatttattctagttaagccataagttcaacgtgtaaacttgttttcattaaagaatttttctatcaaa

SEQ ID NO: 21744 - DNA, 3364 bp, Homo sapiens
  source 1..3364: mol_type = unassigned DNA
gggcgccgagcgggagccgcgcgggagcagcgcagctacggcggcggcagcggcggcgcggttgcgattccgagccgttgagacgcctctgcggcagctggtggcgcaggtggcttgcgtggacgcgggtagaggcgaccggccagcaaccgcagcgtcggcgcccgcggccccggcaggcgcgtcgggacgccccgaggcatcctcccccgcccgcgggcccggtagctgggcccgcgtccgccgcccgcatccccgcgccgccgcatctcctcgccgcctcccgggcttcggacccccggtctcgcccccgaaacatgactcgcgatttcaaacctggagacctcatcttcgccaagatgaaaggttatccccattggccagctcgagtagacgaagttcctgatggagctgtaaagccacccacaaacaaactacccattttcttttttggaactcatgagactgcttttttaggaccaaaggatatatttccttactcagaaaataaggaaaagtatggcaaaccaaataaaagaaaaggttttaatgaaggtttatgggagatagataacaatccaaaagtgaaattttcaagtcaacaggcagcaactaaacaatcaaatgcatcatctgatgttgaagttgaagaaaaggaaactagtgtttcaaaggaagataccgaccatgaagaaaaagccagcaatgaggatgtgactaaagcagttgacataactactccaaaagctgccagaagggggagaaagagaaaggcagaaaaacaagtagaaactgaggaggcaggagtagtgacaacagcaacagcatctgttaatctaaaagtgagtcctaaaagaggacgacctgcagctacagaagtcaagattccaaaaccaagaggcagacccaaaatggtaaaacagccctgtccttcagagagtgacatcattactgaagaggacaaaagtaagaaaaaggggcaagaggaaaaacaacctaaaaagcagcctaagaaggatgaagagggccagaaggaagaagataagccaagaaaagagccggataaaaaagaggggaagaaagaagttgaatcaaaaaggaaaaatttagctaaaacaggggttacttcaacctccgattctgaagaagaaggagatgatcaagaaggtgaaaagaagagaaaaggtgggaggaactttcagactgctcacagaaggaatatgctgaaaggccaacatgagaaagaagcagcagatcgaaaacgcaagcaagaggaacaaatggaaactgagcagcagaataaagatgaaggaaagaagccagaagttaagaaagtggagaagaagcgagaaacatcaatggattctcgacttcaaaggatacatgctgagattaaaaattcactcaaaattgataatcttgatgtgaacagatgcattgaggccttggatgaacttgcttcacttcaggtcacaatgcaacaagctcagaaacacacagagatgattactacactgaaaaaaatacggcgattcaaagttagtcaggtaatcatggaaaagtctacaatgttgtataacaagtttaagaacatgttcttggttggtgaaggagattccgtgatcacccaagtgctgaataaatctcttgctgaacaaagacagcatgaggaagcgaataaaaccaaagatcaagggaagaaagggccaaacaaaaagctagagaaggaacaaacagggtcaaagactctaaatggaggatctgatgctcaagatggtaatcagccacaacataacggggagagcaatgaagacagcaaagacaaccatgaagccagcacgaagaaaaagccatccagtgaagagagagagactgaaatatctctgaaggattctacactagataactaggttgacatacctggaatatagagaacacttgagaagtttgtaatggttttcatttgaaatagactgctgaaagttttaaatttttataagcataggtttgatgttgaaaacttgttttgagggagaaaatccctttgttttaaagtaaagtaaacattatcgctaagtgtacttgtgcagtattaacagctacattatacagtaaatgtgggataaaatccatttagaaaatgttaaactgcttttccagacatggttgtagcatattttcaattagtgtgtgtatgttaatgtgtaattgatagtagaacaaagttacatttttaaaactgctacttgtataaaccttgcctcttttcccaaatactgtgggttttgtgcatagtttttacaaaccttggatttaccagactgtcttttcactgtttgtgggttttgtagaagttacacatttttatggtagataaaatgttacttctatacaagtactcactccctttttatcaaaagttaattttaatctcacagtctacattgtgctacattatccagcttctttggaacaatgtgtgctctgtatggttttttttggtatgacaactaattaagcaactgacatggaactgagaattctacaaactataaaacattaatttttgaaggtaatttagttttgtggctgggcattcagtgaagtcttaggacttctttgcagacaactgactgggtatatataggaatgaatctggctttagggttaaatcatttaaggtccttttataggcaggcactagtaactaaaactgaaaactaagtaagtttatttttgaggaatgttgttaaaaatgtctttaggaagtcactaaaacttaattggaagaaaaaatcatgatgcttatacaataaatatgaataaatgttatataaggaaactcacctatttgaaatcatggctatattgtttttattttctagattccaaaaatacaaacactagttgttccagcattgtactttgataagtctgtacattgacgtgtatggactaaatccagggtaaaatcaatgttacaaaatttaagggtatgttaactaaaggatagcatttctaagatattttgaatattagggtcatttggcacttctcagcaagtaggatacttctcatgttttgaaattatatgaatatggaaaaaaatggcttaagaccagcgtctctgtatgacattgtgtggttgaccctctgagataactgttttcatctacagaattgcatttttgcttttaaagaggtcttataatggaactaggaatcaccgttttgagagaacctgcatatataccagtcattatctgtttggtccttatacagttttaacttacttagatttattctagttaagccataagttcaacgtgtaaacttgttttcattaaagaatttttctatcaaa

SEQ ID NO: 21745 - DNA, 1664 bp, Homo sapiens
  source 1..1664: mol_type = unassigned DNA
cgggcccggtagctgggcccgcgtccgccgcccgcatccccgcgccgccgcatctcctcgccgcctcccgggcttcggacccccggtctcgcccccgaaacatgactcgcgatttcaaacctggagacctcatcttcgccaagatgaaaggttatccccattggccagctcgagtagacgaagttcctgatggagctgtaaagccacccacaaacaaactacccattttcttttttggaactcatgagactgcttttttaggaccaaaggatatatttccttactcagaaaataaggaaaagtatggcaaaccaaataaaagaaaaggttttaatgaaggtttatgggagatagataacaatccaaaagtgaaattttcaagtcaacaggcagcaactaaacaatcaaatgcatcatctgatgttgaagttgaagaaaaggaaactagtgtttcaaaggaagataccgaccatgaagaaaaagccagcaatgaggatgtgactaaagcagttgacataactactccaaaagctgccagaagggggagaaagagaaaggcagaaaaacaagtagaaactgaggaggcaggagtagtgacaacagcaacagcatctgttaatctaaaagtgagtcctaaaagaggacgacctgcagctacagaagtcaagattccaaaaccaagaggcagacccaaaatggtaaaacagccctgtccttcagagagtgacatcattactgaagaggacaaaagtaagaaaaaggggcaagaggaaaaacaacctaaaaagcagcctaagaaggatgaagagggccagaaggaagaagataagccaagaaaagagccggataaaaaagaggggaagaaagaagttgaatcaaaaaggaaaaatttagctaaaacaggggttacttcaacctccgattctgaagaagaaggagatgatcaagaaggtgaaaagaagagaaaaggtgggaggaactttcagactgctcacagaaggaatatgctgaaaggccaacatgagaaagaagcagcagatcgaaaacgcaagcaagaggaacaaatggaaactgagcaccaaacaacatgtaatctacagtaataaaaaatatatctcattttgggctcaaagcattaatccagttactgaaaagagaatacaagtggagcaaacaagagatgaagatcttgatacagactcattggactgaatttcccccttccccccattgatggaagaatgttccagattctaaattgaggacttcattattaatggcattactgtgttatgattaacaaatttcctgtaaggtacacactacatactaaggtcggccatcattcctgttttttttttttttttttttttttaaccaagcttaaaatgaagctttgtgtttgaaagtaataacaagctcagacgaagatggtggttgtacattattcatctagaaaatataaaaattcattttgttttgaagctagttattaaactggaatagcagttatatccctgagaatggggcccttctcttgacattcctttgttgtttaattctttagaatcttaataaatgtttttttaatcctgagagattaaacagtagtagacttgttaagaatgaaactgtaaccaaaattttaaaataaagtttttttt

SEQ ID NO: 21746 - DNA, 1786 bp, Homo sapiens
  source 1..1786: mol_type = unassigned DNA
gtagggggtggcgctctccgttcggcggcgctcccatggcgcacattaccattaaccagtacctgcagcaggtgtacgaagccatcgacagcagagatggagcatcttgtgcagagttggtgtcttttaaacatcctcatgttgcaaacccacgacttcaaatggcctctccagaggagaagtgtcaacaagtcttggaacccccttatgatgaaatgtttgcagctcatttaaggtgcacttatgcagtggggaatcatgacttcatagaggcatacaagtgccagaccgtgatagtccaatatcctttgtcgttcatggcagctgtcccgcatagaacacatgcagtggattacttgggacttgagacccggaaacactgggccagttgctcatttctgcagttagaaaggaatgacagtgttttggaacagaagctcgtttcagctctttcacttggtacatcattcttgcgagcattccaggcccacaaagaagaaaactgggctctgcctgtcatgtatgcagtagcgcttgaccttcgagtgtttgccaataatgcagatcaacagttggtaaagaaaggaaaaagcaaagttggggacatgttggaaaaagcagcagagttactgatgagctgtttccgggtctgtgccagcgacacccgtgctggtatagaggactctaagaagtggggcatgctgtttctggtgaaccagctgtttaaaatctacttcaagatcaacaaactccatttatgtaaacccctaattagagcaattgacagctcaaacctgaaagacgattacagcactgcacagagagtaacatacaaatactacgttggacgcaaggctatgtttgacagcgattttaagcaagctgaggagtacctgtcatttgcctttgagcattgtcaccgttctagtcagaagaacaaaaggatgattctgatctatttgcttccagtaaaaatgctattgggtcacatgcccactgtggagctcctgaaaaagtatcacctgatgcagtttgcggaagtaaccagagctgtgagcgagggcaacctgctgctgctgcacgaggcgctggcgaagcacgaggccttcttcattcgctgcggaatcttcctcatcctggagaagctgaagatcatcacctacaggaacctctttaagaaagtgtatttgttactgaaaacacaccagctgtctctggatgcttttctggttgccttgaagttcatgcaggtggaggacgtggacattgacgaagttcagtgtattctggctaacttgatatacatgggacacgtcaaaggctacatatcgcatcagcatcagaagctggtggtcagcaagcagaacccatttcctcccctgtccacggtgtgttgaaagtacacggagccccgaggacggactcggctggttctggagtctttgtgagacttctttgaaggaggctttgcgtgaaggctgctcggctcacttttcctaagtgtggttcctgaaggctgtctttgtaactttttgtagttctttgtgtaaaaagcgtattctgaatttatacacatggcatgttcttcattatatcttccaggatacatctatttttatatattaaatttgaatgtgttatcaaaatgcttggttaacttaaggcacctttttaaaagcagaatttaatttgatttaaattttccagattttatagcttgcctgtatggatgctcctcaatttatgatagggttacatcccaataaacttattttatttgcctttg

SEQ ID NO: 21747 - DNA, 1584 bp, Homo sapiens
  source 1..1584: mol_type = unassigned DNA
atgcgtctgacagatgttgttcaacagcttgtgtacgaagccatcgacagcagagatggagcatcttgtgcagagttggtgtcttttaaacatcctcatgttgcaaacccacgacttcaaatggcctctccagaggagaagtgtcaacaagtcttggaacccccttatgatgaaatgtttgcagctcatttaaggtgcacttatgcagtggggaatcatgacttcatagaggcatacaagtgccagaccgtgatagtccaatatacatcattcttgcgagcattccaggcccacaaagaagaaaactgggctctgcctgtcatgtatgcagtagcgcttgaccttcgagtgtttgccaataatgcagatcaacagttggtaaagaaaggaaaaagcaaagttggggacatgttggaaaaagcagcagagttactgatgagctgtttccgggtctgtgccagcgacacccgtgctggtatagaggactctaagaagtggggcatgctgtttctggtgaaccagctgtttaaaatctacttcaagatcaacaaactccatttatgtaaacccctaattagagcaattgacagctcaaacctgaaagacgattacagcactgcacagagagtaacatacaaatactacgttggacgcaaggctatgtttgacagcgattttaagcaagctgaggagtacctgtcatttgcctttgagcattgtcaccgttctagtcagaagaacaaaaggatgattctgatctatttgcttccagtaaaaatgctattgggtcacatgcccactgtggagctcctgaaaaagtatcacctgatgcagtttgcggaagtaaccagagctgtgagcgagggcaacctgctgctgctgcacgaggcgctggcgaagcacgaggccttcttcattcgctgcggaatcttcctcatcctggagaagctgaagatcatcacctacaggaacctctttaagaaagtgtatttgttactgaaaacacaccagctgtctctggatgcttttctggttgccttgaagttcatgcaggtggaggacgtggacattgacgaagttcagtgtattctggctaacttgatatacatgggacacgtcaaaggctacatatcgcatcagcatcagaagctggtggtcagcaagcagaacccatttcctcccctgtccacggtgtgttgaaagtacacggagccccgaggacggactcggctggttctggagtctttgtgagacttctttgaaggaggctttgcgtgaaggctgctcggctcacttttcctaagtgtggttcctgaaggctgtctttgtaactttttgtagttctttgtgtaaaaagcgtattctgaatttatacacatggcatgttcttcattatatcttccaggatacatctatttttatatattaaatttgaatgtgttatcaaaatgcttggttaacttaaggcacctttttaaaagcagaatttaatttgatttaaattttccagattttatagcttgcctgtatggatgctcctcaatttatgatagggttacatcccaataaacttattttatttgc

SEQ ID NO: 21748 - DNA, 1898 bp, Homo sapiens
  source 1..1898: mol_type = unassigned DNA
ggaccgagggccggaagtgacgccagctggcccgcttgaggcgtagggggtggcgctctccgttcggcggcgctcccatggcgcacattaccattaaccagtacctgcagcaggtgtacgaagccatcgacagcagagatggagcatcttgtgcagagttggtgtcttttaaacatcctcatgttgcaaacccacgacttcaaatggcctctccagaggagaagtgtcaacaagtcttggaacccccttatgatgaaatgtttgcagctcatttaaggtgcacttatgcagtggggaatcatgacttcatagaggcatacaagtgccagaccgtgatagtccaatcattcttgcgagcattccaggcccacaaagaagaaaactgggctctgcctgtcatgtatgcagtagcgcttgaccttcgagtgtttgccaataatgcagatcaacagttggtaaagaaaggaaaaagcaaagttggggacatgttggaaaaagcagcagagttactgatgagctgtttccgggtctgtgccagcgacacccgtgctggtatagaggactctaagaagtggggcatgctgtttctggtgaaccagctgtttaaaatctacttcaagatcaacaaactccatttatgtaaacccctaattagagcaattgacagctcaaacctgaaagacgattacagcactgcacagagagtaacatacaaatactacgttggacgcaaggctatgtttgacagcgattttaagcaagctgaggagtacctgtcatttgcctttgagcattgtcaccgttctagtcagaagaacaaaaggatgattctgatctatttgcttccagtaaaaatgctattgggtcacatgcccactgtggagctcctgaaaaagtatcacctgatgcagtttgcggaagtaaccagagctgtgagcgagggcaacctgctgctgctgcacgaggcgctggcgaagcacgaggccttcttcattcgctgcggaatcttcctcatcctggagaagctgaagatcatcacctacaggaacctctttaagaaagtgtatttgttactgaaaacacaccagctgtctctggatgcttttctggttgccttgaagttcatgcaggtggaggacgtggacattgacgaagttcagtgtattctggctaacttgatatacatgggacacgtcaaaggctacatatcgcatcagcatcagaagctggtggtcagcaagcagaacccatttcctcccctgtccacggtgtgttgaaagtacacggagccccgaggacgggtgagcagttgtttctttccactttggttgtgctgatgagaccggtccggtactgcaacaaggctccctgaagccggaactcttggaggcgcttttcccagggatgctgaggctgagattttcagcacacccgagttaatctccttcatttgtaactaatttcagcctgatgaaaacctggaattcctttttcacagactcggctggttctggagtctttgtgagacttctttgaaggaggctttgcgtgaaggctgctcggctcacttttcctaagtgtggttcctgaaggctgtctttgtaactttttgtagttctttgtgtaaaaagcgtattctgaatttatacacatggcatgttcttcattatatcttccaggatacatctatttttatatattaaatttgaatgtgttatcaaaatgcttggttaacttaaggcacctttttaaaagcagaatttaatttgatttaaattttccagattttatagcttgcctgtatggatgctcctcaatttatgatagggttacatcccaataaacttattttatttgcctttgctttgttggttaaaaaaaaatttcttttaaaaaac

SEQ ID NO: 21749 - DNA, 1555 bp, Homo sapiens
  source 1..1555: mol_type = unassigned DNA
gaggcgtagggggtggcgctctccgttcggcggcgctcccatggcgcacattaccattaaccagtacctgcagcaggtgtacgaagccatcgacagcagagatggagcatcttgtgcagagttggtgtcttttaaacatcctcatgttgcaaacccacgacttcaaatggcctctccagaggagaagtgtcaacaagtcttggaacccccttatgatgaaatgtttgcagctcatttaaggtgcacttatgcagtggggaatcatgacttcatagaggcatacaagtgccagaccgtgatagtccaatatcctttgtcgttcatggcagctgtcgcagatcaacagttggtaaagaaaggaaaaagcaaagttggggacatgttggaaaaagcagcagagttactgatgagctgtttccgggtctgtgccagcgacacccgtgctggtatagaggactctaagaagtggggcatgctgtttctggtgaaccagctgtttaaaatctacttcaagatcaacaaactccatttatgtaaacccctaattagagcaattgacagctcaaacctgaaagacgattacagcactgcacagagagtaacatacaaatactacgttggacgcaaggctatgtttgacagcgattttaagcaagctgaggagtacctgtcatttgcctttgagcattgtcaccgttctagtcagaagaacaaaaggatgattctgatctatttgcttccagtaaaaatgctattgggtcacatgcccactgtggagctcctgaaaaagtatcacctgatgcagtttgcggaagtaaccagagctgtgagcgagggcaacctgctgctgctgcacgaggcgctggcgaagcacgaggccttcttcattcgctgcggaatcttcctcatcctggagaagctgaagatcatcacctacaggaacctctttaagaaagtgtatttgttactgaaaacacaccagctgtctctggatgcttttctggttgccttgaagttcatgcaggtggaggacgtggacattgacgaagttcagtgtattctggctaacttgatatacatgggacacgtcaaaggctacatatcgcatcagcatcagaagctggtggtcagcaagcagaacccatttcctcccctgtccacggtgtgttgaaagtacacggagccccgaggacggactcggctggttctggagtctttgtgagacttctttgaaggaggctttgcgtgaaggctgctcggctcacttttcctaagtgtggttcctgaaggctgtctttgtaactttttgtagttctttgtgtaaaaagcgtattctgaatttatacacatggcatgttcttcattatatcttccaggatacatctatttttatatattaaatttgaatgtgttatcaaaatgcttggttaacttaaggcacctttttaaaagcagaatttaatttgatttaaattttccagattttatagcttgcctgtatggatgctcctcaatttatgatagggttacatcccaataaacttattttatttgc

SEQ ID NO: 21750 - DNA, 1654 bp, Homo sapiens
  source 1..1654: mol_type = unassigned DNA
gggggtggcgctctccgttcggcggcgctcccatggcgcacattaccattaaccagtacctgcagcaggtgtacgaagccatcgacagcagagatggagcatcttgtgcagagttggtgtcttttaaacatcctcatgttgcaaacccacgacttcaaatggcctctccagaggagaagtgtcaacaagtcttggaacccccttatgatgaaatgtttgcagctcatttaaggtgcacttatgcagtggggaatcatgacttcatagaggcatacaagtgccagaccgtgatagtccaatcattcttgcgagcattccaggcccacaaagaagaaaactgggctctgcctgtcatgtatgcagtagcgcttgaccttcgagtgtttgccaataatgcagatcaacagttggtaaagaaaggaaaaagcaaagttggggacatgttggaaaaagcagcagagttactgatgagctgtttccgggtctgtgccagcgacacccgtgctggtatagaggactctaagaagtggggcatgctgtttctggtgaaccagctgtttaaaatctacttcaagatcaacaaactccatttatgtaaacccctaattagagcaattgacagctcaaacctgaaagacgattacagcactgcacagagagtaacatacaaatactacgttggacgcaaggctatgtttgacagcgattttaagcaagctgaggagtacctgtcatttgcctttgagcattgtcaccgttctagtcagaagaacaaaaggatgattctgatctatttgcttccagtaaaaatgctattgggtcacatgcccactgtggagctcctgaaaaagtatcacctgatgcagtttgcggaagtaaccagagctgtgagcgagggcaacctgctgctgctgcacgaggcgctggcgaagcacgaggccttcttcattcgctgcggaatcttcctcatcctggagaagctgaagatcatcacctacaggaacctctttaagaaagtgtatttgttactgaaaacacaccagctgtctctggatgcttttctggttgccttgaagttcatgcaggtggaggacgtggacattgacgaagttcagtgtattctggctaacttgatatacatgggacacgtcaaaggctacatatcgcatcagcatcagaagctggtggtcagcaagcagaacccatttcctcccctgtccacggtgtgttgaaagtacacggagccccgaggacggcctgatgaaaacctggaattcctttttcacagactcggctggttctggagtctttgtgagacttctttgaaggaggctttgcgtgaaggctgctcggctcacttttcctaagtgtggttcctgaaggctgtctttgtaactttttgtagttctttgtgtaaaaagcgtattctgaatttatacacatggcatgttcttcattatatcttccaggatacatctatttttatatattaaatttgaatgtgttatcaaaatgcttggttaacttaaggcacctttttaaaagcagaatttaatttgatttaaattttccagattttatagcttgcctgtatggatgctcctcaatttatgatagggttacatcccaataaacttattttatttgcctttgc

SEQ ID NO: 21751 - DNA, 1671 bp, Homo sapiens
  source 1..1671: mol_type = unassigned DNA
agacggaccgagggccggaagtgacgccagctggcccgcttgaggcgtagggggtggcgctctccgttcggcggcgctcccatggcgcacattaccattaaccagtacctgcagcaggtgtacgaagccatcgacagcagagatggagcatcttgtgcagagttggtgtcttttaaacatcctcatgttgcaaacccacgacttcaaatggcctctccagaggagaagtgtcaacaagtcttggaacccccttatgatgaaatgtttgcagctcatttaaggtgcacttatgcagtggggaatcatgacttcatagaggcatacaagtgccagaccgtgatagtccaatcattcttgcgagcattccaggcccacaaagaagaaaactgggctctgcctgtcatgtatgcagtagcgcttgaccttcgagtgtttgccaataatgcagatcaacagttggtaaagaaaggaaaaagcaaagttggggacatgttggaaaaagcagcagagttactgatgagctgtttccgggtctgtgccagcgacacccgtgctggtatagaggactctaagaagtggggcatgctgtttctggtgaaccagctgtttaaaatctacttcaagatcaacaaactccatttatgtaaacccctaattagagcaattgacagctcaaacctgaaagacgattacagcactgcacagagagtaacatacaaatactacgttggacgcaaggctatgtttgacagcgattttaagcaagctgaggagtacctgtcatttgcctttgagcattgtcaccgttctagtcagaagaacaaaaggatgattctgatctatttgcttccagtaaaaatgctattgggtcacatgcccactgtggagctcctgaaaaagtatcacctgatgcagtttgcggaagtaaccagagctgtgagcgagggcaacctgctgctgctgcacgaggcgctggcgaagcacgaggccttcttcattcgctgcggaatcttcctcatcctggagaagctgaagatcatcacctacaggaacctctttaagaaagtgtatttgttactgaaaacacaccagctgtctctggatgcttttctggttgccttgaagttcatgcaggtggaggacgtggacattgacgaagttcagtgtattctggctaacttgatatacatgggacacgtcaaaggctacatatcgcatcagcatcagaagctggtggtcagcaagcagaacccatttcctcccctgtccacggtgtgttgaaagtacacggagccccgaggacggactcggctggttctggagtctttgtgagacttctttgaaggaggctttgcgtgaaggctgctcggctcacttttcctaagtgtggttcctgaaggctgtctttgtaactttttgtagttctttgtgtaaaaagcgtattctgaatttatacacatggcatgttcttcattatatcttccaggatacatctatttttatatattaaatttgaatgtgttatcaaaatgcttggttaacttaaggcacctttttaaaagcagaatttaatttgatttaaattttccagattttatagcttgcctgtatggatgctcctcaatttatgatagggttacatcccaataaacttattttatttgcctttgc

SEQ ID NO: 21752 - DNA, 2372 bp, Homo sapiens
  source 1..2372: mol_type = unassigned DNA
gttcggcggcgctcccatggcgcacattaccattaaccagtacctgcagcaggtgggtcctagccggggagcgcgcggcggcgtggttggccctcggcgtgttccgtgtgtcccctcctgccttggaccctcaggccttttcctttcccgcctcgccacccttcttccgttcgggtccccggcgggcagccgcgcgagccgaacagcggcggccgggactcgggaaggcggcccgagttctcccctgcagggccgccgtgggggccgggcggtgtccgtggatcgcggagtcgtcgcggtgtaagtagacgcggcggtcccaggtcgctgccctcacttgctggcacgtgtggccgcgctcccaggcggtccgaagggcctgcgggccacgccgagggcccgctgtgggcggtgctgtgtcggatggacgctgtttcccagcaggatgcgggatgaattcggggactccaggaggcgatggaggagtaagcgcgaggctgtggccgtgctgcaggccgggctcgtgcccctcgtcctcgctgtcgtttaacgcccttcactctccgagcacaatgcacacttcatatcgctcggtacatgcgtctgacagatgttgttcaacagcttgtgtacgaagccatcgacagcagagatggagcatcttgtgcagagttggtgtcttttaaacatcctcatgttgcaaacccacgacttcaaatggcctctccagaggagaagtgtcaacaagtcttggaacccccttatgatgaaatgtttgcagctcatttaaggtgcacttatgcagtggggaatcatgacttcatagaggcatacaagtgccagaccgtgatagtccaatcattcttgcgagcattccaggcccacaaagaagaaaactgggctctgcctgtcatgtatgcagtagcgcttgaccttcgagtgtttgccaataatgcagatcaacagttggtaaagaaaggaaaaagcaaagttggggacatgttggaaaaagcagcagagttactgatgagctgtttccgggtctgtgccagcgacacccgtgctggtatagaggactctaagaagtggggcatgctgtttctggtgaaccagctgtttaaaatctacttcaagatcaacaaactccatttatgtaaacccctaattagagcaattgacagctcaaacctgaaagacgattacagcactgcacagagagtaacatacaaatactacgttggacgcaaggctatgtttgacagcgattttaagcaagctgaggagtacctgtcatttgcctttgagcattgtcaccgttctagtcagaagaacaaaaggatgattctgatctatttgcttccagtaaaaatgctattgggtcacatgcccactgtggagctcctgaaaaagtatcacctgatgcagtttgcggaagtaaccagagctgtgagcgagggcaacctgctgctgctgcacgaggcgctggcgaagcacgaggccttcttcattcgctgcggaatcttcctcatcctggagaagctgaagatcatcacctacaggaacctctttaagaaagtgtatttgttactgaaaacacaccagctgtctctggatgcttttctggttgccttgaagttcatgcaggtggaggacgtggacattgacgaagttcagtgtattctggctaacttgatatacatgggacacgtcaaaggctacatatcgcatcagcatcagaagctggtggtcagcaagcagaacccatttcctcccctgtccacggtgtgttgaaagtacacggagccccgaggacgggtgagcagttgtttctttccactttggttgtgctgatgagaccggtccggtactgcaacaaggctccctgaagccggaactcttggaggcgcttttcccagggatgctgaggctgagattttcagcacacccgagttaatctccttcatttgtaactaatttcagcctgatgaaaacctggaattcctttttcacagactcggctggttctggagtctttgtgagacttctttgaaggaggctttgcgtgaaggctgctcggctcacttttcctaagtgtggttcctgaaggctgtctttgtaactttttgtagttctttgtgtaaaaagcgtattctgaatttatacacatggcatgttcttcattatatcttccaggatacatctatttttatatattaaatttgaatgtgttatcaaaatgcttggttaacttaaggcacctttttaaaagcagaatttaatttgatttaaattttccagattttatagcttgcctgtatggatgctcctcaatttatgatagggttacatcccaataaacttattttatttgc

SEQ ID NO: 21753 - DNA, 2546 bp, Homo sapiens
  source 1..2546: mol_type = unassigned DNA
ctcacttccggtgggtggcaggcagggccacgcgtcttcccgaacggagagactaggggcgttgttgcctggcagcagacgggcaagcctggacttaggcggcgcgcaggacggtccgacttcgtgcggaggcctccctgaggtccgggtccttgcggccactgcggccactgaagcggcggcggcggctggcccaggaggaagaagtcgagcccaagctatttccggttccggtgtcagttcgaggcgccgccgccgccgccgcagccgccggagccgcaatgcctaaaggaggaagaaagggaggccacaaaggccgggcgaggcagtatacaagccctgaggagatcgacgcgcagctgcaggctgagaagcagaaggccagggaagaagaggagcaaaaagaaggtggagatggggctgcaggtgaccccaaaaaggagaagaaatctctagactcagatgagagtgaggatgaagaagatgactaccagcaaaagcgcaaaggcgttgaagggctcatcgacatcgagaaccccaaccgggtggcacagacaaccaaaaaggtcacacaactggatctggacgggccaaaggagctttcgaggagagaacgagaagagattgagaagcagaaggcaaaagagcgttacatgaaaatgcacttggccgggaagacagagcaagccaaggctgacctggcccggctggccatcatccggaaacagcgggaggaggctgcccggaagaaggaagaggaaaggaaagcaaaagacgatgccacattgtcaggaaaacgaatgcagtcactctccctgaataagtaactgcgacccgtgggaggagatgccggggacctgggccgcgctgccaggacctctgctgtgtctcgcccaccctgtgccctggcgccgctgcaacagcccctcatggccaggagccccccatggcctggggcctcctcttcatcttggcacagaaattgtttgggggatggggggggggactgggggaggggtagctgctatctttgagacagaaagatgcaggacagcatttcatatgtaaccatttgaatgtttttgctgtttttagaattcagagcccttgctggggggtgcctgggagatggggtaagaagagctttcatttgtctggtagatagatagcatgtaagggggtggttgtcccaggaggcagctgctgacaggtttgctacacacagccccggactgtgttgcctgggtgctcattcagagaggggctatcatctgggagcctgtgcccctgggtcctcgagggtcatggcttgtccctggtcagtcctgtctgactgacctcagggcctcacctctctgcccttccctgcccggttcctactcacctggctagggccagtgcccattttcagccctacccattgatcatttcaagaaacctctgtttactgtgtggcacccaggcaaaacatgctccacaaattcaacttgtatatttggcagattaaacttgacattatcgtaatctttgttttggcaatccatcctttggcttccgtgctcgagccgtttttacccagctgggtacggtgccacgttcaggcacgtgcacccggcaaggttcagggcacatacctacctggggcatgacatctgtcaggtggcaccgagcaggatgcggggatggaccctagataccacagcctgccccctcccctcctttagccaagtcaggatcttaggcctcagcaggcagggacccttccaggccacagtaggctgaagcagcaccaggatcctggcctggcctggcctgtaggtgtcccctggtggttataattctgtaactctaggggagaaggggaatagcactagcattggatgtcgccaaggcccacattttcctgagagaagccacaaaagatgtgcaaatgcccttcagcacaggacctggtgacatgacataaactccaagacagaacctcagtttacagcacacgaaaaaaatatcttgccaacattgtaatgacaaaataaattcccgtgaagttccacaaccaggccgggcatggtggctcatgcctgtaatcccagcactttgggaggtgaggtgggtggatcatctgaggtcaggagttcaagaccagcctggccaacatggagaaactccgtctctactaaaaatacaaaaattaaccaggcttggtggtgtatgcctgtaatcccagctacttgggaggctgaggcaggagaatcgcttgatcccaggaaggcagaggtggcagtgagctgagaacgcacaactgcactccagcctgggtgacgagcaaaactccatctcaaaacaaaagttccacaaccagcctggagtgtgtagcccctttgtccaggaatttgactagtcaatcagtgacacctggtactggcagttttgggagtggcagcccaggatggacagcagtggggagggaaccatttggcataaggccgttgggcttcaggatcaattttgttggcaagcagtaaaaataagctatctacctatgg

SEQ ID NO: 21754 - DNA, 2566 bp, Homo sapiens
  source 1..2566: mol_type = unassigned DNA
gcgagctgcccgataatggcggcctgcagagcccatgagagggagaagcggcagcgtctaccctgagaaacctcgaccttgaagatggtgagtagccagccaaagtacgatctaatacgggaggtaggccgaggtagttacggtgttgtgtatgaagcagtcatcagaaagacctctgcacgggtggcagtgaagaaaattcgatgtcacgcacctgaaaatgttgaactagcccttcgtgagttctgggcactaagcagtatcaagagccaacatccaaatgtgattcacttggaggaatgcatcctacaaaaggatgggatggtgcaaaagatgtcccacggctctaattcttccctttatttacagcttgtagaaacttcattaaaaggagaaattgcctttgatcccagaagcgcctattatttgtggtttgtgatggatttttgtgacggaggagatatgaatgagtatctgttgtccaggaaacccaatcgtaaaactaacaccagcttcatgcttcagctgagcagtgccctggctttcttgcataaaaaccagatcatccaccgagatcttaagcctgataacatcctgatttctcaaaccaggttggataccagtgacttggaacctaccctcaaagtggctgattttggtctaagtaaagtttgttcagcctctgggcagaacccagaagaacctgtcagtgtaaacaagtgtttcctttccacagcatgtggaacagatttttacatggctcctgaagtttgggaaggacattacacagcaaaagctgacatctttgctctggggattatcatctgggcaatgctggaaaggatcacattcatagacacagagacaaagaaggaactcttggggagttatgtaaaacaaggaactgagattgtgcctgttggggaggcacttctggaaaatcccaaaatggaacttctcattcctgtgaagaaaaaatctatgaatgggcgaatgaaacaactgattaaggaaatgctggctgcaaaccctcaggatcgtccagatgcttttgaactagaactcagattagtacaaattgcatttaaagatagcagctgggaaacgtgacacatattatttgcaaataccatggatgatatgctgcttctgtttaacagtgatgcaacattatgtggctgaaaaagaatataaaaagctagactctaccctctaagggtttagattttttgtgggattttttttttcctcatttttcttaaatccaagttggccgttttattagtatgtttcaaatgtgtattaccaatgtgggtgtaaatttttaaaaaatgattattgatagaagtttggcaggaaaattctttaagagctaacaagagaagagagtccagttttctggaaatatgtctttaagtattttagacattcctcgtcagtattaggaatttccatgggaaaagaggtttgcatgctggtaatgcaacctttgaaactttgtaaaggaaacatatatgtatatatttatgtatatgtaagtatgtgaatgtgcgcattttgcattccatatgaaaaaaatgccacgtctgtttaaattatttgatgtaggtttgggtttttgagatttgctggtgaagtcagtgacgaaaaataaaccttcccttatcttcctactctgcccctccccctaatgaaatcatattaagttgtttttttttttttttgtaatatacagctttttttttaaggcatcattttcgagggtctaaaattatctggtaaaacaaatgaaattaagtgatccaaagctgctgaagtatgtttgaactctccagtgccctatagctgcaagagttgaattagtcatgcagtcatatggcagcaggttggtgattcagtccgaccttctttaggtaaccgagcatttatttaaccaactataccactgcattgggacgtctgcacttgagcttctacaatctgatataaatctgaatacaggattattctgtttgaaaactttgctatgtgtgaactgtaatacttgatacatttttggtttgaagactttgtctaagcctcattatactgaagttgaagaaaccaaatgagctccaccctcactttgcctgccctgatatgatcacttgttgagtcactggagttcctttcattttggcactgatgctgttttctcttgtctgatttgaaacagtactggtaataatatggttgttgaaaatgtgatcacctttatctaaagtgggagaagatacatacacagtatggcaaatggataaaatattgtggcatcaactacttttaaagtagaaaagctatccattttatacaatcactgatacagtctatgtcaaaaaaccaacagaccattattcctcttgaagttagtttgattttatctttgtatggttgtctacaatttgttttcctgtaaatgcagatagttaaaatctaaaggatagaatgctttcctaaaacagaacattagcctttaaggttaaatagactttacattgtatctaagttaatctttataaagcactag

SEQ ID NO: 21755 - DNA, 4279 bp, Homo sapiens
  source 1..4279: mol_type = unassigned DNA
ggcagcggaggcgcgagctgcccgataatggcggcctgcagagcccatgagagggagaagcggcagcgtctaccctgaggaaggtgctcttccccatggggactgtaccaggctggagaggacatggcactgcttcagagacacgaaccaccttgagtggatgtgattggcgatccccgtagagcaggaaagctcgtctgctgtgcagccggcgcagaggattctgtggcaggaaattagacactaggaaattcagtagcgatttgaaggaaacctcgaccttgaagatggtgagtagccagccaaagtacgatctaatacgggaggtaggccgaggtagttacggtgttgtgtatgaagcagtcatcagaaagacctctgcacgggtggcagtgaagaaaattcgatgtcacgcacctgaaaatgttgaactagcccttcgtgagttctgggcactaagcagtatcaagagccaacatccaaatgtgattcacttggaggaatgcatcctacaaaaggatgggatggtgcaaaagatgtcccacggctctaattcttccctttatttacagcttgtagaaacttcattaaaaggagaaattgcctttgatcccagaagcgcctattatttgtggtttgtgatggatttttgtgacggaggagatatgaatgagtatctgttgtccaggaaacccaatcgtaaaactaacaccagcttcatgcttcagctgagcagtgccctggctttcttgcataaaaaccagatcatccaccgagatcttaagcctgataacatcctgatttctcaaaccaggttggataccagtgacttggaacctaccctcaaagtggctgattttggtctaagtaaagtttgttcagcctctgggcagaacccagaagaacctgtcagtgtaaacaagtgtttcctttccacagcatgtggaacagatttttacatggctcctgaagtttgggaaggacattacacagcaaaagctgacatctttgctctggggattatcatctgggcaatgctggaaaggatcacattcatagacacagagacaaagaaggaactcttggggagttatgtaaaacaaggaactgagattgtgcctgttggggaggcacttctggaaaatcccaaaatggaacttctcattcctgtgaagaaaaaatctatgaatgggcgaatgaaacaactgattaaggaaatgctggctgcaaaccctcaggatcgtccagatgcttttgaactagaactcagattagtacaaattgcatttaaagatagcagctgggaaacgtgacacatattatttgcaaataccatggatgatatgctgcttctgtttaacagtgatgcaacattatgtggctgaaaaagaatataaaaagctagactctaccctctaagggtttagattttttgtgggattttttttttcctcatttttcttaaatccaagttggccgttttattagtatgtttcaaatgtgtattaccaatgtgggtgtaaatttttaaaaaatgattattgatagaagtttggcaggaaaattctttaagagctaacaagagaagagagtccagttttctggaaatatgtctttaagtattttagacattcctcgtcagtattaggaatttccatgggaaaagaggtttgcatgctggtaatgcaacctttgaaactttgtaaaggaaacatatatgtatatatttatgtatatgtaagtatgtgaatgtgcgcattttgcattccatatgaaaaaaatgccacgtctgtttaaattatttgatgtaggtttgggtttttgagatttgctggtgaagtcagtgacgaaaaataaaccttcccttatcttcctactctgcccctccccctaatgaaatcatattaagttgtttttttttttttttgtaatatacagctttttttttaaggcatcattttcgagggtctaaaattatctggtaaaacaaatgaaattaagtgatccaaagctgctgaagtatgtttgaactctccagtgccctatagctgcaagagttgaattagtcatgcagtcatatggcagcaggttggtgattcagtccgaccttctttaggtaaccgagcatttatttaaccaactataccactgcattgggacgtctgcacttgagcttctacaatctgatataaatctgaatacaggattattctgtttgaaaactttgctatgtgtgaactgtaatacttgatacatttttggtttgaagactttgtctaagcctcattatactgaagttgaagaaaccaaatgagctccaccctcactttgcctgccctgatatgatcacttgttgagtcactggagttcctttcattttggcactgatgctgttttctcttgtctgatttgaaacagtactggtaataatatggttgttgaaaatgtgatcacctttatctaaagtgggagaagatacatacacagtatggcaaatggataaaatattgtggcatcaactacttttaaagtagaaaagctatccattttatacaatcactgatacagtctatgtcaaaaaaccaacagaccattattcctcttgaagttagtttgattttatctttgtatggttgtctacaatttgttttcctgtaaatgcagatagttaaaatctaaaggatagaatgctttcctaaaacagaacattagcctttaaggttaaatagactttacattgtatctaagttaatctttataaagcactagaatttttggtcaaaagtcaaaatagtattagaatattgaaattattgatagctttcataatctcagcttttttgaacttccacaatttttggaatatgtcataatttttttccctgtttcaaatgtgttcagaggaaatagaatgtaaaacatcacaaaaaaaattgcagtacataaaatttctggactatgttagttacttgatctggaagtttaaaatttggactaaaaggttttattgaaataaagcctcttaaaatgaaaaatcatatacttttaacatcacttttaagctaataaatataagaattcttttggaaattagaggtggaaacacactggaacctcatgataattgaccctctggatcaccagattagtttaatttaacagatatgtccaaggaagttgagctatagggagtaagaaaaagcatcatgataacgtctagtcaataacatggcacttcagcagagattcatagatgatggtatgcccatgcatcatttgctcttcaaatatctatgtgcttggagccacagtttcctaagcgcatagtttttggtcctgcctcatgtaaaatagttaatgattatcatttacttggaaagattttacctgtgaagtgaaattctttcattgggggtaagggtatgaggtgatcaggaagtttcttctggaattttatcaagtccttgtattctaaaatagccaagcaaaatgatagtaaattctttgtctttgttctttcagtcagaggtatttattaagtacctactgtgtgctcagcactaaaggtttgttgataaaatgacaattaaaaaatggcatttagccaaaggccttttcagccaggagtaagaaaagatggttagtgatatttggaaatacctggatatttgctagaggaaaaatgaaagcaaaacttcgtacacagtgccttgcccataataggtactcaataagcaattgttcctcatagagtcttttgccatgatttatggtgttttttgaaatttgtcttaattgaaaaaagaccaaatatttcaaatgagcttataggcagctgtggccagtgaaaatatggggttgtacagttagttcctagaatgttattttgcactagttgtcacttagaaagatggggttcctgtagattttttggtgctaagggatactttgtcattatgatgaagtaagtgttaagtgtcagataaatagcacacagaatagttctttctgctggtctgttttttctcttcgttgttgttgtttttaattgtaaattgttatcaatcaaactattgtagcagctacaaagtaattcaccagcatgacaaaatggtcaaaaaataagtcatcagcacttaagaaatgaaagcaacttttgaaattttctgttaaaattgtcaaatatattttatgaagaatttataaaaggggaaaatgattgtaatttattgttcatgacttttttttttaaataaagtgagtttcaacaaaaaaaaaa

SEQ ID NO: 21756 - DNA, 838 bp, Homo sapiens
  source 1..838: mol_type = unassigned DNA
gcacccagccccgcgccgccgccgccgccgccgtctccgcaactgcaccgcccgcaaacatggctcagtgactcggagaaaagctgcagtctccctcccggcggggcggacgccaggcctccttggtcgggccgcacctccccgcaggcccgccaaagagcaccgcgccccgcaggcacccgagacccgcgcggaagatgcaccgggcgttccaccccagcgagccccgcaccccagcccgcagctcgaaacctcgaccttgaagatggtgagtagccagccaaagtacgatctaatacgggaggtaggccgaggtagttacggtgttgtgtatgaagcagtcatcagaaagacctctgcacgggtggcagtgaagaaaattcgatgtcacgcacctgaaaatgttgaactagcccttcgtgagttctgggcactaagcagtatcaagagccaacatccaaatgtgattcacttggaggaatgcatcctacaaaaggatgggatggtgcaaaagatgtcccacggctctaattcttccctttatttacagcttgtagaaacttcattaaaaggagaaattgcctttgatcccagaagcgcctattatttgtggtttgtgatggatttttgtgacggaggagatatgaatgagtatctgttgtccaggaaacccaatcgtaaaactaacaccagcttcatgcttcagctgagcagtgccctggctttcttgcataaaaaccagatcatccaccgagatcttaagcctgataacatcctgatttctcaaaccaggttggataccagtgacttggaacctaccctcaaagtggctgatttt

SEQ ID NO: 21757 - DNA, 7176 bp, Homo sapiens
  source 1..7176: mol_type = unassigned DNA
ggccggcggaggaaggggagggagcgaggagcgcgcgctgctctcgcgtgctctcgcgccgctcgcgtgaccggccggtgtgtgcgcgaggccccggctcccggggcacggacggccgggcgcgcgcctctgcgaggggcgtccgggtccgagtcggcggtccgggccggcgcgaggtgcgtgcgggcgggccgcgggggtcccggacggacacaagcgcacacactcccggaggagccttcgaggctgctcttcctcggccagacggagagcggcactgtctccccgcccagcgctcactcgccccgcgtctccccccgcggcggctgctcctcctcggcaccgccagccccagcgccgctcccgggcgggcgggcggcggcggcggcggcggcgggacccgcggagccgctttgtgtgcagcccgactaggggcggcggcgcaaccacctgacagaggcccgggcgctcgatgcaccttccgcccgcatgaggaggagaggccggtagaggactgtgaaccaaaagttgtcccccaggatggacttcaccgcgcagcccaagcctgccactgccctctgtggcgtcgtgagtgccgacgggaagatcgcttaccctccgggggtaaaagagatcaccgacaagatcaccacggacgagatgatcaaacgcctgaagatggtagtgaaaacctttatggatatggatcaggactcagaagatgaaaaacagcagtatctcccactagccttgcatcttgcatctgaattcttcctcaggaaccccaataaagatgtgcgtctccttgtagcatgttgtttggctgatatctttcgtatctatgccccagaagctccatatacttcccatgataaacttaaggacatatttttgtttattaccagacaattaaaaggtttggaggatacaaagagtccacagtttaatagatacttttatttattagagaatttagcttgggttaaatcatataacatctgctttgaattggaagattgcaatgaaatttttattcagctttttagaactctcttctcagtgatcaacaatagccacaataagaaggtacaaatgcacatgctagatttgatgagttctatcatcatggaaggtgatggagttactcaagaattattggactccattcttattaacctcattcctgcacataagaacttaaataaacagtcctttgaccttgcaaaagtgctattgaaaagaacagtccagactattgaggcatgcattgctaattttttcaatcaagtcctggtgctgggaagatcatcagtaagtgatttgtcagaacatgtatttgatctgattcaggaactttttgctatagatcctcatttattattatccgtcatgccacagcttgaattcaaactaaagagcaatgatggagaagagcgattagctgttgttcgacttctagctaaattgtttggctccaaagattctgatttggcaacacagaatcgtcctctttggcaatgttttcttggacgatttaatgatattcatgttcctgtgagattagaaagtgtgaaatttgccagtcattgtttaatgaatcacccagatttagcgaaggatctcacagaatatttaaaggttagatcacatgatccagaagaagctattcgtcatgatgtcattgttactataataacagctgccaagagggacctggccttagtaaatgatcagctgcttggctttgtaagggaaagaacactggataaacggtggcgagtaagaaaagaagctatgatgggtctggctcagctttataagaaatactgtcttcatggtgaagcaggaaaggaagctgcagagaaagtcagctggataaaggacaaacttctgcatatttattatcagaacagcattgacgacaaactgttggtagagaaaatctttgctcagtatcttgtcccccacaacctggaaacagaagagagaatgaaatgcttatattacttatatgctagtttggatccaaatgctgtaaaagctctcaacgaaatgtggaagtgtcagaacatgcttcggagccatgtacgcgaactattggatttgcacaagcagcctacatcagaggctaactgttctgccatgtttggaaaactgatgaccatagcaaagaatttgcctgaccccgggaaagcacaagattttgtgaagaaatttaaccaggttctcggcgatgatgagaaacttcggtctcagttggagttattaattagcccaacctgttcttgcaaacaagcagatatttgtgtgagagaaatagcccggaaacttgcaaatcctaagcaaccaacaaatccttttctagagatggtcaaatttctgttggaaagaatcgcacctgtgcacattgattcagaagccataagtgcactagtgaaattgatgaataagtcaatagaggggacagcagatgatgaagaggagggtgtaagtccagatacagctatccgttcaggacttgaacttcttaaggttctgtcttttacacatcctacctcgttccactctgcagagacatatgagtccttgttacagtgcctaagaatggaggatgacaaggtagcagaagctgctattcaaatttttagaaatacaggtcacaaaatagaaacagaccttccccagatacgatcgaccttaattcccattttacatcaaaaagcaaagaggggtactccacaccaagcaaaacaggctgtgcactgtatacacgccatattcacaaataaagaagtccagcttgcacagatttttgagccactcagtaggagtctgaatgctgatgtgccagaacaacttataactccattagtttcattgggccacatttctatgttagcaccagatcagtttgcttccccaatgaaatctgtagtagcaaattttattgtgaaagatctgctaatgaatgacaggtcaacaggtgaaaagaatggaaaactgtggtctccagatgaagaggtttcccctgaagtactagcaaaggtacaggcaattaaacttctggtaaggtggctgttgggtatgaaaaacaaccagtctaaatctgccaattcaacccttcggttattatcagcgatgttggttagtgagggtgacctgacagagcaaaagaggatcagtaaatctgatatgtctcgcttgcgattagctgctggtagtgccataatgaagcttgctcaggaaccttgttaccatgaaattattaccccagaacagtttcagctctgtgcacttgttattaatgatgagtgttaccaagtaaggcagatatttgctcagaagctgcataaggcacttgtgaagttactgctcccattggagtatatggcgatctttgccttgtgtgccaaagatcctgtgaaggagagaagagcacacgcacgacaatgtttactgaaaaatatcagtatacgcagggaatacattaagcagaatcctatggctactgagaaattattatcactgttgcctgaatatgtagttccatacatgattcacctgctagcccatgatccagattttacaagatcacaagatgttgatcagcttcgtgatatcaaagagtgcctatggttcatgcttgaagttttaatgacaaagaatgaaaacaatagccatgcctttatgaagaagatggcagagaacatcaagttaaccagagatgcccagtctccagatgaatccaagacaaatgaaaaactgtatacagtatgtgatgtggctctctgtgttataaatagtaaaagtgctttgtgcaatgcagattcaccaaaggacccagtcctcccaatgaaattttttacacaacctgaaaaggacttctgtaacgataagagttatatttcagaagagacaagagtacttctgttaacaggaaagccaaagcctgctggagtactaggtgcagtaaataagcctttatcagcaacgggaaggaaaccctatgttagaagcactggcactgagactggaagcaatattaatgtaaattcagagctgaacccttcaaccggaaatcgatcaagggaacagagttcagaggcagcagaaactggagttagtgaaaatgaagagaaccctgtgaggattatttcagtcacacctgtaaagaatattgacccagtaaagaataaggaaattaattctgatcaggctacccagggcaacatcagcagtgaccgaggaaagaaaagaacagtaacagcagctggtgcagagaatatccaacaaaaaacagatgagaaagtagatgaatcgggacctcccgccccttccaaacccaggagaggacgtcgacccaagtctgaatctcagggcaatgctaccaaaaatgatgatctaaataaacctattaacaagggaaggaagagagctgcagtgggtcaggagagccctgggggtttggaagcaggtaatgccaaagcacccaaactgcaagatttagccaaaaaggcagcaccagcagaaagacaaattgacttacaaaggtaaaaatgcatttgcaaagggagaaaatgaaggccaaacagaagcaggctccagcttctgcaaaaacttggattcacaaatgtccctgaacagaaaatgaagctcacttcagaacacacactctctgccttgaaaactaaagagactattacttccttttcacatgaccacaagtcctctgatggaaatgtacagcagaaactcttgagagagaggctaaaagcaactctgttctcccccttcccctagacttttcttacgaaaagtcaataattaagcaaattgcttaacacttggttccagttcctgcctatctggagtttaaatgcgtaatacaccattaatttccacgctgcagtttttattttaaagaaagtaacaagatgtctttacactgacactgaaaattcatccattttagagccaggaattcccatgttacacaggaaaaaatagaagtctactgaattaattttttaaaagaaaagagatcagattaaatatttctttgtttttccttttggaaacttttatgtataattctttctgcctgcctacttttctgcaaaaatgagatgtacagatttcggttccctgctatgaaaagtgatgtggtagcaattttataaatgttgctttctgatttttatcagagtgagaaaattaaaattattgatttgcaagtagtaaacagttcatattttgatttcccctcattttagtttaatataatttgcaataaatgtacatattgttgtttgtttcataaagcatatcactttaaaatggtttttactcctgtgattatgttggaatatttggaattttaaaggagtaaagactgtccagcatttggttttataatgtttgtcaccagatttttattaatgtaaaaaaaatcaatttttaaaaaatagttggactttggcagcttttaaggaaagttggaggtgttttaggattgctatcaattttcagcattgtgctatttggaaataagtgttttgcttttgtctgatggtctgggctcatttttatgtttattttagaaaactgttgcatcaatatattatgtttcttggcattgttcagcataggtaatgtgtgcactttatgtgtacacataatcatatttaagttttttgcataaaataaatgcttctagatgtcatggcagtctttttaatctttttatcatatgctttcttgtgaattttttcatgttaaagagctaaagtcataacatgattacagtcaactctccattatctatataaaatagtgactaagcctcaggtttttaattttgtgataacaaaataacgaaggcatgtaagacctgattctggaggaacatgaaatttgtcttttctcatgtccagagttctatcctgcccccactgtccactgtagggtcatccgcaaagccctagcagaatgtgctcactccatttccttacacgtttctagcatgggtcagaggaaacaacatttgtgttataacttcgtcttgataggctgtagtgtacatgggatgtaaaacaaacaagtgtatcaaaggtggatgattctgttagagtgaagtttgagagtaaatgtcacttacgtttctcatagataatcaagagttggctgtgtattgactgaaagatgggtaattattttaaatatgcatttacacacatttaggtatcagaagatgcttagggaacaatggataccaatgatagaaaatgatacctttacaggggcagaaaaatccccactcttccttattgcctcttcagaaccctttagaaagtataaaatattgcctccaacatgctgaaaaagagtatctatgcataagtatcagagaagtccctcaagcaatcagtaggtgtgttctatttagagagagtttaaagttctcttagcatcagacaacttgattcctaaggtttccagtgtgtcaccaacaaaaagtgcattgatagggacctttgtctcttcctccctttgattaattgcccggcatcacagtttactagattaccaagtgttacatcatattaaataaaatgtagcagaaccatctgcatcaatatattcctgtttagatttttgcaggagagaagttaaaaggatttgctccttgtatgatgtaagtggcccaccccaattttgtaacatgatgcaagtgtctggcactaagggaagcaagagtagggttgtggaaagaccaagctgatggggagggacttgtttacgggaatttttttagttttccttttcaaaggaaaacattaaaatcccttaggaatttggtattcacatctcagagaactacaacacaaaagtgcagacttatatttgagaattaatgttaaccctttgtgtctagtttgaagcttcttgtatttgtctaaaacaacaagccagaattttgtatctcctttgataaaaagtgtgtataatgtaaagtagttttgcatattcttgtgctgcacatgggctgaatttttaaattttttttaaaaacttgaagcagaaccttgtaatttgtgtaaatgacaagtgtaaaatcctaccataaaatgctaaaaatatgcactgtttcaaataaaaccaagaaatgcagcatta

SEQ ID NO: 21758 - DNA, 2685 bp, Homo sapiens
  source 1..2685: mol_type = unassigned DNA
ggccggcggaggaaggggagggagcgaggagcgcgcgctgctctcgcgtgctctcgcgccgctcgcgtgaccggccggtgtgtgcgcgaggccccggctcccggggcacggacggccgggcgcgcgcctctgcgaggggcgtccgggtccgagtcggcggtccgggccggcgcgaggtgcgtgcgggcgggccgcgggggtcccggacggacacaagcgcacacactcccggaggagccttcgaggctgctcttcctcggccagacggagagcggcactgtctccccgcccagcgctcactcgccccgcgtctccccccgcggcggctgctcctcctcggcaccgccagccccagcgccgctcccgggcgggcgggcggcggcggcggcggcggcgggacccgcggagccgctttgtgtgcagcccgactaggggcggcggcgcaaccacctgacagaggcccgggcgctcgatgcaccttccgcccgcatgaggaggagaggccggtagaggactgtgaaccaaaagttgtcccccaggatggacttcaccgcgcagcccaagcctgccactgccctctgtggcgtcgtgagtgccgacgggaagatcgcttaccctccgggggtaaaagagatcaccgacaagatcaccacggacgagatgatcaaacgcctgaagatggtagtgaaaacctttatggatatggatcaggactcagaagatgaaaaacagcagtatctcccactagccttgcatcttgcatctgaattcttcctcaggaaccccaataaagatgtgcgtctccttgtagcatgttgtttggctgatatctttcgtatctatgccccagaagctccatatacttcccatgataaacttaaggacatatttttgtttattaccagacaattaaaaggtttggaggatacaaagagtccacagtttaatagatacttttatttattagagaatttagcttgggttaaatcatataacatctgctttgaattggaagattgcaatgaaatttttattcagctttttagaactctcttctcagtgatcaacaatagccacaataagaaggtacaaatgcacatgctagatttgatgagttctatcatcatggaaggtgatggagttactcaagaattattggactccattcttattaacctcattcctgcacataagaacttaaataaacagtcctttgaccttgcaaaagtgctattgaaaagaacagtccagactattgaggcatgcattgctaattttttcaatcaagtcctggtgctgggaagatcatcagtaagtgatttgtcagaacatgtatttgatctgattcaggaactttttgctatagatcctcatttattattatccgtcatgccacagcttgaattcaaactaaagagcaatgatggagaagagcgattagctgttgttcgacttctagctaaattgtttggctccaaagattctgatttggcaacacagaatcgtcctctttggcaatgttttcttggacgatttaatgatattcatgttcctgtgagattagaaagtgtgaaatttgccagtcattgtttaatgaatcacccagatttagcgaaggatctcacagaatatttaaaggttagatcacatgatccagaagaagctattcgtcatgatgtcattgttactataataacagctgccaagagggacctggccttagtaaatgatcagctgcttggctttgtaagggaaagaacactggataaacggtggcgagtaagaaaagaagctatgatgggtctggctcagctttataagaaatactgtcttcatggtgaagcaggaaaggaagctgcagagaaagtcagctggataaaggacaaacttctgcatatttattatcagaacagcattgacgacaaactgttggtagagaaaatctttgctcagtatcttgtcccccacaacctggaaacagaagagagaatgaaatgcttatattacttatatgctagtttggatccaaatgctgtaaaagctctcaacgaaatgtggaagtgtcagaacatgcttcggagccatgtacgcgaactattggatttgcacaagcagcctacatcagaggctaactgttctgccatgtttggaaaactgatgaccatagcaaagaatttgcctgaccccgggaaagcacaagattttgtgaagaaatttaaccaggttctcggcgatgatgagaaacttcggtctcagttggagttattaattagcccaacctgttcttgcaaacaagcagatatttgtgtggttagtaaatcatacttcacactttttctctagctttacttacagaaatatgtattttattaaagcctgttttacatacagtgatttgtgtaaatgtaacaatattgtgagctctgaattactttggagtatatctattgtcaagttaattctctatttaccattcactctcagccacattccaggaaaataactaaagaactaagccagggagattggtcttaggaattttacaagataaagtactttgaacttagtagacattcattgagtaatgataagtattttctgaatgcttgtgtacatgtgcattttcttctttcatgtattagaatggaaataatcgtcaataaattagtagtagtaacattgcca

SEQ ID NO: 21759 - DNA, 1452 bp, Homo sapiens
  source 1..1452: mol_type = unassigned DNA
gcccgcgccgcgccgctctttctccgacagccgccgggggtgccctgcaagctgttccgcgcgtcctgcccgtctgtccccgcgggtcgtcgcccgccacagccgcgccatgaccacccagcagatagacctccagggcccggggccgtggggcttccgcctcgtgggcggcaaggacttcgagcagcctctcgccatttcccgggtcactcctggaagcaaggcggctctagctaatttatgtattggagatgtaatcacagccattgatggggaaaatactagcaatatgacacacttggaagctcagaacagaatcaaaggctgcacagacaacttgactctcactgtagccagatctgaacataaagtctggtctcctctggtgacggaggaagggaagcgtcatccatacaagatgaatttagcctctgaaccccaggaggtcctgcacataggaagcgcccacaaccgaagtgccatgccctttaccgcctcgcctgcctccagcactactgccagggtcatcacaaaccagtacaacaacccagctggcctctactcttctgaaaatatctccaacttcaacaatgccctggagtcaaagactgctgccagcggggtggaggcgaacagcagacccttagaccatgctcagcctccaagcagccttgtcatcgacaaagaatctgaagtttacaagatgcttcaggagaaacaggagttgaatgagcccccgaaacagtccacgtctttcttggttttgcaggaaatcctggagtctgaagaaaaaggggatcccaacaagccctcaggattcagaagtgttaaagctcctgtcactaaagtggctgcgtcgattggaaatgctcagaagttgcctatgtgtgacaaatgtggcactgggattgttggtgtgtttgtgaagctgcgggaccgtcaccgccaccctgagtgttatgtgtgcactgactgtggcaccaacctgaaacagaagggccatttctttgtggaggatcaaatctactgtgagaagcatgcccgggagcgagtcacaccacctgagggttatgaagtggtcactgtgttccccaagtgagccagcagatctgaccactgttctccagcaggcctctgctgcagctttttctctcagtgttctggccctctcctctcttgaaagttctctgcttactttggttttccctctgcttgtaaaacattgagtcccctccctgccttggttaattgactcacaccagctgtgcgatgcccgcttttacaattaaaggaaaactgttttgttcagtgtcaccttgtcagcaacactgtgtcccttcgccccaccgttcttctctgctgcatttggacatcagccaaatttgaacccaatcaaatataacgtgtctgacactgattttgtttttactcaataaatgtatagactacaaa

SEQ ID NO: 21760 - DNA, 4592 bp, Homo sapiens
  source 1..4592: mol_type = unassigned DNA
ccgggagctgtggtgccctctccttctccctttggctcctctcctgctgccttacagtgcccccagagccggctaggggcatggacttcacctcctggtcctctcttcctcaggtatggcgttgacggtggatgtggccgggccagcgccctggggcttccgtatcacagggggcagggatttccacacgcccatcatggtgactaaggtggccgagcggggcaaagccaaggacgctgacctccggcctggagacataatcgtggccatcaacggggaaagcgcggagggcatgctgcatgccgaggcccagagcaagatccgccagagcccctcgcccctgcggctgcagctggaccggtctcaggctacgtctccagggcagaccaatggggacagctccttggaagtgctggcgactcgcttccagggctccgtgaggacatacactgagagtcagtcctccttaaggtcctcctactccagcccaacctccctcagcccgagggccggcagccccttctcaccaccaccctctagcagctccctcactggagaggcagccatcagccgcagcttccagagtctggcatgttccccgggcctccccgctgctgaccgcctgtcctactcaggccgccctggaagccgacaggccggcctcggccgcgctggcgactcggcggtgctggtgctgccgccttccccgggccctcgttcctccaggcccagcatggactcggaagggggaagcctcctcctggacgaggactcggaagtcttcaagatgctgcaggaaaatcgcgagggacgggcggccccccgacagtccagctcctttcggctcttgcaggaagccctggaggctgaggagagaggtggcacgccagccttcttgcccagctcactgagcccccagtcctccctgcccgcctccagggccctggccacccctcccaagctccacacttgtgagaagtgcagtaccagcatcgcgaaccaggctgtgcgcatccaggagggccggtaccgccaccccggctgctacacctgtgccgactgtgggctgaacctgaagatgcgcgggcacttctgggaggacgcttgtgctatggagggaatgagattgtcactggaagctttggaggggatggtggagggcgccaagcggagggacaggaggaagaccaggagacccatccagccaagctggtgagacaacctctgatcctgaggaccggccgcccaccaagggttgggcccccggggccaggttgatctaccgacaccttccacttctttcctgggagagactgctggcttcattggtgattgatttggaggggggaaaaagggcagggtggctcaggctttaggcccaggtactggggaggcctgaggagccctcctggagctcaggaggccgaggctgccttaagctgtgatcatgccactgcattccagcctgggagagagagaggacctgtctgttgaaaaaaacacaaaaacaaatgaatgcatgtggccagtgccaggtgagctgccctgggggttcactggagttgaggcaggggacagtagtctcccctgccagcctaggattttgggcgtcattcacccactacccctagtgctagtcccagaggatgctgcggagggggcagcctcagctctcttttcagagaagatcaaagctgggcttcccagggtgcctggctggtccctgccggcagctttgtgctctccggctctttgtgaaaggaatcttggcgcagatgtttgtgttgcctcctcaggcacctgtagatataatttacaccatgatatcattgtctcaccttttgcctgggtggctgcctgagaaaggtctttctttttatagaaaagatcaaggctgtctggcgcgggactccatgagccccaggcgctggtcagaaacggggtagtctctttggcgccacctagtgtccagtttggcccatggcggggcccattcacggggcaacactgggcttctgggcacagcgggaatacagaaagatacagcactcctcatgccttcctggaggtagaaggccagtggcagcgactgagctggcatgaatgaataagaggatgtggcactgagcgccaagggctaccttggaacgcaccgaggagcgtcccgtgagttcaaagcagtggccgtgatgcaaaaggagggctgggtcttggagacgtggagaagaggaatgctgagtgatggggtggctgctggggggatgcttagctcagagcagtggctgatggggacactgagataagatcggaggggagctgtcaatgccagaagtggtttgaacttccccttgaggctctagggacattttgttttgagacatggtcttgctctattgcccaggctggagtgcagtggtacaatcttagctcactgcagcctccacctcccaggctcaagagatcctcccacagcctcccaggtagctgggactacaggcgtgcaccaccacacccagctaatttttaagtttttttttttttttaagagatggggtctcactatgttgcccaggctggtctcgaacttcgggccccaagccatcctcccaccttggctttccaaagtgttgggattacaagcgtgagctaaccttgcccagcctctgggaacacttggaaggttttaagcagagaagtgacaggttggaaaagatggtttggattattgatatggacagattcccacctgtatgtagcacgccatgctgggccagcagtgtcataggagtggagggggataagtggggactggggacatgtgaaatgatgggcattccagtgaggcatcgaatgccttctgagggctttgtaggttccagctcaaatccccctctggctcttgttctttggtgtggcagccatctctcctcccaggggtcctgagggtttcagcaccagggttctctgcagccacacaatcagcccggctcgggagcaaactcccctggaagaacggagttatgagttggtcagcagaggaggctggggacaggcagtttttggtcttttacctctgatcttgtccccaacctaagccagctagctgcgtgctcccactccctctgccgcacgccgcccgtctatgttcccggactttgtccagtgcagtgccctcttcccttcctgcactgaggagattaactgaagtgacagattagagttagaagtggcccaaaggagcatctggtacaaccccctttggttagagaagggaaagtgacttttccaaagctgcacagctagacagtcataatggctaagctctgggggtgcttttgatgtgctagggatacttccaatgctttaactcacttaatcctcacaacccgagataggtactgttaccatcctctctgcagacgaggaaaccgaggaccaggaggttcagtaaatggtccaagtactcctagctagtaaggaatggatctacagcctgcctcccaggtttctggcttgtggggggcagagtttgtccctctgtcatcagaggcagccttccaggcacagctctggtcacctctggtcacaactggaggtcaccacagccctccccagcgctctgtaggctctcagctttgtgcttcctcccacgggtactagctccagctgagcttgcaggaaacccacttcctgaagccaggacttccccatgggaagtgcaggggccactgggcagcctgagggctgaccctgctcaggacactgtctgtctcaggaactcatggcagtggtttaccttgtcaggagtgcatggacgggctgcccctcccattccttcaagcatcactcagagagccctggcctggctctaggcttgggactgcggctgccacaggaagggggcatccccctactttgggtgttgggtcagatcctgcccccgtgcccgccagggctcaggttcctctgagctggtcctgggccaggacgcatctgcatggcggtggtggggaggaggggtgcgccatggcctggaggggagtgtgtgttggggtgtgtgtgtggaggttcttttgagtcacacacaaagcattgtgctgagacactgcattcctgctggctgggcttcctgtttccagatgcattcctgtcccagagtcaccacagagactgtttggaatcccgccccacattctccaaattcagggcgcgatctggcaaaggctccctcccccaccctcttactttggagggagtctgggctccctcctacccagggagggctggcagggctctggcacggccggggtgtgattccacacatcttcttggtcttgcataaggcagttcctggagacccagcactctggttctctctctgcctgtgagaagcggaatgggtactgtctaggaggactgggcagggtgggggcaacccagaggacccatggctagcagggaagggcctgggcttgaatgtgactctgttgagacatggccagcaattctggcacttggctgtcattcggctggcctgcgcagagattggctgtgggcctcagtttccccattttataaagttttaaaatctg

SEQ ID NO: 21761 - DNA, 2236 bp, Homo sapiens
  source 1..2236: mol_type = unassigned DNA
agacacacccaggcagcccaccctgcccaggacctggggatgcggggcgggagagcgcggccggcgtgggagagctttatggggctgccccctcgatcgtctgcgaagtggggcgcggggcagtccctggaccggctctgctgtgctccgggcagtcgggggcttgcgggcgctccggggaggatgcgggcaccaccggctggacggtcgcagcctgcagggggccctggggacagcctgcctcatccccccggcgggctcgggccaggtggcagcgcctgggctcgccgcgcggaggcggcggcttctcgggctaggggcggcggcaggggcggccccgggatcacatgggcggaggcaggtccgggagccccgggcgggctctccccagagtcgggtagacggcagcgggagcggtggcgtctccccgccttccctccctcccgggcctgggcgcccagccggacaggtgagcggcagccaggtgagcgcgcccacctgcgcctctccgcgcggcccgccctccccggcgccgggctcctctccgcgcccctgtcggcgcggaaccctggcctcgtccgcggcccagctccctggagcctcgcatcagcgggggcgcccccgcgagctgcgctctccccggccggagcgctcctcctccagcccccagcccgcagggtactttgccctcggagcgaaggaggctccagaactggtagagccgggccatcgggctgggcacctccccgcggcgcccgcagcgcggagtccactgaccggctcaaaggtatggcgttgacggtggatgtggccgggccagcgccctggggcttccgtatcacagggggcagggatttccacacgcccatcatggtgactaaggtggccgagcggggcaaagccaaggacgctgacctccggcctggagacataatcgtggccatcaacggggaaagcgcggagggcatgctgcatgccgaggcccagagcaagatccgccagagcccctcgcccctgcggctgcagctggaccggtctcaggctacgtctccagggcagaccaatggggacagctccttggaagtgctggcgactcgcttccagggctccgtgaggacatacactgagagtcagtcctccttaaggtcctcctactccagcccaacctccctcagcccgagggccggcagccccttctcaccaccaccctctagcagctccctcactggagaggcagccatcagccgcagcttccagagtctggcatgttccccgggcctccccgctgctgaccgcctgtcctactcaggccgccctggaagccgacaggccggcctcggccgcgctggcgactcggcggtgctggtgctgccgccttccccgggccctcgttcctccaggcccagcatggactcggaagggggaagcctcctcctggacgaggactcggaagtcttcaagatgctgcaggaaaatcgcgagggacgggcggccccccgacagtccagctcctttcggctcttgcaggaagccctggaggctgaggagagaggtggcacgccagccttcttgcccagctcactgagcccccagtcctccctgcccgcctccagggccctggccacccctcccaagctccacacttgtgagaagtgcagtaccagcatcgcgaaccaggctgtgcgcatccaggagggccggtaccgccaccccggctgctacacctgtgccgactgtgggctgaacctgaagatgcgcgggcacttctgggtgggtgacgagctgtactgtgagaagcatgcccgccagcgctactccgcacctgccaccctcagctctcgggcctgagcccgccatgccctcagcctgcctcactgctgggccagggtcatgcctatataagttggcatggcagggacaatggtgggcagttgctcttacatgagctaagtttggagacctgaggcccctttgtcctcgctgggtgggccaaggtctgggacctgtcttggactgtgggagactcaccctcaccttgccaggcctctcccctgcaggactggcattgcactagtctgaggtggccactgcctttgatcaacctttgtgtgcgagggtctaagtagggtcgaacacagaagtgggaaggagaggggtgggccaggggctaatggtgtcactgtgtaaagtttttgacatactagctctataaatatatgaatatggacaaaataaa

SEQ ID NO: 21762 - DNA, 1719 bp, Homo sapiens
  source 1..1719: mol_type = unassigned DNA
agagtcgggtagacggcagcgggagcggtggcgtctccccgccttccctccctcccgggcctgggcgcccagccggacaggtgagcggcagccaggtgagcgcgcccacctgcgcctctccgcgcggcccgccctccccggcgccgggctcctctccgcgcccctgtcggcgcggaaccctggcctcgtccgcggcccagctccctggagcctcgcatcagcgggggcgcccccgcgagctgcgctctccccggccggagcgctcctcctccagcccccagcccgcagggtactttgccctcggagcgaaggaggctccagaactggtagagccgggccatcgggctgggcacctccccgcggcgcccgcagcgcggagtccactgaccggctcaaaggtatggcgttgacggtggatgtggccgggccagcgccctggggcttccgtatcacagggggcagggatttccacacgcccatcatggtgactaaggtggccgagcggggcaaagccaaggacgctgacctccggcctggagacataatcgtggccatcaacggggaaagcgcggagggcatgctgcatgccgaggcccagagcaagatccgccagagcccctcgcccctgcggctgcagctggaccggtctcaggctacgtctccagggcagaccaatggggacagctccttggaagtgctggcgactcgcttccagggctccgtgaggacatacactgagagtcagtcctccttaaggtcctcctactccagcccaacctccctcagcccgagggccggcagccccttctcaccaccaccctctagcagctccctcactggagaggcagccatcagccgcagcttccagagtctggcatgttccccgggcctccccgctgctgaccgcctgtcctactcaggccgccctggaagccgacaggccggcctcggccgcgctggcgactcggcggtgctggtgctgccgccttccccgggccctcgttcctccaggcccagcatggactcggaagggggaagcctcctcctggacgaggactcggaagtcttcaagatgctgcaggaaaatcgcgagggacgggcggccccccgacagtccagctcctttcggctcttgcaggaagccctggaggctgaggagagaggaaccaggctgtgcgcatccaggagggccggtaccgccaccccggctgctacacctgtgccgactgtgggctgaacctgaagatgcgcgggcacttctgggtgggtgacgagctgtactgtgagaagcatgcccgccagcgctactccgcacctgccaccctcagctctcgggcctgagcccgccatgccctcagcctgcctcactgctgggccagggtcatgcctatataagttggcatggcagggacaatggtgggcagttgctcttacatgagctaagtttggagacctgaggcccctttgtcctcgctgggtgggccaaggtctgggacctgtcttggactgtgggagactcaccctcaccttgccaggcctctcccctgcaggactggcattgcactagtctgaggtggccactgcctttgatcaacctttgtgtgcgagggtctaagtagggtcgaacacagaagtgggaaggagaggggtgggccaggggctaatggtgtcactgtgtaaagtttttgacatactagctctataaatatatgaatatgg

SEQ ID NO: 21763 - DNA, 1757 bp, Homo sapiens
  source 1..1757: mol_type = unassigned DNA
agagtcgggtagacggcagcgggagcggtggcgtctccccgccttccctccctcccgggcctgggcgcccagccggacaggtgagcggcagccaggtgagcgcgcccacctgcgcctctccgcgcggcccgccctccccggcgccgggctcctctccgcgcccctgtcggcgcggaaccctggcctcgtccgcggcccagctccctggagcctcgcatcagcgggggcgcccccgcgagctgcgctctccccggccggagcgctcctcctccagcccccagcccgcagggtactttgccctcggagcgaaggaggctccagaactggtagagccgggccatcgggctgggcacctccccgcggcgcccgcagcgcggagtccactgaccggctcaaaggtatggcgttgacggtggatgtggccgggccagcgccctggggcttccgtatcacagggggcagggatttccacacgcccatcatggtgactaaggtggccgagcggggcaaagccaaggacgctgacctccggcctggagacataatcgtggccatcaacggggaaagcgcggagggcatgctgcatgccgaggcccagagcaagatccgccagagcccctcgcccctgcggctgcagctggaccggtctcaggctacgtctccagggcagaccaatggggacagctccttggaagtgctggcgactcgcttccagggctccgtgaggacatacactgagagtcagtcctccttaaggtcctcctactccagcccaacctccctcagcccgagggccggcagccccttctcaccaccaccctctagcagctccctcactggagaggcagccatcagccgcagccggcctcggccgcgctggcgactcggcggtgctggtgctgccgccttccccgggccctcgttcctccaggcccagcatggactcggaagggggaagcctcctcctggacgaggactcggaagtcttcaagatgctgcaggaaaatcgcgagggacgggcggccccccgacagtccagctcctttcggctcttgcaggaagccctggaggctgaggagagaggtggcacgccagccttcttgcccagctcactgagcccccagtcctccctgcccgcctccagggccctggccacccctcccaagctccacacttgtgagaagtgcagtaccagcatcgcgaaccaggctgtgcgcatccaggagggccggtaccgccaccccggctgctacacctgtgccgactgtgggctgaacctgaagatgcgcgggcacttctgggtgggtgacgagctgtactgtgagaagcatgcccgccagcgctactccgcacctgccaccctcagctctcgggcctgagcccgccatgccctcagcctgcctcactgctgggccagggtcatgcctatataagttggcatggcagggacaatggtgggcagttgctcttacatgagctaagtttggagacctgaggcccctttgtcctcgctgggtgggccaaggtctgggacctgtcttggactgtgggagactcaccctcaccttgccaggcctctcccctgcaggactggcattgcactagtctgaggtggccactgcctttgatcaacctttgtgtgcgagggtctaagtagggtcgaacacagaagtgggaaggagaggggtgggccaggggctaatggtgtcactgtgtaaagtttttgacatactagctctataaatatatgaatatgg

SEQ ID NO: 21764 - DNA, 1837 bp, Homo sapiens
  source 1..1837: mol_type = unassigned DNA
agagtcgggtagacggcagcgggagcggtggcgtctccccgccttccctccctcccgggcctgggcgcccagccggacaggtgagcggcagccaggtgagcgcgcccacctgcgcctctccgcgcggcccgccctccccggcgccgggctcctctccgcgcccctgtcggcgcggaaccctggcctcgtccgcggcccagctccctggagcctcgcatcagcgggggcgcccccgcgagctgcgctctccccggccggagcgctcctcctccagcccccagcccgcagggtactttgccctcggagcgaaggaggctccagaactggtagagccgggccatcgggctgggcacctccccgcggcgcccgcagcgcggagtccactgaccggctcaaaggtatggcgttgacggtggatgtggccgggccagcgccctggggcttccgtatcacagggggcagggatttccacacgcccatcatggtgactaaggtggccgagcggggcaaagccaaggacgctgacctccggcctggagacataatcgtggccatcaacggggaaagcgcggagggcatgctgcatgccgaggcccagagcaagatccgccagagcccctcgcccctgcggctgcagctggaccggtctcaggctacgtctccagggcagaccaatggggacagctccttggaagtgctggcgactcgcttccagggctccgtgaggacatacactgagagtcagtcctccttaaggtcctcctactccagcccaacctccctcagcccgagggccggcagccccttctcaccaccaccctctagcagctccctcactggagaggcagccatcagccgcagcttccagagtctggcatgttccccgggcctccccgctgctgaccgcctgtcctactcaggccgccctggaagccgacaggccggcctcggccgcgctggcgactcggcggtgctggtgctgccgccttccccgggccctcgttcctccaggcccagcatggactcggaagggggaagcctcctcctggacgaggactcggaagtcttcaagatgctgcaggaaaatcgcgagggacgggcggccccccgacagtccagctcctttcggctcttgcaggaagccctggaggctgaggagagaggtggcacgccagccttcttgcccagctcactgagcccccagtcctccctgcccgcctccagggccctggccacccctcccaagctccacacttgtgagaagtgcagtaccagcatcgcgaaccaggctgtgcgcatccaggagggccggtaccgccaccccggctgctacacctgtgccgactgtgggctgaacctgaagatgcgcgggcacttctgggtgggtgacgagctgtactgtgagaagcatgcccgccagcgctactccgcacctgccaccctcagctctcgggcctgagcccgccatgccctcagcctgcctcactgctgggccagggtcatgcctatataagttggcatggcagggacaatggtgggcagttgctcttacatgagctaagtttggagacctgaggcccctttgtcctcgctgggtgggccaaggtctgggacctgtcttggactgtgggagactcaccctcaccttgccaggcctctcccctgcaggactggcattgcactagtctgaggtggccactgcctttgatcaacctttgtgtgcgagggtctaagtagggtcgaacacagaagtgggaaggagaggggtgggccaggggctaatggtgtcactgtgtaaagtttttgacatactagctctataaatatatgaatatgg

SEQ ID NO: 21765 - DNA, 1491 bp, Homo sapiens
  source 1..1491: mol_type = unassigned DNA
gggagcggtggcgtctccccgccttccctccctcccgggcctgggcgcccagccggacaggtgagcggcagccaggtatggcgttgacggtggatgtggccgggccagcgccctggggcttccgtatcacagggggcagggatttccacacgcccatcatggtgactaaggtggccgagcggggcaaagccaaggacgctgacctccggcctggagacataatcgtggccatcaacggggaaagcgcggagggcatgctgcatgccgaggcccagagcaagatccgccagagcccctcgcccctgcggctgcagctggaccggtctcaggctacgtctccagggcagaccaatggggacagctccttggaagtgctggcgactcgcttccagggctccgtgaggacatacactgagagtcagtcctccttaaggtcctcctactccagcccaacctccctcagcccgagggccggcagccccttctcaccaccaccctctagcagctccctcactggagaggcagccatcagccgcagcttccagagtctggcatgttccccgggcctccccgctgctgaccgcctgtcctactcaggccgccctggaagccgacaggccggcctcggccgcgctggcgactcggcggtgctggtgctgccgccttccccgggccctcgttcctccaggcccagcatggactcggaagggggaagcctcctcctggacgaggactcggaagtcttcaagatgctgcaggaaaatcgcgagggacgggcggccccccgacagtccagctcctttcggctcttgcaggaagccctggaggctgaggagagaggtggcacgccagccttcttgcccagctcactgagcccccagtcctccctgcccgcctccagggccctggccacccctcccaagctccacacttgtgagaagtgcagtaccagcatcgcgaaccaggctgtgcgcatccaggagggccggtaccgccaccccggctgctacacctgtgccgactgtgggctgaacctgaagatgcgcgggcacttctgggtgggtgacgagctgtactgtgagaagcatgcccgccagcgctactccgcacctgccaccctcagctctcgggcctgagcccgccatgccctcagcctgcctcactgctgggccagggtcatgcctatataagttggcatggcagggacaatggtgggcagttgctcttacatgagctaagtttggagacctgaggcccctttgtcctcgctgggtgggccaaggtctgggacctgtcttggactgtgggagactcaccctcaccttgccaggcctctcccctgcaggactggcattgcactagtctgaggtggccactgcctttgatcaacctttgtgtgcgagggtctaagtagggtcgaacacagaagtgggaaggagaggggtgggccaggggctaatggtgtcactgtgtaaagtttttgacatacta

SEQ ID NO: 21766 - DNA, 1463 bp, Homo sapiens
  source 1..1463: mol_type = unassigned DNA
aagcccctgagtagctgctccgggagctgtggtgccctctccttctccctttggctcctctcctgctgccttacagtgcccccagagccggctaggggcatggacttcacctcctggtcctctcttcctcaggtatggcgttgacggtggatgtggccgggccagcgccctggggcttccgtatcacagggggcagggatttccacacgcccatcatggtgactaaggtggccgagcggggcaaagccaaggacgctgacctccggcctggagacataatcgtggccatcaacggggaaagcgcggagggcatgctgcatgccgaggcccagagcaagatccgccagagcccctcgcccctgcggctgcagctggaccggtctcaggctacgtctccagggcagaccaatggggacagctccttggaagtgctggcgactcgcttccagggctccgtgaggacatacactgagagtcagtcctccttaaggtcctcctactccagcccaacctccctcagcccgagggccggcagccccttctcaccaccaccctctagcagctccctcactggagaggcagccatcagccgcagcttccagagtctggcatgttccccgggcctccccgctgctgaccgcctgtcctactcaggccgccctggaagccgacaggccggcctcggccgcgctggcgactcggcggtgctggtgctgccgccttccccgggccctcgttcctccaggcccagcatggactcggaagggggaagcctcctcctggacgaggactcggaagtcttcaagatgctgcaggaaaatcgcgagggacgggcggccccccgacagtccagctcctttcggctcttgcaggaagccctggaggctgaggagagaggaaccaggctgtgcgcatccaggagggccggtaccgccaccccggctgctacacctgtgccgactgtgggctgaacctgaagatgcgcgggcacttctgggtgggtgacgagctgtactgtgagaagcatgcccgccagcgctactccgcacctgccaccctcagctctcgggcctgagcccgccatgccctcagcctgcctcactgctgggccagggtcatgcctatataagttggcatggcagggacaatggtgggcagttgctcttacatgagctaagtttggagacctgaggcccctttgtcctcgctgggtgggccaaggtctgggacctgtcttggactgtgggagactcaccctcaccttgccaggcctctcccctgcaggactggcattgcactagtctgaggtggccactgcctttgatcaacctttgtgtgcgagggtctaagtagggtcgaacacagaagtgggaaggagaggggtgggccaggggctaatggtgtcactgtgtaaagtttttgacatactagctctataaatatatgaatatggacaaaataaa

SEQ ID NO: 21767 - DNA, 1487 bp, Homo sapiens
  source 1..1487: mol_type = unassigned DNA
tctcctgctgccttacagtgcccccagagccggctaggggcatggacttcacctcctggtcctctcttcctcaggtatggcgttgacggtggatgtggccgggccagcgccctggggcttccgtatcacagggggcagggatttccacacgcccatcatggtgactaaggtggccgagcggggcaaagccaaggacgctgacctccggcctggagacataatcgtggccatcaacggggaaagcgcggagggcatgctgcatgccgaggcccagagcaagatccgccagagcccctcgcccctgcggctgcagctggaccggtctcaggctacgtctccagggcagaccaatggggacagctccttggaagtgctggcgactcgcttccagggctccgtgaggacatacactgagagtcagtcctccttaaggtcctcctactccagcccaacctccctcagcccgagggccggcagccccttctcaccaccaccctctagcagctccctcactggagaggcagccatcagccgcagcttccagagtctggcatgttccccgggcctccccgctgctgaccgcctgtcctactcaggccgccctggaagccgacaggccggcctcggccgcgctggcgactcggcggtgctggtgctgccgccttccccgggccctcgttcctccaggcccagcatggactcggaagggggaagcctcctcctggacgaggactcggaagtcttcaagatgctgcaggaaaatcgcgagggacgggcggccccccgacagtccagctcctttcggctcttgcaggaagccctggaggctgaggagagaggtggcacgccagccttcttgcccagctcactgagcccccagtcctccctgcccgcctccagggccctggccacccctcccaagctccacacttgtgagaagtgcagtaccagcatcgcgaaccaggctgtgcgcatccaggagggccggtaccgccaccccggctgctacacctgtgccgactgtgggctgaacctgaagatgcgcgggcacttctgggtgggtgacgagctgtactgtgagaagcatgcccgccagcgctactccgcacctgccaccctcagctctcgggcctgagcccgccatgccctcagcctgcctcactgctgggccagggtcatgcctatataagttggcatggcagggacaatggtgggcagttgctcttacatgagctaagtttggagacctgaggcccctttgtcctcgctgggtgggccaaggtctgggacctgtcttggactgtgggagactcaccctcaccttgccaggcctctcccctgcaggactggcattgcactagtctgaggtggccactgcctttgatcaacctttgtgtgcgagggtctaagtagggtcgaacacagaagtgggaaggagaggggtgggccaggggctaatggtgtcactgtgtaaagtttttgacata

SEQ ID NO: 21768 - DNA, 2084 bp, Homo sapiens
  source 1..2084: mol_type = unassigned DNA
ggtctcattctgttgcccaggctggagtgcagtggtgcgatctcggctcacagcaacctctctgcctccagaaatgacctccaccttcaacccccgagaatgtaaactgtccaagcaagaagggcaaaactatggcttcttcctgcgaattgagaaggacaccgagggccacctggtccgggtggttgagaagtgtagcccagcagagaaggctggccttcaagatggagacagagttcttaggatcaatggtgtctttgtggacaaagaagaacatatgcaggttgtggatctggtcagaaagagtgggaattcagtgactttactagttctggatggggattcctatgagaaagcagtgaaaacacgggtggacttgaaagagttgggtcaaagtcagaaggagcaaggtttgagtgataatatactttcccctgtgatgaatggaggtgtgcaaacttggacccagccccggctctgctatctcgtgaaggaaggaggcagctatggcttctctctgaaaactgtccaaggtaaaaagggggtgtacatgactgatattacacctcaaggtgtggctatgagagctggagttctggctgatgatcacttgattgaagtgaatggagagaatgtagaggatgccagccatgaggaagtggttgaaaaggtgaagaagtcaggaagccgtgtcatgttcctgctggtggacaaagaaactgacaagcgtcatgttgagcagaagatacaattcaaaagagaaacagccagtttgaaactgttaccccaccagccccgaattgtggagatgaagaaaggaagcaatggctatggtttctatctgagggcaggctcagaacagaaaggtcaaatcatcaaggacatagattctggaagtccagcagaggaggctggcttgaagaacaatgatctggtagttgctgtcaacggcgagtctgtggaaaccctggatcatgacagtgtggtagaaatgattagaaagggtggagatcagacttcactgttggtggtagacaaagagacggacaacatgtacagactggctcatttttctccatttctctactatcaaagtcaagaactgcccaatggctctgtcaaggaggctccagctcctactcccacttctctggaagtctcaagtccaccagatactacagaggaagtagatcataagcctaaactctgcaggctggctaaaggtgaaaatggctatggctttcacttaaatgcgattcggggtctgccaggctcattcatcaaagaggtacagaagggcggtcctgctgacttggctgggctagaggatgaggatgtcatcattgaagtgaatggggtgaatgtgctagatgaaccctatgagaaggtggtggatagaatccagagcagtgggaagaatgtcacacttctagtctgtggaaagaaggcctatgattatttccaagctaagaaaatccctattgtttcctccctggctgatccacttgacacccctccagattctaaagaaggaatagtggtggagtcaaaccatgactcgcacatggcaaaagaacgggcccacagtacagcctcacattcttcttccaattctgaagatacagagatgtgatgaaaacaagtaatagctttggctgtttatttgatagctgtttctgggtatttaataggaatcctttctcaaggaatgagttgtgacctgtttactgtctctttagaagaaaaactccactggaaaccattcaccatgtgtgattgtcttctgttatcatttgtcttacaggcggctattgcagacggctaatttatgcttaacttaggaagagataaggcaagagctagatttttttcatgtgatcttttccaagcttcaacttaacttaactacatttctctgtatgatgatgtctcttacttctacaggttccttgagcaccaaagatgattcataactctgtataggtgacagctgcttataaaagcatcttagcagataagcctattaaaattgtgcttttgtaacaatgttgtggttgctagaataaataccattaacaaatgcc

SEQ ID NO: 21769 - DNA, 2032 bp, Homo sapiens
  source 1..2032: mol_type = unassigned DNA
cagagcagctcctcttccatctccagaaatgacctccaccttcaacccccgagaatgtaaactgtccaagcaagaagggcaaaactatggcttcttcctgcgaattgagaaggacaccgagggccacctggtccgggtggttgagaagtgtagcccagcagagaaggctggccttcaagatggagacagagttcttaggatcaatggtgtctttgtggacaaagaagaacatatgcaggttgtggatctggtcagaaagagtgggaattcagtgactttactagttctggatggggattcctatgagaaagcagtgaaaacacgggtggacttgaaagagttgggtcaaagtcagaaggagcaaggtttgagtgataatatactttcccctgtgatgaatggaggtgtgcaaacttggacccagccccggctctgctatctcgtgaaggaaggaggcagctatggcttctctctgaaaactgtccaaggtaaaaagggggtgtacatgactgatattacacctcaaggtgtggctatgagagctggagttctggctgatgatcacttgattgaagtgaatggagagaatgtagaggatgccagccatgaggaagtggttgaaaaggtgaagaagtcaggaagccgtgtcatgttcctgctggtggacaaagaaactgacaagcgtcatgttgagcagaagatacaattcaaaagagaaacagccagtttgaaactgttaccccaccagccccgaattgtggagatgaagaaaggaagcaatggctatggtttctatctgagggcaggctcagaacagaaaggtcaaatcatcaaggacatagattctggaagtccagcagaggaggctggcttgaagaacaatgatctggtagttgctgtcaacggcgagtctgtggaaaccctggatcatgacagtgtggtagaaatgattagaaagggtggagatcagacttcactgttggtggtagacaaagagacggacaacatgtacagactggctcatttttctccatttctctactatcaaagtcaagaactgcccaatggctctgtcaaggaggctccagctcctactcccacttctctggaagtctcaagtccaccagatactacagaggaagtagatcataagcctaaactctgcaggctggctaaaggtgaaaatggctatggctttcacttaaatgcgattcggggtctgccaggctcattcatcaaagaggtacagaagggcggtcctgctgacttggctgggctagaggatgaggatgtcatcattgaagtgaatggggtgaatgtgctagatgaaccctatgagaaggtggtggatagaatccagagcagtgggaagaatgtcacacttctagtctgtggaaagaaggcctatgattatttccaagctaagaaaatccctattgtttcctccctggctgatccacttgacacccctccagattctaaagaaggaatagtggtggagtcaaaccatgactcgcacatggcaaaagaacgggcccacagtacagcctcacattcttcttccaattctgaagatacagagatgtgatgaaaacaagtaatagctttggctgtttatttgatagctgtttctgggtatttaataggaatcctttctcaaggaatgagttgtgacctgtttactgtctctttagaagaaaaactccactggaaaccattcaccatgtgtgattgtcttctgttatcatttgtcttacaggcggctattgcagacggctaatttatgcttaacttaggaagagataaggcaagagctagatttttttcatgtgatcttttccaagcttcaacttaacttaactacatttctctgtatgatgatgtctcttacttctacaggttccttgagcaccaaagatgattcataactctgtataggtgacagctgcttataaaagcatcttagcagataagcctattaaaattgtgcttttgtaacaatgttgtggttgctagaataaataccattaac

SEQ ID NO: 21770 - DNA, 1010 bp, Homo sapiens
  source 1..1010: mol_type = unassigned DNA
gcaaggcagcaggatggaggggtttgtaaaaatgccttccacctaccctgctgggcttgcccgagaggctctgagtgtgtgaaggggaagacaattatcgctaggctggagaatagaaagagcaccatcagtccagtgagttgcaagcctaatgctcacctgcagagacagaattcctgagtgaacgaacagagcagctcctcttccatctccagaaatgacctccaccttcaacccccgagaatgtaaactgtccaagcaagaagggcaaaactatggcttcttcctgcgaattgagaaggacaccgagggccacctggtccgggtggttgagaagtgtagcccagcagagaaggctggccttcaagatggagacagagttcttaggatcaatggtgtctttgtggacaaagaagaacatatgcaggttgtggatctggtcagaaagagtgggaattcagtgactttactagttctggatggggattcctatgagaaagcagtgaaaacacgggtggacttgaaagagttgggtcaaagtcagaaggagcaaggtttgagtgataatatactttcccctgtgatgaatggaggtgtgcaaacttggacccagccccggctctgctatctcgtgaaggaaggaggcagctatggcttctctctgaaaactgtccaaggtaaaaagggggtgtacatgactgatattacacctcaaggtgtggctatgagagctggagttctggctgatgatcacttgattgaagtgaatggagagaatgtagaggatgccagccatgaggaagtggttgaaaaggtgaagaagtcaggaagccgtgtcatgttcctgctggtggacaaagaaactgacaagcgtcatgttgagcagaagatacaattcaaaagagaaacagccagtttgaaactgttaccccaccagccccgaattgtggagatgaagaaaggaagcaatggctatggtttctatctgagggcaggctcagaacagaaag

SEQ ID NO: 21771 - DNA, 1424 bp, Homo sapiens
  source 1..1424: mol_type = unassigned DNA
agagcagctcctcttccatctccagaaatgacctccaccttcaacccccgagaatgtaaactgtccaagcaagaagggcaaaactatggcttcttcctgcgaattgagaaggacaccgagggccacctggtccgggtggttgagaagtgtagcccagcagagaaggctggccttcaagatggagacagagttcttaggatcaatggtgtctttgtggacaaagaagaacatatgcaggttgtggatctggtcagaaagagtgggaattcagtgactttactagttctggatggggattcctatgagaaagcagtgaaaacacgggtggacttgaaagagttgggtcaaagtcagaaggagcaaggtttgagtgataatatactttcccctgtgatgaatggaggtgtgcaaacttggacccagccccggctctgctatctcgtgaaggaaggaggcagctatggcttctctctgaaaactgtccaaggtcaaatcatcaaggacatagattctggaagtccagcagaggaggctggcttgaagaacaatgatctggtagttgctgtcaacggcgagtctgtggaaaccctggatcatgacagtgtggtagaaatgattagaaagggtggagatcagacttcactgttggtggtagacaaagagacggacaacatgtacagactggctcatttttctccatttctctactatcaaagtcaagaactgcccaatggctctgtcaaggaggctccagctcctactcccacttctctggaagtctcaagtccaccagatactacagaggaagtagatcataagcctaaactctgcaggctggctaaaggtgaaaatggctatggctttcacttaaatgcgattcggggtctgccaggctcattcatcaaagaggtacagaagggcggtcctgctgacttggctgggctagaggatgaggatgtcatcattgaagtgaatggggtgaatgtgctagatgaaccctatgagaaggtggtggatagaatccagagcagtgggaagaatgtcacacttctagtctgtggaaagaaggcctatgattatttccaagctaagaaaatccctattgtttcctccctggctgatccacttgacacccctccagattctaaagaaggaatagtggtggagtcaaaccatgactcgcacatggcaaaagaacgggcccacagtacagcctcacattcttcttccaattctgaagatacagagatgtgatgaaaacaagtaatagctttggctgtttatttgatagctgtttctgggtatttaataggaatcctttctcaaggaatgagttgtgacctgtttactgtctctttagaagaaaaactccactggaaaccattcaccatgtgtgattgtcttctgttatcatttgtcttaca

SEQ ID NO: 21772 - DNA, 1043 bp, Homo sapiens
  source 1..1043: mol_type = unassigned DNA
ggagggtcagctcgttgcaccctggcccggcctcttttcgaccctgcggagcatccgcttccggttcccagactgaattgtcagtgagcggagtctgaggtcgctgtggactgcccactgggccttgcccgagatggacagccggattccttatgatgactacccggtggttttcttgcctgcctatgagaatcctccagcatggattcctcctcatgagagggtacaccacccggactacaacaatgagttgacccagtttctgccccgaaccatcacactgaagaagcctcctggagctcagttgggatttaacatccgaggaggaaaggcctcccagctaggcatcttcatctccaaggtgattcctgactctgatgcacatagagcaggactgcaggaaggggaccaagttctagctgtgaatgatgtggatttccaagatattgagcacagcaaggctgttgagatcctgaagacagctcgtgaaatcagcatgcgtgtgcgcttctttccctacaattatcatcgccaaaaagagaggactgtgcactagaaagttgcagcccacagcccttcatgtggactctgtcatgacatgctaactagacttcaggggagccacttctgttttcagcccctccctggaatagtgagttgggaggatggggagacagctaaccaactgcattacccaaaccatattgcacttttagttccctagttttctaggtgagcttcattccctgaaaggaggatgatgatatctaggcataacctagcctgtgaggaacctagttaggaaagacaactgacatttattgaatatcatgcactagtcccttacatatgtcatattttaattatagaaatcagtagcaaaaagaatcttggggattttccatctgacttccctggccatcttatcccatccttgcactaccagaagattcatacacttttgagactccagtgagacgctgttttcaccccttcctcctcctagcctctctcccaaaaagtaaaacacaatgctgaagaaa

SEQ ID NO: 21773 - DNA, 784 bp, Homo sapiens
  source 1..784: mol_type = unassigned DNA
ttttcgaccctgcggagcatccgcttccggttcccagactgaattgtcagtgagcggagtctgaggtcgctgtggactgcccactggattgtgaaaaatgaggtcctctttctagagtacctgacaggttgcttggcatccagaagatgtttagctaaggccttgcccgagatggacagccggattccttatgatgactacccggtggttttcttgcctgcctatgagaatcctccagcatggattcctcctcatgagagggtacaccacccggactacaacaatgagttgacccagtttctgccccgaaccatcacactgaagaagcctcctggagctcagttgggatttaacatccgaggaggaaaggcctcccagctaggcatcttcatctccaaggtgattcctgactctgatgcacatagagcaggactgcaggaaggggaccaagttctagctgtgaatgatgtggatttccaagatattgagcacagcaaggctgttgagatcctgaagacagctcgtgaaatcagcatgcgtgtgcgcttctttccctacaattatcatcgccaaaaagagaggactgtgcactagaaagttgcagcccacagcccttcatgtggactctgtcatgacatgctaactagacttcaggggagccacttctgttttcagcccctccctggaatagtgagttgggaggatggggagacagctaaccaactgcattacccaaaccatattgcacttttagttccctagttttctaggtgagcttcattcc

SEQ ID NO: 21774 - DNA, 11641 bp, Homo sapiens
  source 1..11641: mol_type = unassigned DNA
gctggagggatcctccattcctgtgtcatttgcatgggtcctgctgtgaaatgaacctggcagggacttgttagacacttccttccttccctcattgagcactccagtgccattgttccacagttgttctaattgggtcctagcttcctcctgccaaggcaaacagcatagtctcgagtaggtgtccctaggctcatctgccagcctgaacatgaacacaggcaaagctgatgatggccagggaccccaggggacgtggggccctgtggggtctggcccccaggagcaagacctctgatgatgctggtgtctgggagtgagcaccatgcccatcacccaggacaatgccgtgctgcacctgcccctcctctaccagtggctgcagaacagcctgcaggaaggtggggatgggccggagcagcggctctgccaggcggccatccagaagctgcaggagtacatccagctgaactttgctgtggatgagagtacggtcccacctgatcacagcccccccgaaatggagatctgtactgtgtacctcaccaaggagctgggggacacagagactgtgggcctgagttttgggaacatccctgttttcggggactatggtgaaaagcgcagggggggcaagaagaggaaaacccaccagggtcctgtgctggatgtgggctgcatctgggtgacagagctgaggaagaacagcccagcagggaagagtgggaaggtccgactgcgggatgagatcctctcactgaatgggcagctgatggttggagttgatgtcagtggggccagttacctggctgagcagtgctggaatggcggctttatctacctgatcatgctgcgtcgctttaagcacaaagcccactccacttataatggcaacagtagcaacagctctgaaccaggagaaacacctaccttggagctgggtgaccgaactgcgaaaaaggggaaacgaaccagaaagtttggggtcatctccaggcctcctgccaacaaggcccctgaagaatccaagggcagcgctggctgtgaggtgtccagtgaccccagcactgagctggagaacggccctgaccctgaacttggaaacggccatgtctttcagctagaaaatggcccagattctctcaaggaggtggctggaccccatctagagaggtcagaagtggacagagggacagagcatagaattccaaagacagatgctcctctgaccacaagcaatgacaaacgccgcttctcaaaaggtgggaagacggacttccaatcgagtgactgcctggcacgggaggaagttggccgaatatggaagatggagctgctcaaagaatcggatgggctgggaattcaggttagtggaggccgaggatcaaagcgctcacctcacgctatcgttgtcactcaagtgaaggaaggaggtgccgctcacagggatggcaggctgtccttaggagatgagctgctggtaatcaatggtcatttactggtcgggctctcccacgaggaagcagtggccattcttcgctccgccacgggaatggtgcagcttgtggtggccagcaaggaaaactccgcagaggacctcctcaggttaacatctaagagcttgccagatctgaccagctcggtagaagatgtgtcctcctggactgataacgaagaccaggaggcagacggggaagaggacgaaggaaccagctcttctgtccagagagcaatgcctgggacagatgaaccccaagatgtgtgcggtgctgaggaatccaaggggaacttggaaagtcccaaacagggcagcaataaaatcaagctcaagagtcgcctttcagggggtgtacaccgccttgagtcagttgaagaatataacgagctgatggtgcggaatggggacccccggatccggatgttggaggtctcccgagatggccggaaacactccctcccgcagctgctggactcttccagtgcctcacaggaataccacattgtgaagaagtctacccgctccttaagcacgactcaggtggaatctccttggaggctcattcggccatccgtcatctcgatcattgggttgtacaaagaaaaaggcaagggccttggctttagtattgctggaggtcgagactgcattcgtggacagatggggatttttgtcaagaccatcttcccaaatggatcagctgcagaggacggaagacttaaagaaggggatgaaatcctagatgtaaatggaataccaataaagggcttgacatttcaagaagccattcatacctttaagcaaatccggagtggattatttgttttaacggtacgcacaaagttggtgagccccagcctcacaccctgctcgacacccacacacatgagcagatccgcctccccgaacttcaataccagtgggggagcctcagcgggaggttccgatgaaggcagttcttcatccctgggtcggaagacccctgggcccaaggacaggatcgtcatggaagtaacactcaacaaagagccaagagttggattaggcattggtgcctgctgcttggctctggaaaacagtcctcctggcatctacattcacagccttgctccaggatcagtggccaagatggagagcaacctgagccgcggggatcaaatcctggaagtgaactccgtcaacgtccgccatgctgctttaagcaaagtccacgccatcttgagtaaatgccctccaggacccgttcgccttgtcatcggccggcaccctaatccaaaggtttccgagcaggaaatggatgaagtcatagcacgcagcacttatcaggagagcaaagaggccaattcctctcctggcttaggtacccccttgaagagtccctctcttgcaaaaaaggactcccttatttctgaatctgaactctcccagtactttgcccacgatgtccctggccccttgtcagacttcatggtggccggttctgaggacgaggatcacccgggaagtggctgcagcacgtcggaggagggcagcctgcctcccagcacctccactcacaaggagcctggaaaacccagagccaacagcctcgtgactcttgggagccatcgggcttctgggctcttccacaagcaggtgacagttgccagacaagccagtctccccggaagcccacaggccctccgaaaccctctcctccgccagaggaaggtaggctgctacgatgccaacgatgccagtgatgaggaagagtttgacagagaaggggactgcatttcactcccaggggccctcccgggtcccatcaggcctctgtcagaggatgacccgaggcgtgtctcaatttcctcttccaagggcatggacgtccacaaccaagaggaacgaccccggaaaacactggtgagcaaggccatctcggcacctcttcttggtagctcagtggacttagaggagagtatcccagagggcatggtggatgctgcgtcctatgcagccaacctcacggactctgcagaggcccccaaggggagccctggaagctggtggaagaaggaactgtcaggatcaagtagcgcacccaaattggaatacacagtccgtacagacacccagagtccgacgaacactgggagccccagttccccccagcagaaaagtgaaggcctgggctccaggcacagaccagtggccagggtaagcccccactgcaagagatccgaggctgaggccaagcccagtggctcacagacagtgaacctgactggcagagccaatgatccatgcgatctggactcgagagtccaggccacttctgtcaaagtgactgtcgctggctttcagccaggtggagctgtggagaaggaatctctgggaaagctgaccactggagatgcttgtgtctctaccagctgtgaactagccagtgctctgtcccatctggatgccagccacctcacagagaacctgcccaaagctgcatcagagctggggcaacaacccatgactgaactggacagctcctcagacctcatctcttccccagggaagaagggggccgctcatcctgaccccagcaagacctctgtagacacagggcaagtcagtcggccagagaatcccagccagcctgcatcgcccagggtcaccaagtgcaaggccaggtctccagtcaggctcccccatgagggcagcccctccccgggggagaaagcagcggctccccctgactacagcaagactcgatcagcatcggaaaccagcacaccccacaataccaggagggtggctgccctcaggggagcgggacctggagcagagggaatgacaccagctggtgctgtcctgccaggagaccccctcacatcccaggagcagagacagggagctccaggtaaccacagtaaggctctggaaatgacaggaatccatgcacctgaaagctcccaggagccttccctgctggagggagcagattctgtgtcctcaagggcaccgcaggccagcctctccatgctgccatccactgacaacaccaaagaagcatgtggccatgtctcggggcactgctgcccaggggggagtagagagagccctgtgacggacattgacagcttcatcaaggagctggatgcttctgcagcaaggtctccgtcttcccagacgggggacagtggctctcaggagggcagtgctcagggccacccaccagccggggctggaggtgggagctcctgccgtgccgaaccagtcccggggggccagacctcctccccgaggagggcctgggctgctggtgcccccgcctacccacaatgggcctcccagccttcggttttagattcaattaatcccgacaaacattttactgtgaacaaaaactttctgagcaactactctagaaattttagcagttttcatgaagacagcacctccctatcaggcctgggtgacagcacggagccgtctctgtcatccatgtatggcgatgctgaggattcttcttctgaccctgagtcactcactgaagccccacgagcttctgccagggacggctggtcccctcctcgttcccgtgtgtctttgcacaaggaagatccttcggagtcagaagaggaacagattgagatttgttccacacgtggctgccccaatccaccctcgagtcctgctcatcttcccacccaggctgccatctgtcctgcctcagccaaagttctgtcattaaaatacagcactccgagagagtcggtggccagtccccgtgagaaggccgcctgcttgccaggctcatacacttcaggcccagactcttcccagccatcatcactcttggagatgagctctcaggagcatgaaactcatgcggacataagcacttcacagaaccacaggccctcgtgtgcagaagaaaccacagaagtcaccagcgctagctcagccatggaaaacagtccgctgtctaaagtagccaggcattttcacagtccgcccatcattctcagctcccccaacatggtaaatggcttggaacatgacctgctagatgacgaaaccctgaatcaatacgaaacaagcattaatgcagctgccagtctgtcctccttcagtgtggatgtccctaagaatggagaatctgttttggaaaacctccacatctctgaaagtcaagacctggatgacttgctacagaaaccaaaaatgatcgctaggaggcccatcatggcctggtttaaagaaataaataaacataaccaaggcacacatttgaggagcaaaaccgagaaggaacaacctctaatgcctgccagaagtcccgactccaagattcagatggtgagttcaagccaaaaaaagggcgttactgtgcctcatagccctcctcagccgaaaacaaacctggaaaataaggacctgtctaagaagagtccggcagaaatgcttctgactaatggtcagaaggcaaagtgtggtccgaagctgaagaggctcagcctcaagggcaaggccaaagtcaactctgaggcccctgctgcgaatgctgtgaaggctggggggacggaccacaggaaacccttgatctcaccccagacctcccacaaaacactttctaaggcagtgtcacagcggctccatgtagccgaccacgaggaccctgacagaaacaccacagctgcccccaggtccccccagtgtgtgctggaaagcaagccacctcttgccacctctgggccactgaaaccctcagtgtctgacacgagcatcaggacatttgtctcgcccctgacctctcccaagcctgttcctgagcaaggcatgtggagcaggttccacatggctgtcctctctgaacccgacagaggttgcccaaccacccctaaatctcctaagtgtagagcagagggcagggcgccccgtgctgactccgggccggtgagtccggcagcgtctaggaacggcatgtccgtggcagggaacagacagagtgagccgcgcctggccagccatgtggcagcagacacagcccaacccaggccgactggcgaaaaaggaggcaacataatggccagcgatcgcctcgaaagaacaaaccagctgaaaatcgtggagatttctgctgaagcagtgtcagagactgtatgtggtaacaagccagctgaaagcgacagacggggagggtgcttggcccagggcaactgtcaggagaagagtgaaatcaggctctatcgccaggtcgcagaatcatccacaagtcatccatcctcactcccatctcatgcctcccaggcagagcaggaaatgtcacgatcattcagcatggcaaaactggcgtcctcctcctcctcccttcaaacagccattagaaaggcagaatactcccagggaaaatcaagcctgatgtcagactcccgaggggtgcccagaaacagcattccagggggcccctcgggggaggaccatctctacttcaccccaaggccagcgaccaggacctactccatgccagcccagttctcaagccattttggacgggagggtcaccccccacacagcctgggtcgctctcgggacagccaggtccctgtgacaagcagtgttgtccccgaggcaaaggcatccagaggtggtcttcccagcctggctaatggacagggcatatatagtgtaaagccgctgctggacacatcgaggaatcttccagccacagatgaaggggatatcatttcagtccaggagacgagctgcctagtcacagacaaaatcaaagtcaccagacgacactactgctatgagcagaactggccccatgaatctacctcatttttctctgtgaagcagcggatcaagtcttttgagaacctggccaatgctgaccggcctgtagccaagtccggggcttccccatttttgtcggtgagctccaagcctcccattgggaggcggtcttccggcagcattgtttccgggagcctgggccacccaggtgacgcagcagcaaggttgttgagacgcagcttgagttcctgcagcgaaaaccaaagcgaagccggcaccctcctgccccagatggccaagtctccctcaatcatgacactgaccatctctcggcagaacccaccagagaccagtagcaagggctctgattcggaactaaagaaatcacttggtcctttgggaattcccaccccaacgatgaccctggcttctcctgttaagaggaacaagtcctcggtacgccacacgcagccctcgcccgtgtcccgctccaagctccaggagctgagagccttgagcatgcctgaccttgacaagctctgcagcgaggattactcagcagggccgagcgccgtgctcttcaaaactgagctggagatcacccccaggaggtcacctggccctcctgctggaggcgtttcgtgtcccgagaagggcgggaacagggcctgtccaggaggaagtggccctaaaaccagtgctgctgagacacccagttcagccagtgatacgggtgaagctgcccaggatctgccttttagaagaagctggtcagttaatttggatcaacttctagtctcagcgggggaccagcaaagattacagtctgttttatcgtcagtgggatcgaaatctaccatcctaactctcattcaggaagcgaaagcacaatcagagaatgaagaagatgtttgcttcatagtcttgaatagaaaagaaggctcaggtctgggattcagtgtggcaggagggacagatgtggagccaaaatcaatcacggtccacagggtgttttctcagggggcggcttctcaggaagggactatgaaccgaggggatttccttctgtcagtcaacggcgcctcactggctggcttagcccacgggaatgtcctgaaggttctgcaccaggcacagctgcacaaagatgccctcgtggtcatcaagaaagggatggatcagcccaggccctctgcccggcaggagcctcccacagccaatgggaagggtttgctgtccagaaagaccatccccctggagcctggcattgggagaagtgtggctgtacacgatgctctgtgtgttgaagtgctgaagacctcggctgggctgggactgagtctggatgggggaaaatcatcggtgacgggagatgggcccttggtcattaaaagagtgtacaaaggtggtgcggctgaacaagctggaataatagaagctggagatgaaattcttgctattaatgggaaacctctggttgggctcatgcactttgatgcctggaatattatgaagtctgtcccagaaggacctgtgcagttattaattagaaagcataggaattcttcatgaattttaacaagaatcattttctcagttctcttctttctttagcaaatcagagtgacttctttaaaccacaggttgttgaaatggccaacactggtacagacacggactataaaaatctccaagcttgtgcttacacatgaagcctgacttaactgtatgtgcaacagcaatgaaattaactccagaagccttccacctgcgtcacccaggccgggagggttccttcgttccagtgcctgtcccctacctttatgttatgtttactgatggggatacaagatgtgacacacccttctttatttgaaacaaacaaacatttagctagacctttgcttccttcttgccagctctcccaacatacccaatcctggtgatcagggaactaaaagtctgagggggacacaaatgtcacacctaagaggacaatcaatcattttgtatgattttgtaagtaaatgacagaatgcttttaggcacattcaatggaaggaggagatgtaggtctgtatatgttaccctgaaaagagaataagacttacttaaaaaaatgaattatgacctgttaggctgagctcaggaattgtccaaaaaggaaaaagcaaaataattaattgagagtattttttagtgagtgtaatgtataatgtacgtatgcaaagttcaactcaataggttattgatcaccatgaagtattgatcattttctatctcaaaagtgtaagccataaggctgttttacagaatagcacttctgataagctgtattaaatagccatgagcttcactgcttagagggagcagaaaggtcaacatctaaaagcaccttacaactagtttttgaacctgtcttgataagtgcttgaattcaagactggtcagtccaagagcagacaaaaatatcacaagtcagtcagtcactgggtttccatttctgaattttatgcactccaaccatgaatttaaactaaatttttagaaatcaagtatctttctaagtgtccttggatttatagacaatgtatgtacaatccaaatagaggagcttaatggaatccttttaggagactggttggtttttttccctctttcccaacatgtttaagaaatgtaacattctaagtattggatctcttttcttgacctagtataatgacaactgcagtgacttaagtttttgctgttttcgttttcccgctttgcaatttcctccttttgccaaaaatgttttcctacagaagactgtcgtgactcacgctacttgggaaactcactctggccactcctcctctggtggcatgagctgcttcccagtagctattccgattggatattccgttcgtcgtcacatagctggcttttctctcctcatgatgtaccttattttcttaggtaaataattccaaactctcatcgggtcataaagaggaggagaaacagggtgagtcaaggtaaaggagcagaaatgtagttacaagccaggtcgtcttcagtggcacaaaccaacccgttgagccctgacaacatgagtggagagtgcatttgccatacctgtgtgcatgacactaagattttatgttggagatacttctttaaataacctacagcttgggtctatggctgtgacccccagattcatggaggggctttagccatcagctttgtacatcatcatttttctgaatgaccaatcccactaaacatctttgaagtcggcctagagaggtccttcagatgagagagaaatagctggcttgtctgagtccagatttctcatcaactggcaatacaaaggaaaatatggtacaggagttagttagaaaggtcttattgattttacttctacttttcactacagttacaggtagaatactgtaggaagtcagtgcaaggtgcatgcttgattgatagatattgattgattgtttttcagtctctggggtcagttttgtggtttctgctttcttgcctaaatcaaagactatttcaagtcaacaacactgaaaactgcttttcgcctccactcttacagctgtgcctaataataattaattaataaacgcacagccctatgtgaacagacaggaatttcttgtgcaatgtggagcaaatggaatggtctccttccgcaagtctttttaatcctcatatctggagtacaagggtagacctctggcttaccacatacactatgctaaagtcatcagccactgctactacatcttgccagaaggtttccctcgccaacaaacagttgaaatttaagggaagaagcaaaagctaaactgtctttgaccctaagatagatagaaagctatttatttgtcttcagtgttcaaggcatgactagtatttctaattagcctaataaattcccacactttctgaagtgaacactaatggtattgtcctactaaaactgtcattgtttctttttttttaactggtcagtcattcacaataagctatgagggtaaataaatatgtgttataacaagtaaaccgtagttgcaagaatataccatgaagattaaagtaggctgggtttcatttccatcttcccacacatctcattgaatttgatggttgacttaattggcaccataactttgtatgatattatacattaacctttatttatgtaaagtaaaatgccttatatattaaagagtaagtgcaataatatgaaatagcctgtacattttaaaaatgttgtcaccaagttatataaatccacatctctgtaaacaaccttttttaagtaattttaaaaaaaataaacactctgcttactacttg

SEQ ID NO: 21775 - DNA, 11107 bp, Homo sapiens
  source 1..11107: mol_type = unassigned DNA
gcgggagcctcggccaagccgcgagcaggtgtgaatgagcccagggaaggacacacggccactgctggagggatcctccattcctgtgtcatttgcatgggtcctgctgtgaaatgaacctggcagggacttgttagacacttccttccttccctcattgagcactccagtgccattgttccacagttgttctaattgggtcctagcttcctcctgccaaggcaaacagcatagtctcgagtaggtgtccctaggctcatctgccagcctgaacatgaacacaggcaaagctgatgatggccagggaccccaggggacgtggggccctgtggggtctggcccccaggagcaagacctctgatgatgctggtgtctgggagtgagcaccatgcccatcacccaggacaatgccgtgctgcacctgcccctcctctaccagtggctgcagaacagcctgcaggaaggtggggatgggccggagcagcggctctgccaggcggccatccagaagctgcaggagtacatccagctgaactttgctgtggatgagagtacggtcccacctgatcacagcccccccgaaatggagatctgtactgtgtacctcaccaaggagctgggggacacagagactgtgggcctgagttttgggaacatccctgttttcggggactatggtgaaaagcgcagggggggcaagaagaggaaaacccaccagggtcctgtgctggatgtgggctgcatctgggtgacagagctgaggaagaacagcccagcagggaagagtgggaaggtccgactgcgggatgagatcctctcactgaatgggcagctgatggttggagttgatgtcagtggggccagttacctggctgagcagtgctggaatggcggctttatctacctgatcatgctgcgtcgctttaagcacaaagcccactccacttataatggcaacagtagcaacagctctgaaccaggagaaacacctaccttggagctgggtgaccgaactgcgaaaaaggggaaacgaaccagaaagtttggggtcatctccaggcctcctgccaacaaggcccctgaagaatccaagggcagcgctggctgtgaggtgtccagtgaccccagcactgagctggagaacggccctgaccctgaacttggaaacggccatgtctttcagctagaaaatggcccagattctctcaaggaggtggctggaccccatctagagaggtcagaagtggacagagggacagagcatagaattccaaagacagatgctcctctgaccacaagcaatgacaaacgccgcttctcaaaaggtgggaagacggacttccaatcgagtgactgcctggcacgggaggaagttggccgaatatggaagatggagctgctcaaagaatcggatgggctgggaattcaggttagtggaggccgaggatcaaagcgctcacctcacgctatcgttgtcactcaagtgaaggaaggaggtgccgctcacagggaataccacattgtgaagaagtctacccgctccttaagcacgactcaggtggaatctccttggaggctcattcggccatccgtcatctcgatcattgggttgtacaaagaaaaaggcaagggccttggctttagtattgctggaggtcgagactgcattcgtggacagatggggatttttgtcaagaccatcttcccaaatggatcagctgcagaggacggaagacttaaagaaggggatgaaatcctagatgtaaatggaataccaataaagggcttgacatttcaagaagccattcatacctttaagcaaatccggagtggattatttgttttaacggtacgcacaaagttggtgagccccagcctcacaccctgctcgacacccacacacatgagcagatccgcctccccgaacttcaataccagtgggggagcctcagcgggaggttccgatgaaggcagttcttcatccctgggtcggaagacccctgggcccaaggacaggatcgtcatggaagtaacactcaacaaagagccaagagttggattaggcattggtgcctgctgcttggctctggaaaacagtcctcctggcatctacattcacagccttgctccaggatcagtggccaagatggagagcaacctgagccgcggggatcaaatcctggaagtgaactccgtcaacgtccgccatgctgctttaagcaaagtccacgccatcttgagtaaatgccctgtttccgagcaggaaatggatgaagtcatagcacgcagcacttatcaggagagcaaagaggccaattcctctcctggcttaggtacccccttgaagagtccctctcttgcaaaaaaggactcccttatttctgaatctgaactctcccagtactttgcccacgatgtccctggccccttgtcagacttcatggtggccggttctgaggacgaggatcacccgggaagtggctgcagcacgtcggaggagggcagcctgcctcccagcacctccaaggagcctggaaaacccagagccaacagcctcgtgactcttgggagccatcgggcttctgggctcttccacaagcaggtgacagttgccagacaagccagtctccccggaagcccacaggccctccgaaaccctctcctccgccagaggaaggtaggctgctacgatgccaacgatgccagtgatgaggaagagtttgacagagaaggggactgcatttcactcccaggggccctcccgggtcccatcaggcctctgtcagaggatgacccgaggcgtgtctcaatttcctcttccaagggcatggacgtccacaaccaagaggaacgaccccggaaaacactggtgagcaaggccatctcggcacctcttcttggtagctcagtggacttagaggagagtatcccagagggcatggtggatgctgcgtcctatgcagccaacctcacggactctgcagaggcccccaaggggagccctggaagctggtggaagaaggaactgtcaggatcaagtagcgcacccaaattggaatacacagtccgtacagacacccagagtccgacgaacactgggagccccagttccccccagcagaaaagtgaaggcctgggctccaggcacagaccagtggccagggtaagcccccactgcaagagatccgaggctgaggccaagcccagtggctcacagacagtgaacctgactggcagagccaatgatccatgcgatctggactcgagagtccaggccacttctgtcaaagtgactgtcgctggctttcagccaggtggagctgtggagaagttgtgccaggaatctctgggaaagctgaccactggagatgcttgtgtctctaccagctgtgaactagccagtgctctgtcccatctggatgccagccacctcacagagaacctgcccaaagctgcatcagagctggggcaacaacccatgactgcctcagacctcatctcttccccagggaagaagggggccgctcatcctgaccccagcaagacctctgtagacacagggcaagtcagtcggccagagaatcccagccagcctgcatcgcccagggtcaccaagtgcaaggccaggtctccagtcaggctcccccatgagggcagcccctccccgggggagaaagcagcggctccccctgactacagcaagactcgatcagcatcggaaaccagcacaccccacaataccaggagggtggctgccctcaggggagcgggacctggagcagagggaatgacaccagctggtgctgtcctgccaggagaccccctcacatcccaggagcagagacagggagctccaggtaaccacagtaaggctctggaaatgacaggaatccatgcacctgaaagctcccaggagccttccctgctggagggagcagattctgtgtcctcaagggcaccgcaggccagcctctccatgctgccatccactgacaacaccaaagaagcatgtggccatgtctcggggcactgctgcccaggggggagtagagagagccctgtgacggacattgacagcttcatcaaggagctggatgcttctgcagcaaggtctccgtcttcccagacgggggacagtggctctcaggagggcagtgctcagggccacccaccagccggggctggaggtgggagctcctgccgtgccgaaccagtcccggggggccagacctcctccccgaggagggcctgggctgctggtgcccccgcctacccacaatgggcctcccagccttcggttttagattcaattaatcccgacaaacattttactgtgaacaaaaactttctgagcaactactctagaaattttagcagttttcatgaagacagcacctccctatcaggcctgggtgacagcacggagccgtctctgtcatccatgtatggcgatgctgaggattcttcttctgaccctgagtcactcactgaagccccacgagcttctgccagggacggctggtcccctcctcgttcccgtgtgtctttgcacaaggaagatccttcggagtcagaagaggaacagattgagatttgttccacacgtggctgccccaatccaccctcgagtcctgctcatcttcccacccaggctgccatctgtcctgcctcagccaaagttctgtcattaaaatacagcactccgagagagtcggtggccagtccccgtgagaaggccgcctgcttgccaggctcatacacttcaggcccagactcttcccagccatcatcactcttggagatgagctctcaggagcatgaaactcatgcggacataagcacttcacagaaccacaggccctcgtgtgcagaagaaaccacagaagtcaccagcgctagctcagccatggaaaacagtccgctgtctaaagtagccaggcattttcacagtccgcccatcattctcagctcccccaacatggtaaatggcttggaacatgacctgctagatgacgaaaccctgaatcaatacgaaacaagcattaatgcagctgccagtctgtcctccttcagtgtggatgtccctaagaatggagaatctgttttggaaaacctccacatctctgaaagtcaagacctggatgacttgctacagaaaccaaaaatgatcgctaggaggcccatcatggcctggtttaaagaaataaataaacataaccaaggcacacatttgaggagcaaaaccgagaaggaacaacctctaatgcctgccagaagtcccgactccaagattcagatggtgagttcaagccaaaaaaagggcgttactgtgcctcatagccctcctcagccgaaaacaaacctggaaaataaggacctgtctaagaagagtccggcagaaatgcttctgactaatggtcagaaggcaaagtgtggtccgaagctgaagaggctcagcctcaagggcaaggccaaagtcaactctgaggcccctgctgcgaatgctgtgaaggctggggggacggaccacaggaaacccttgatctcaccccagacctcccacaaaacactttctaaggcagtgtcacagcggctccatgtagccgaccacgaggaccctgacagaaacaccacagctgcccccaggtccccccagtgtgtgctggaaagcaagccacctcttgccacctctgggccactgaaaccctcagtgtctgacacgagcatcaggacatttgtctcgcccctgacctctcccaagcctgttcctgagcaaggcatgtggagcaggttccacatggctgtcctctctgaacccgacagaggttgcccaaccacccctaaatctcctaagtgtagagcagagggcagggcgccccgtgctgactccgggccggtgagtccggcagcgtctaggaacggcatgtccgtggcagggaacagacagagtgagccgcgcctggccagccatgtggcagcagacacagcccaacccaggccgactggcgaaaaaggaggcaacataatggccagcgatcgcctcgaaagaacaaaccagctgaaaatcgtggagatttctgctgaagcagtgtcagagactgtatgtggtaacaagccagctgaaagcgacagacggggagggtgcttggcccagggcaactgtcaggagaagagtgaaatcaggctctatcgccaggtcgcagaatcatccacaagtcatccatcctcactcccatctcatgcctcccaggcagagcaggaaatgtcacgatcattcagcatggcaaaactggcgtcctcctcctcctcccttcaaacagccattagaaaggcagaatactcccagggaaaatcaagcctgatgtcagactcccgaggggtgcccagaaacagcattccagggggcccctcgggggaggaccatctctacttcaccccaaggccagcgaccaggacctactccatgccagcccagttctcaagccattttggacgggagggtcaccccccacacagcctgggtcgctctcgggacagccaggtccctgtgacaagcagtgttgtccccgaggcaaaggcatccagaggtggtcttcccagcctggctaatggacagggcatatatagtgtaaagccgctgctggacacatcgaggaatcttccagccacagatgaaggggatatcatttcagtccaggagacgagctgcctagtcacagacaaaatcaaagtcaccagacgacactactgctatgagcagaactggccccatgaatctacctcatttttctctgtgaagcagcggatcaagtcttttgagaacctggccaatgctgaccggcctgtagccaagtccggggcttccccatttttgtcggtgagctccaagcctcccattgggaggcggtcttccggcagcattgtttccgggagcctgggccacccaggtgacgcagcagcaaggttgttgagacgcagcttgagttcctgcagcgaaaaccaaagcgaagccggcaccctcctgccccagatggccaagtctccctcaatcatgacactgaccatctctcggcagaacccaccagagaccagtagcaagggctctgattcggaactaaagaaatcacttggtcctttgggaattcccaccccaacgatgaccctggcttctcctgttaagaggaacaagtcctcggtacgccacacgcagccctcgcccgtgtcccgctccaagctccaggagctgagagccttgagcatgcctgaccttgacaagctctgcagcgaggattactcagcagggccgagcgccgtgctcttcaaaactgagctggagatcacccccaggaggtcacctggccctcctgctggaggcgtttcgtgtcccgagaagggcgggaacagggcctgtccaggaggaagtggccctaaaaccagtgctgctgagacacccagttcagccagtgatacgggtgaagctgcccaggatctgccttttagaagaagctggtcagttaatttggatcaacttctagtctcagcgggggaccagcaaagattacagtctgttttatcgtcagtgggatcgaaatctaccatcctaactctcattcaggaagcgaaagcacaatcagagaatgaagaagatgtttgcttcatagtcttgaatagaaaagaaggctcaggtctgggattcagtgtggcaggagggacagatgtggagccaaaatcaatcacggtccacagggtgttttctcagggggcggcttctcaggaagggactatgaaccgaggggatttccttctgtcagtcaacggcgcctcactggctggcttagcccacgggaatgtcctgaaggttctgcaccaggcacagctgcacaaagatgccctcgtggtcatcaagaaagggatggatcagcccaggccctctgcccggcaggagcctcccacagccaatgggaagggtttgctgtccagaaagaccatccccctggagcctggcattgggagaagtgtggctgtacacgatgctctgtgtgttgaagtgctgaagacctcggctgggctgggactgagtctggatgggggaaaatcatcggtgacgggagatgggcccttggtcattaaaagagtgtacaaaggtggtgcggctgaacaagctggaataatagaagctggagatgaaattcttgctattaatgggaaacctctggttgggctcatgcactttgatgcctggaatattatgaagtctgtcccagaaggacctgtgcagttattaattagaaagcataggaattcttcatgaattttaacaagaatcattttctcagttctcttctttctttagcaaatcagagtgacttctttaaaccacaggttgttgaaatggccaacactggtacagacacggactataaaaatctccaagcttgtgcttacacatgaagcctgacttaactgtatgtgcaacagcaatgaaattaactccagaagccttccacctgcgtcacccaggccgggagggttccttcgttccagtgcctgtcccctacctttatgttatgtttactgatggggatacaagatgtgacacacccttctttatttgaaacaaacaaacatttagctagacctttgcttccttcttgccagctctcccaacatacccaatcctggtgatcagggaactaaaagtctgagggggacacaaatgtcacacctaagaggacaatcaatcattttgtatgattttgtaagtaaatgacagaatgcttttaggcacattcaatggaaggaggagatgtaggtctgtatatgttaccctgaaaagagaataagacttacttaaaaaaatgaattatgacctgttaggctgagctcaggaattgtccaaaaaggaaaaagcaaaataattaattgagagtattttttagtgagtgtaatgtataatgtacgtatgcaaagttcaactcaataggttattgatcaccatgaagtattgatcattttctatctcaaaagtgtaagccataaggctgttttacagaatagcacttctgataagctgtattaaatagccatgagcttcactgcttagagggagcagaaaggtcaacatctaaaagcaccttacaactagtttttgaacctgtcttgataagtgcttgaattcaagactggtcagtccaagagcagacaaaaatatcacaagtcagtcagtcactgggtttccatttctgaattttatgcactccaaccatgaatttaaactaaatttttagaaatcaagtatctttctaagtgtccttggatttatagacaatgtatgtacaatccaaatagaggagcttaatggaatccttttaggagactggttggtttttttccctctttcccaacatgtttaagaaatgtaacattctaagtattggatctcttttcttgacctagtataatgacaactgcagtgacttaagtttttgctgttttcgttttcccgctttgcaatttcctccttttgccaaaaatgttttcctacagaagactgtcgtgactcacgctacttgggaaactcactctggccactcctcctctggtggcatgagctgcttcccagtagctattccgattggatattccgttcgtcgtcacatagctggcttttctctcctcatgatgtaccttattttcttaggtaaataattccaaactctcatcgggtcataaagaggaggagaaacagggtgagtcaaggtaaaggagcagaaatgtagttacaagccaggtcgtcttcagtggcacaaaccaacccgttgagccctgacaacatgagtggagagtgcatttgccatacctgtgtgcatgacactaagattttatgttggagatacttctttaaataacctacagcttgggtctatggctgtgacccccagattcatggaggggctttagccatcagctttgtacatcatcatttttctgaatgaccaatcccactaaacatctttgaagtcggcctagagaggtccttcagatgagagagaaatagctggcttgtctgagtccagatttctcatcaactggcaatacaaaggaaaatatggtacaggagttagttagaaaggtcttattgattttacttctacttttcactacagttacaggtagaatactgtaggaagtcagtgcaaggtgcatgcttgattgatagatattgattgattgtttttcagtctctggggtcagttttgtggtttctgctttcttgcctaaatcaaagactatttcaagtcaacaacactgaaaactgcttttcgcctccactcttacagctgtgcctaataataattaattaataaacgcacagccctatgtgaacagacaggaatttcttgtgcaatgtggagcaaatggaatggtctccttccgcaagtctttttaatcctcatatctggagtacaagggtagacctctggcttaccacatacactatgctaaagtcatcagccactgctactacatcttgccagaaggtttccctcgccaacaaacagttgaaatttaagggaagaagcaaaagctaaactgtctttgaccctaagatagatagaaagctatttatttgtcttcagtgttcaaggcatgactagtatttctaattagcctaataaattcccacactttctgaagtgaacactaatggtattgtcctactaaaactgtcattgtttctttttttttaactggtcagtcattcacaataagctatgagggtaaataaatatgtgttataacaagtaaaccgtagttgcaagaatataccatgaagattaaagtaggctgggtttcatttccatcttcccacacatctcattgaatttgatggttgacttaattggcaccataactttgtatgatattatacattaacctttatttatgtaaagtaaaatgccttatatattaaagagtaagtgcaataatatgaaatagcctgtacattttaaaaatgttgtcaccaagttatataaatccacatctctgtaaacaaccttttttaagtaattttaaaaaaaataaacactctgcttactacttg

SEQ ID NO: 21776 - DNA, 11704 bp, Homo sapiens
  source 1..11704: mol_type = unassigned DNA
gcgggagcctcggccaagccgcgagcaggtgtgaatgagcccagggaaggacacacggccactgctggagggatcctccattcctgtgtcatttgcatgggtcctgctgtgaaatgaacctggcagggacttgttagacacttccttccttccctcattgagcactccagtgccattgttccacagttgttctaattgggtcctagcttcctcctgccaaggcaaacagcatagtctcgagtaggtgtccctaggctcatctgccagcctgaacatgaacacaggcaaagctgatgatggccagggaccccaggggacgtggggccctgtggggtctggcccccaggagcaagacctctgatgatgctggtgtctgggagtgagcaccatgcccatcacccaggacaatgccgtgctgcacctgcccctcctctaccagtggctgcagaacagcctgcaggaaggtggggatgggccggagcagcggctctgccaggcggccatccagaagctgcaggagtacatccagctgaactttgctgtggatgagagtacggtcccacctgatcacagcccccccgaaatggagatctgtactgtgtacctcaccaaggagctgggggacacagagactgtgggcctgagttttgggaacatccctgttttcggggactatggtgaaaagcgcagggggggcaagaagaggaaaacccaccagggtcctgtgctggatgtgggctgcatctgggtgacagagctgaggaagaacagcccagcagggaagagtgggaaggtccgactgcgggatgagatcctctcactgaatgggcagctgatggttggagttgatgtcagtggggccagttacctggctgagcagtgctggaatggcggctttatctacctgatcatgctgcgtcgctttaagcacaaagcccactccacttataatggcaacagtagcaacagctctgaaccaggagaaacacctaccttggagctgggtgaccgaactgcgaaaaaggggaaacgaaccagaaagtttggggtcatctccaggcctcctgccaacaaggcccctgaagaatccaagggcagcgctggctgtgaggtgtccagtgaccccagcactgagctggagaacggccctgaccctgaacttggaaacggccatgtctttcagctagaaaatggcccagattctctcaaggaggtggctggaccccatctagagaggtcagaagtggacagagggacagagcatagaattccaaagacagatgctcctctgaccacaagcaatgacaaacgccgcttctcaaaaggtgggaagacggacttccaatcgagtgactgcctggcacgggaggaagttggccgaatatggaagatggagctgctcaaagaatcggatgggctgggaattcaggttagtggaggccgaggatcaaagcgctcacctcacgctatcgttgtcactcaagtgaaggaaggaggtgccgctcacagggatggcaggctgtccttaggagatgagctgctggtaatcaatggtcatttactggtcgggctctcccacgaggaagcagtggccattcttcgctccgccacgggaatggtgcagcttgtggtggccagcaaggaaaactccgcagaggacctcctcaggttaacatctaagagcttgccagatctgaccagctcggtagaagatgtgtcctcctggactgataacgaagaccaggaggcagacggggaagaggacgaaggaaccagctcttctgtccagagagcaatgcctgggacagatgaaccccaagatgtgtgcggtgctgaggaatccaaggggaacttggaaagtcccaaacagggcagcaataaaatcaagctcaagagtcgcctttcagggggtgtacaccgccttgagtcagttgaagaatataacgagctgatggtgcggaatggggacccccggatccggatgttggaggtctcccgagatggccggaaacactccctcccgcagctgctggactcttccagtgcctcacaggaataccacattgtgaagaagtctacccgctccttaagcacgactcaggtggaatctccttggaggctcattcggccatccgtcatctcgatcattgggttgtacaaagaaaaaggcaagggccttggctttagtattgctggaggtcgagactgcattcgtggacagatggggatttttgtcaagaccatcttcccaaatggatcagctgcagaggacggaagacttaaagaaggggatgaaatcctagatgtaaatggaataccaataaagggcttgacatttcaagaagccattcatacctttaagcaaatccggagtggattatttgttttaacggtacgcacaaagttggtgagccccagcctcacaccctgctcgacacccacacacatgagcagatccgcctccccgaacttcaataccagtgggggagcctcagcgggaggttccgatgaaggcagttcttcatccctgggtcggaagacccctgggcccaaggacaggatcgtcatggaagtaacactcaacaaagagccaagagttggattaggcattggtgcctgctgcttggctctggaaaacagtcctcctggcatctacattcacagccttgctccaggatcagtggccaagatggagagcaacctgagccgcggggatcaaatcctggaagtgaactccgtcaacgtccgccatgctgctttaagcaaagtccacgccatcttgagtaaatgccctccaggacccgttcgccttgtcatcggccggcaccctaatccaaaggtttccgagcaggaaatggatgaagtcatagcacgcagcacttatcaggagagcaaagaggccaattcctctcctggcttaggtacccccttgaagagtccctctcttgcaaaaaaggactcccttatttctgaatctgaactctcccagtactttgcccacgatgtccctggccccttgtcagacttcatggtggccggttctgaggacgaggatcacccgggaagtggctgcagcacgtcggaggagggcagcctgcctcccagcacctccactcacaaggagcctggaaaacccagagccaacagcctcgtgactcttgggagccatcgggcttctgggctcttccacaagcaggtgacagttgccagacaagccagtctccccggaagcccacaggccctccgaaaccctctcctccgccagaggaaggtaggctgctacgatgccaacgatgccagtgatgaggaagagtttgacagagaaggggactgcatttcactcccaggggccctcccgggtcccatcaggcctctgtcagaggatgacccgaggcgtgtctcaatttcctcttccaagggcatggacgtccacaaccaagaggaacgaccccggaaaacactggtgagcaaggccatctcggcacctcttcttggtagctcagtggacttagaggagagtatcccagagggcatggtggatgctgcgtcctatgcagccaacctcacggactctgcagaggcccccaaggggagccctggaagctggtggaagaaggaactgtcaggatcaagtagcgcacccaaattggaatacacagtccgtacagacacccagagtccgacgaacactgggagccccagttccccccagcagaaaagtgaaggcctgggctccaggcacagaccagtggccagggtaagcccccactgcaagagatccgaggctgaggccaagcccagtggctcacagacagtgaacctgactggcagagccaatgatccatgcgatctggactcgagagtccaggccacttctgtcaaagtgactgtcgctggctttcagccaggtggagctgtggagaaggaatctctgggaaagctgaccactggagatgcttgtgtctctaccagctgtgaactagccagtgctctgtcccatctggatgccagccacctcacagagaacctgcccaaagctgcatcagagctggggcaacaacccatgactgaactggacagctcctcagacctcatctcttccccagggaagaagggggccgctcatcctgaccccagcaagacctctgtagacacagggcaagtcagtcggccagagaatcccagccagcctgcatcgcccagggtcaccaagtgcaaggccaggtctccagtcaggctcccccatgagggcagcccctccccgggggagaaagcagcggctccccctgactacagcaagactcgatcagcatcggaaaccagcacaccccacaataccaggagggtggctgccctcaggggagcgggacctggagcagagggaatgacaccagctggtgctgtcctgccaggagaccccctcacatcccaggagcagagacagggagctccaggtaaccacagtaaggctctggaaatgacaggaatccatgcacctgaaagctcccaggagccttccctgctggagggagcagattctgtgtcctcaagggcaccgcaggccagcctctccatgctgccatccactgacaacaccaaagaagcatgtggccatgtctcggggcactgctgcccaggggggagtagagagagccctgtgacggacattgacagcttcatcaaggagctggatgcttctgcagcaaggtctccgtcttcccagacgggggacagtggctctcaggagggcagtgctcagggccacccaccagccggggctggaggtgggagctcctgccgtgccgaaccagtcccggggggccagacctcctccccgaggagggcctgggctgctggtgcccccgcctacccacaatgggcctcccagccttcggttttagattcaattaatcccgacaaacattttactgtgaacaaaaactttctgagcaactactctagaaattttagcagttttcatgaagacagcacctccctatcaggcctgggtgacagcacggagccgtctctgtcatccatgtatggcgatgctgaggattcttcttctgaccctgagtcactcactgaagccccacgagcttctgccagggacggctggtcccctcctcgttcccgtgtgtctttgcacaaggaagatccttcggagtcagaagaggaacagattgagatttgttccacacgtggctgccccaatccaccctcgagtcctgctcatcttcccacccaggctgccatctgtcctgcctcagccaaagttctgtcattaaaatacagcactccgagagagtcggtggccagtccccgtgagaaggccgcctgcttgccaggctcatacacttcaggcccagactcttcccagccatcatcactcttggagatgagctctcaggagcatgaaactcatgcggacataagcacttcacagaaccacaggccctcgtgtgcagaagaaaccacagaagtcaccagcgctagctcagccatggaaaacagtccgctgtctaaagtagccaggcattttcacagtccgcccatcattctcagctcccccaacatggtaaatggcttggaacatgacctgctagatgacgaaaccctgaatcaatacgaaacaagcattaatgcagctgccagtctgtcctccttcagtgtggatgtccctaagaatggagaatctgttttggaaaacctccacatctctgaaagtcaagacctggatgacttgctacagaaaccaaaaatgatcgctaggaggcccatcatggcctggtttaaagaaataaataaacataaccaaggcacacatttgaggagcaaaaccgagaaggaacaacctctaatgcctgccagaagtcccgactccaagattcagatggtgagttcaagccaaaaaaagggcgttactgtgcctcatagccctcctcagccgaaaacaaacctggaaaataaggacctgtctaagaagagtccggcagaaatgcttctgactaatggtcagaaggcaaagtgtggtccgaagctgaagaggctcagcctcaagggcaaggccaaagtcaactctgaggcccctgctgcgaatgctgtgaaggctggggggacggaccacaggaaacccttgatctcaccccagacctcccacaaaacactttctaaggcagtgtcacagcggctccatgtagccgaccacgaggaccctgacagaaacaccacagctgcccccaggtccccccagtgtgtgctggaaagcaagccacctcttgccacctctgggccactgaaaccctcagtgtctgacacgagcatcaggacatttgtctcgcccctgacctctcccaagcctgttcctgagcaaggcatgtggagcaggttccacatggctgtcctctctgaacccgacagaggttgcccaaccacccctaaatctcctaagtgtagagcagagggcagggcgccccgtgctgactccgggccggtgagtccggcagcgtctaggaacggcatgtccgtggcagggaacagacagagtgagccgcgcctggccagccatgtggcagcagacacagcccaacccaggccgactggcgaaaaaggaggcaacataatggccagcgatcgcctcgaaagaacaaaccagctgaaaatcgtggagatttctgctgaagcagtgtcagagactgtatgtggtaacaagccagctgaaagcgacagacggggagggtgcttggcccagggcaactgtcaggagaagagtgaaatcaggctctatcgccaggtcgcagaatcatccacaagtcatccatcctcactcccatctcatgcctcccaggcagagcaggaaatgtcacgatcattcagcatggcaaaactggcgtcctcctcctcctcccttcaaacagccattagaaaggcagaatactcccagggaaaatcaagcctgatgtcagactcccgaggggtgcccagaaacagcattccagggggcccctcgggggaggaccatctctacttcaccccaaggccagcgaccaggacctactccatgccagcccagttctcaagccattttggacgggagggtcaccccccacacagcctgggtcgctctcgggacagccaggtccctgtgacaagcagtgttgtccccgaggcaaaggcatccagaggtggtcttcccagcctggctaatggacagggcatatatagtgtaaagccgctgctggacacatcgaggaatcttccagccacagatgaaggggatatcatttcagtccaggagacgagctgcctagtcacagacaaaatcaaagtcaccagacgacactactgctatgagcagaactggccccatgaatctacctcatttttctctgtgaagcagcggatcaagtcttttgagaacctggccaatgctgaccggcctgtagccaagtccggggcttccccatttttgtcggtgagctccaagcctcccattgggaggcggtcttccggcagcattgtttccgggagcctgggccacccaggtgacgcagcagcaaggttgttgagacgcagcttgagttcctgcagcgaaaaccaaagcgaagccggcaccctcctgccccagatggccaagtctccctcaatcatgacactgaccatctctcggcagaacccaccagagaccagtagcaagggctctgattcggaactaaagaaatcacttggtcctttgggaattcccaccccaacgatgaccctggcttctcctgttaagaggaacaagtcctcggtacgccacacgcagccctcgcccgtgtcccgctccaagctccaggagctgagagccttgagcatgcctgaccttgacaagctctgcagcgaggattactcagcagggccgagcgccgtgctcttcaaaactgagctggagatcacccccaggaggtcacctggccctcctgctggaggcgtttcgtgtcccgagaagggcgggaacagggcctgtccaggaggaagtggccctaaaaccagtgctgctgagacacccagttcagccagtgatacgggtgaagctgcccaggatctgccttttagaagaagctggtcagttaatttggatcaacttctagtctcagcgggggaccagcaaagattacagtctgttttatcgtcagtgggatcgaaatctaccatcctaactctcattcaggaagcgaaagcacaatcagagaatgaagaagatgtttgcttcatagtcttgaatagaaaagaaggctcaggtctgggattcagtgtggcaggagggacagatgtggagccaaaatcaatcacggtccacagggtgttttctcagggggcggcttctcaggaagggactatgaaccgaggggatttccttctgtcagtcaacggcgcctcactggctggcttagcccacgggaatgtcctgaaggttctgcaccaggcacagctgcacaaagatgccctcgtggtcatcaagaaagggatggatcagcccaggccctctgcccggcaggagcctcccacagccaatgggaagggtttgctgtccagaaagaccatccccctggagcctggcattgggagaagtgtggctgtacacgatgctctgtgtgttgaagtgctgaagacctcggctgggctgggactgagtctggatgggggaaaatcatcggtgacgggagatgggcccttggtcattaaaagagtgtacaaaggtggtgcggctgaacaagctggaataatagaagctggagatgaaattcttgctattaatgggaaacctctggttgggctcatgcactttgatgcctggaatattatgaagtctgtcccagaaggacctgtgcagttattaattagaaagcataggaattcttcatgaattttaacaagaatcattttctcagttctcttctttctttagcaaatcagagtgacttctttaaaccacaggttgttgaaatggccaacactggtacagacacggactataaaaatctccaagcttgtgcttacacatgaagcctgacttaactgtatgtgcaacagcaatgaaattaactccagaagccttccacctgcgtcacccaggccgggagggttccttcgttccagtgcctgtcccctacctttatgttatgtttactgatggggatacaagatgtgacacacccttctttatttgaaacaaacaaacatttagctagacctttgcttccttcttgccagctctcccaacatacccaatcctggtgatcagggaactaaaagtctgagggggacacaaatgtcacacctaagaggacaatcaatcattttgtatgattttgtaagtaaatgacagaatgcttttaggcacattcaatggaaggaggagatgtaggtctgtatatgttaccctgaaaagagaataagacttacttaaaaaaatgaattatgacctgttaggctgagctcaggaattgtccaaaaaggaaaaagcaaaataattaattgagagtattttttagtgagtgtaatgtataatgtacgtatgcaaagttcaactcaataggttattgatcaccatgaagtattgatcattttctatctcaaaagtgtaagccataaggctgttttacagaatagcacttctgataagctgtattaaatagccatgagcttcactgcttagagggagcagaaaggtcaacatctaaaagcaccttacaactagtttttgaacctgtcttgataagtgcttgaattcaagactggtcagtccaagagcagacaaaaatatcacaagtcagtcagtcactgggtttccatttctgaattttatgcactccaaccatgaatttaaactaaatttttagaaatcaagtatctttctaagtgtccttggatttatagacaatgtatgtacaatccaaatagaggagcttaatggaatccttttaggagactggttggtttttttccctctttcccaacatgtttaagaaatgtaacattctaagtattggatctcttttcttgacctagtataatgacaactgcagtgacttaagtttttgctgttttcgttttcccgctttgcaatttcctccttttgccaaaaatgttttcctacagaagactgtcgtgactcacgctacttgggaaactcactctggccactcctcctctggtggcatgagctgcttcccagtagctattccgattggatattccgttcgtcgtcacatagctggcttttctctcctcatgatgtaccttattttcttaggtaaataattccaaactctcatcgggtcataaagaggaggagaaacagggtgagtcaaggtaaaggagcagaaatgtagttacaagccaggtcgtcttcagtggcacaaaccaacccgttgagccctgacaacatgagtggagagtgcatttgccatacctgtgtgcatgacactaagattttatgttggagatacttctttaaataacctacagcttgggtctatggctgtgacccccagattcatggaggggctttagccatcagctttgtacatcatcatttttctgaatgaccaatcccactaaacatctttgaagtcggcctagagaggtccttcagatgagagagaaatagctggcttgtctgagtccagatttctcatcaactggcaatacaaaggaaaatatggtacaggagttagttagaaaggtcttattgattttacttctacttttcactacagttacaggtagaatactgtaggaagtcagtgcaaggtgcatgcttgattgatagatattgattgattgtttttcagtctctggggtcagttttgtggtttctgctttcttgcctaaatcaaagactatttcaagtcaacaacactgaaaactgcttttcgcctccactcttacagctgtgcctaataataattaattaataaacgcacagccctatgtgaacagacaggaatttcttgtgcaatgtggagcaaatggaatggtctccttccgcaagtctttttaatcctcatatctggagtacaagggtagacctctggcttaccacatacactatgctaaagtcatcagccactgctactacatcttgccagaaggtttccctcgccaacaaacagttgaaatttaagggaagaagcaaaagctaaactgtctttgaccctaagatagatagaaagctatttatttgtcttcagtgttcaaggcatgactagtatttctaattagcctaataaattcccacactttctgaagtgaacactaatggtattgtcctactaaaactgtcattgtttctttttttttaactggtcagtcattcacaataagctatgagggtaaataaatatgtgttataacaagtaaaccgtagttgcaagaatataccatgaagattaaagtaggctgggtttcatttccatcttcccacacatctcattgaatttgatggttgacttaattggcaccataactttgtatgatattatacattaacctttatttatgtaaagtaaaatgccttatatattaaagagtaagtgcaataatatgaaatagcctgtacattttaaaaatgttgtcaccaagttatataaatccacatctctgtaaacaaccttttttaagtaattttaaaaaaaataaacactctgcttactacttg

SEQ ID NO: 21777 - DNA, 536 bp, Homo sapiens
  source 1..536: mol_type = unassigned DNA
agaagtgtggcgtcttggtccaggatgcaggtccctgattcgggttggacgtggtcatcaaacccagaaattgaaggatcttgggcctgccttgatgttcatttctctcatctataaaattgaaggctggaggaggtgtgaatgagcccagggaaggacacacggccactgctggagggatcctccattcctgtgtcatttgcatgggtcctgctgtgaaatgaacctggcagggacttgttagacacttccttccttccctcattgagcactccagtgccattgttccacagttgttctaattgggtcctagcttcctcctgccaaggcaaacagcatagtctcgagtaggtgtccctaggctcatctgccagcctgaacatgaacacaggcaaagctgatgatggccagggaccccaggggacgtggggccctgtggggtctggcccccaggagcaagacctctgatgatgctggtgtctgggagtgagcaccatgcccatcacccaggacaatgccgtgctgcacctgcccct

SEQ ID NO: 21778 - DNA, 2204 bp, Homo sapiens
  source 1..2204: mol_type = unassigned DNA
gatccagctatggagaaagccgcagatctgcaggacacagcctcgttaactctgaagtttaagtttaacccaaagctgggcattgataatcctgtcctctccctggccgaagaccacgacccctatgatccctggagcctggagcggcctcgcttctgtttactgagcaaagaggagggcaagagttttggcttccacctgcagcaggagctgggcagggctgggcatgtggtgtgcagggtggacccaggcacctctgcccagcgccagggtcttcaggaaggagacaggatcctggcggtgaacaatgatgttgtggaacacgaagactatgcggtggtggtacgccgcatccgggccagcagccctcgggtgttgctgacagtattggcacggcatgcacatgacgtggcccgagctcagctgggagaagatgcccacctctgtcccaccctaggcccaggggtccggccccggctgtgccacatagtgaaagatgagggtggttttggcttcagtgtcacccatggcaatcagggtcctttctggttggtgctaagtactggaggagcagctgagcgggcaggggtgccccccggggcccggctgctggaagtgaatgggctttggcagagtggacagcaggtgaccttgctggtggcagggccagaggtggaagaacagtgtcgccagctgggattgcccctggctgcacccctggcagagggctgggcactgcccaccaagccccgctgcctgcacctggagaaagggccccagggttttgggttcctgctccgggaggaaaagggccttgacggtcgccctggacagttcctgtgggaggtggacccgggactgccagccaagaaggctgggatgcaggctggggaccggctggtggctgtggctggggagagcgtggaggggctgggccatgaggagacagtgtccaggatccaggggcagggctcctgtgtctccctcactgtcgtcgaccctgaggcggaccgcttcttcagcatggttcgcctgtccccactcctcttcttggagaacacagaggctcccgcctcgccccggggcagcagctcagcctcactggttgagacagaggacccttcacttgaagacacaagcgtgccttctgtccctcttggctcccgacagtgcttcctgtaccctgggcctggtggcagctatggcttccgactcagttgtgtggccagtgggcctcgtctcttcatctcccaggtgactccaggaggctcagctgcccgggctgggctgcaagtgggagacgtgattctggaagtgaacgggtatcctgttgggggacagaatgacctggagaggcttcagcagctgcctgaggctgagccacccctctgcctgaagctggcagccaggtctctgcggggcttggaagcctggattccccctggggctgcagaggactgggctctggcctcggatctactgtagagcacccctgcttggtacagacatactcaggggctaccgtgtcttcactctccagcctgaggtggtgaaggcaggatgctctctctaagccagaccagagggactcagacaccaccgatcacaggctggcccaggtgctccctcccttcctgcaggcccacctgccagcagagggtgtggttggaggcctcagacaggtccctgaaggagtctgaggctccagaggatgtcatatgggagttttagagagctgtgtcccaaggatgaaggtgtggctgtgggtctggctaggattgaagccatctggaccttttctagatatgactccaggacccttgagtgtaatgcaaaaatttggagaccagctatgcctgccctctgtgggtgccttagcattgcgggagggtggtgcttggtcaccgttgcatttgttatagaaatggccattcgccataaatctgactgcctgtgtttgtgttggtgggggtaaggggcagtggtgtgaagggaccaaaagggcctcaggctcaaggggtgggatgcggctcctgcaggagagaggttgagacctggtcaaatttatttcctatcaatcactgaatctcagggataatgggtcaacccagaactgagatgtctgtatgacagccactcctaaaaataaacaacaacaaaaacaaaaaaagaagaaaactaaataaaaataaaaataaaaataa

SEQ ID NO: 21779 - DNA, 2252 bp, Homo sapiens
  source 1..2252: mol_type = unassigned DNA
gttgctgatccagctatggagaaagccgcagatctgcaggacacagcctcgttaactctgaagtttaagtttaacccaaagctgggcattgataatcctgtcctctccctggccgaagaccacgacccctatgatccctggagcctggagcggcctcgcttctgtttactgagcaaagaggagggcaagagttttggcttccacctgcagcaggagctgggcagggctgggcatgtggtgtgcagggtggacccaggcacctctgcccagcgccagggtcttcaggaaggagacaggatcctggcggtgaacaatgatgttgtggaacacgaagactatgcggtggtggtacgccgcatccgggccagcagccctcgggtgttgctgacagtattggcacggcatgcacatgacgtggcccgagctcagctgggagaagatgcccacctctgtcccaccctaggcccaggggtccggccccggctgtgccacatagtgaaagatgagggtggttttggcttcagtgtcacccatggcaatcagggtcctttctggttggtgctaagtactggaggagcagctgagcgggcaggggtgccccccggggcccggctgctggaagtgaatggggtcagtgtggagaagttcactcacaaccaactcaccaggaagctttggcagagtggacagcaggtgaccttgctggtggcagggccagaggtggaagaacagtgtcgccagctgggattgcccctggctgcacccctggcagagggctgggcactgcccaccaagccccgctgcctgcacctggagaaagggccccagggttttgggttcctgctccgggaggaaaagggccttgacggtcgccctggacagttcctgtgggaggtggacccgggactgccagccaagaaggctgggatgcaggctggggaccggctggtggctgtggctggggagagcgtggaggggctgggccatgaggagacagtgtccaggatccaggggcagggctcctgtgtctccctcactgtcgtcgaccctgaggcggaccgcttcttcagcatggttcgcctgtccccactcctcttcttggagaacacagaggctcccgcctcgccccggggcagcagctcagcctcactggttgagacagaggacccttcacttgaagacacaagcgtgccttctgtccctcttggctcccgacagtgcttcctgtaccctgggcctggtggcagctatggcttccgactcagttgtgtggccagtgggcctcgtctcttcatctcccaggtgactccaggaggctcagctgcccgggctgggctgcaagtgggagacgtgattctggaagtgaacgggtatcctgttgggggacagaatgacctggagaggcttcagcagctgcctgaggctgagccacccctctgcctgaagctggcagccaggtctctgcggggcttggaagcctggattccccctggggctgcagaggactgggctctggcctcggatctactgtagagcacccctgcttggtacagacatactcaggggctaccgtgtcttcactctccagcctgaggtggtgaaggcaggatgctctctctaagccagaccagagggactcagacaccaccgatcacaggctggcccaggtgctccctcccttcctgcaggcccacctgccagcagagggtgtggttggaggcctcagacaggtccctgaaggagtctgaggctccagaggatgtcatatgggagttttagagagctgtgtcccaaggatgaaggtgtggctgtgggtctggctaggattgaagccatctggaccttttctagatatgactccaggacccttgagtgtaatgcaaaaatttggagaccagctatgcctgccctctgtgggtgccttagcattgcgggagggtggtgcttggtcaccgttgcatttgttatagaaatggccattcgccataaatctgactgcctgtgtttgtgttggtgggggtaaggggcagtggtgtgaagggaccaaaagggcctcaggctcaaggggtgggatgcggctcctgcaggagagaggttgagacctggtcaaatttatttcctatcaatcactgaatctcagggataatgggtcaacccagaactgagatgtctgtatgacagccactcctaaaaataaacaacaacaaaaacaaaaaaagaagaaaactaaataaaaataaaaataaaaataa

SEQ ID NO: 21780 - DNA, 2447 bp, Homo sapiens
  source 1..2447: mol_type = unassigned DNA
atggtaactccctcaccccctggcaaccattccctatccctggaggcaccacggctccacacggcctccgatctccttggtaaccactcactcggtctccctctgataacagccttggttgggagtagagataggaggggccgggtgttttctcctgtcccagtccctctgcccacgaaccccaccacccaacacccaaccaggcagaaactgcccagcaccctatcaggacacagggtctgccaggcacacggcgaacctgtacttgggctgtgccctctcctcccccttttctgctgcccacctcaccctccagatccctggagcctggagcggcctcgcttctgtttactgagcaaagaggagggcaagagttttggcttccacctgcagcaggagctgggcagggctgggcatgtggtgtgcagggtggacccaggcacctctgcccagcgccagggtcttcaggaaggagacaggatcctggcggtgaacaatgatgttgtggaacacgaagactatgcggtggtggtacgccgcatccgggccagcagccctcgggtgttgctgacagtattggcacggcatgcacatgacgtggcccgagctcagctgggagaagatgcccacctctgtcccaccctaggcccaggggtccggccccggctgtgccacatagtgaaagatgagggtggttttggcttcagtgtcacccatggcaatcagggtcctttctggttggtgctaagtactggaggagcagctgagcgggcaggggtgccccccggggcccggctgctggaagtgaatggggtcagtgtggagaagttcactcacaaccaactcaccaggaagctttggcagagtggacagcaggtgaccttgctggtggcagggccagaggtggaagaacagtgtcgccagctgggattgcccctggctgcacccctggcagagggctgggcactgcccaccaagccccgctgcctgcacctggagaaagggccccagggttttgggttcctgctccgggaggaaaagggccttgacggtcgccctggacagttcctgtgggaggtggacccgggactgccagccaagaaggctgggatgcaggctggggaccggctggtggctgtggctggggagagcgtggaggggctgggccatgaggagacagtgtccaggatccaggggcagggctcctgtgtctccctcactgtcgtcgaccctgaggcggaccgcttcttcagcatggttcgcctgtccccactcctcttcttggagaacacagaggctcccgcctcgccccggggcagcagctcagcctcactggttgagacagaggacccttcacttgaagacacaagcgtgccttctgtccctcttggctcccgacagtgcttcctgtaccctgggcctggtggcagctatggcttccgactcagttgtgtggccagtgggcctcgtctcttcatctcccaggtgactccaggaggctcagctgcccgggctgggctgcaagtgggagacgtgattctggaagtgaacgggtatcctgttgggggacagaatgacctggagaggcttcagcagctgcctgaggctgagccacccctctgcctgaagctggcagccaggtctctgcggggcttggaagcctggattccccctggggctgcagaggactgggctctggcctcggatctactgtagagcacccctgcttggtacagacatactcaggggctaccgtgtcttcactctccagcctgaggtggtgaaggcaggatgctctctctaagccagaccagagggactcagacaccaccgatcacaggctggcccaggtgctccctcccttcctgcaggcccacctgccagcagagggtgtggttggaggcctcagacaggtccctgaaggagtctgaggctccagaggatgtcatatgggagttttagagagctgtgtcccaaggatgaaggtgtggctgtgggtctggctaggattgaagccatctggaccttttctagatatgactccaggacccttgagtgtaatgcaaaaatttggagaccagctatgcctgccctctgtgggtgccttagcattgcgggagggtggtgcttggtcaccgttgcatttgttatagaaatggccattcgccataaatctgactgcctgtgtttgtgttggtgggggtaaggggcagtggtgtgaagggaccaaaagggcctcaggctcaaggggtgggatgcggctcctgcaggagagaggttgagacctggtcaaatttatttcctatcaatcactgaatctcagggataatgggtcaacccagaactgagatgtctgtatgacagccactcctaaaaataaacaacaacaaaaacaaaaaaagaagaaaactaaataaaaataaaaataaaaataagatccacttctc

SEQ ID NO: 21781 - DNA, 2249 bp, Homo sapiens
  source 1..2249: mol_type = unassigned DNA
atggaagaggcactagatctgcaggacacagcctcgttaactctgaagtttaagtttaacccaaagctgggcattgataatcctgtcctctccctggccgaagaccacgacccctatgatccctggagcctggagcggcctcgcttctgtttactgagcaaagaggagggcaagagttttggcttccacctgcagcaggagctgggcagggctgggcatgtggtgtgcagggtggacccaggcacctctgcccagcgccagggtcttcaggaaggagacaggatcctggcggtgaacaatgatgttgtggaacacgaagactatgcggtggtggtacgccgcatccgggccagcagccctcgggtgttgctgacagtattggcacggcatgcacatgacgtggcccgagctcagctgggagaagatgcccacctctgtcccaccctaggcccaggggtccggccccggctgtgccacatagtgaaagatgagggtggttttggcttcagtgtcacccatggcaatcagggtcctttctggttggtgctaagtactggaggagcagctgagcgggcaggggtgccccccggggcccggctgctggaagtgaatggggtcagtgtggagaagttcactcacaaccaactcaccaggaagctttggcagagtggacagcaggtgaccttgctggtggcagggccagaggtggaagaacagtgtcgccagctgggattgcccctggctgcacccctggcagagggctgggcactgcccaccaagccccgctgcctgcacctggagaaagggccccagggttttgggttcctgctccgggaggaaaagggccttgacggtcgccctggacagttcctgtgggaggtggacccgggactgccagccaagaaggctgggatgcaggctggggaccggctggtggctgtggctggggagagcgtggaggggctgggccatgaggagacagtgtccaggatccaggggcagggctcctgtgtctccctcactgtcgtcgaccctgaggcggaccgcttcttcagcatggttcgcctgtccccactcctcttcttggagaacacagaggctcccgcctcgccccggggcagcagctcagcctcactggttgagacagaggacccttcacttgaagacacaagcgtgccttctgtccctcttggctcccgacagtgcttcctgtaccctgggcctggtggcagctatggcttccgactcagttgtgtggccagtgggcctcgtctcttcatctcccaggtgactccaggaggctcagctgcccgggctgggctgcaagtgggagacgtgattctggaagtgaacgggtatcctgttgggggacagaatgacctggagaggcttcagcagctgcctgaggctgagccacccctctgcctgaagctggcagccaggtctctgcggggcttggaagcctggattccccctggggctgcagaggactgggctctggcctcggatctactgtagagcacccctgcttggtacagacatactcaggggctaccgtgtcttcactctccagcctgaggtggtgaaggcaggatgctctctctaagccagaccagagggactcagacaccaccgatcacaggctggcccaggtgctccctcccttcctgcaggcccacctgccagcagagggtgtggttggaggcctcagacaggtccctgaaggagtctgaggctccagaggatgtcatatgggagttttagagagctgtgtcccaaggatgaaggtgtggctgtgggtctggctaggattgaagccatctggaccttttctagatatgactccaggacccttgagtgtaatgcaaaaatttggagaccagctatgcctgccctctgtgggtgccttagcattgcgggagggtggtgcttggtcaccgttgcatttgttatagaaatggccattcgccataaatctgactgcctgtgtttgtgttggtgggggtaaggggcagtggtgtgaagggaccaaaagggcctcaggctcaaggggtgggatgcggctcctgcaggagagaggttgagacctggtcaaatttatttcctatcaatcactgaatctcagggataatgggtcaacccagaactgagatgtctgtatgacagccactcctaaaaataaacaacaacaaaaacaaaaaaagaagaaaactaaataaaaataaaaataaaaataagatccacttctc

SEQ ID NO: 21782 - DNA, 2996 bp, Homo sapiens
  source 1..2996: mol_type = unassigned DNA
actgggttgctgatccagctatggagaaagccgcaggtaggaggccaggagaaatcctctgcaggggactttgggacaggcagggggccgacttggaggctgaagctttgggaccagggcacacttgattttggggcttggagccctgaggcaggtaaacaagtcaggagaaaagtaatgagttgatatgtctgtcttcctggtccacaccctgtactgatatgctcagatttatgtgccaaggacttggggggagagaaagggaggggaccgcacaatagtcctgtgtgtatggcagtgagaagagaagacccctttggagcagaaaggagggggcatgccctgagtttgggggtttccctgagtccttttagtttatgccaatggaagaggcacatctggggagaagaatgtgactctcctcctctcacccacttctttgcccagtagatctgcaggacacagcctcgttaactctgaagtttaagtttaacccaaagctgggcattgataatcctgtcctctccctggccgaagaccacgacccctatggtaactccctcaccccctggcaaccattccctatccctggaggcaccacggctccacacggcctccgatctccttggtaaccactcactcggtctccctctgataacagccttggttgggagtagagataggaggggccgggtgttttctcctgtcccagtccctctgcccacgaaccccaccacccaacacccaaccaggcagaaactgcccagcaccctatcaggacacagggtctgccaggcacacggcgaacctgtacttgggctgtgccctctcctcccccttttctgctgcccacctcaccctccagatccctggagcctggagcggcctcgcttctgtttactgagcaaagaggagggcaagagttttggcttccacctgcagcaggagctgggcagggctgggcatgtggtgtgcagggtggacccaggcacctctgcccagcgccagggtcttcaggaaggagacaggatcctggcggtgaacaatgatgttgtggaacacgaagactatgcggtggtggtacgccgcatccgggccagcagccctcgggtgttgctgacagtattggcacggcatgcacatgacgtggcccgagctcagctgggagaagatgcccacctctgtcccaccctaggcccaggggtccggccccggctgtgccacatagtgaaagatgagggtggttttggcttcagtgtcacccatggcaatcagggtcctttctggttggtgctaagtactggaggagcagctgagcgggcaggggtgccccccggggcccggctgctggaagtgaatggggtcagtgtggagaagttcactcacaaccaactcaccaggaagctttggcagagtggacagcaggtgaccttgctggtggcagggccagaggtggaagaacagtgtcgccagctgggattgcccctggctgcacccctggcagagggctgggcactgcccaccaagccccgctgcctgcacctggagaaagggccccagggttttgggttcctgctccgggaggaaaagggccttgacggtcgccctggacagttcctgtgggaggtggacccgggactgccagccaagaaggctgggatgcaggctggggaccggctggtggctgtggctggggagagcgtggaggggctgggccatgaggagacagtgtccaggatccaggggcagggctcctgtgtctccctcactgtcgtcgaccctgaggcggaccgcttcttcagcatggttcgcctgtccccactcctcttcttggagaacacagaggctcccgcctcgccccggggcagcagctcagcctcactggttgagacagaggacccttcacttgaagacacaagcgtgccttctgtccctcttggctcccgacagtgcttcctgtaccctgggcctggtggcagctatggcttccgactcagttgtgtggccagtgggcctcgtctcttcatctcccaggtgactccaggaggctcagctgcccgggctgggctgcaagtgggagacgtgattctggaagtgaacgggtatcctgttgggggacagaatgacctggagaggcttcagcagctgcctgaggctgagccacccctctgcctgaagctggcagccaggtctctgcggggcttggaagcctggattccccctggggctgcagaggactgggctctggcctcggatctactgtagagcacccctgcttggtacagacatactcaggggctaccgtgtcttcactctccagcctgaggtggtgaaggcaggatgctctctctaagccagaccagagggactcagacaccaccgatcacaggctggcccaggtgctccctcccttcctgcaggcccacctgccagcagagggtgtggttggaggcctcagacaggtccctgaaggagtctgaggctccagaggatgtcatatgggagttttagagagctgtgtcccaaggatgaaggtgtggctgtgggtctggctaggattgaagccatctggaccttttctagatatgactccaggacccttgagtgtaatgcaaaaatttggagaccagctatgcctgccctctgtgggtgccttagcattgcgggagggtggtgcttggtcaccgttgcatttgttatagaaatggccattcgccataaatctgactgcctgtgtttgtgttggtgggggtaaggggcagtggtgtgaagggaccaaaagggcctcaggctcaaggggtgggatgcggctcctgcaggagagaggttgagacctggtcaaatttatttcctatcaatcactgaatctcagggataatgggtcaacccagaactgagatgtctgtatgacagccactcctaaaaataaacaacaacaaaaacaaaaaaagaagaaaactaaataaaaataaaaataaaaataagatccacttctc

SEQ ID NO: 21783 - DNA, 3689 bp, Homo sapiens
  source 1..3689: mol_type = unassigned DNA
agcgaagagttaacctgaggggcgagccgctgcccccacctcgggggcgtgcccccctcccccgctaggcggcccgccccccgcgccagggtatggcccctggccccggcccgggacccgaggtcccgcgcccgggtcagtgaaaggcgtcttcccgttcccgccctccgcctcctctcgccggccagcaacatgggatgtaatatgtgcgtggtccagaaaccggaggagcagtacaaagtgatgctgcaggtgaacgggaaggagctctccaagctgtctcaggagcaaactctgcaggccctgcgctcctccaaggagcccctggtgatccaggtgctgagacgcagcccccgcctccggggggacagctcctgtcacgacctgcagctggtggacagtggcactcagaccgacatcaccttcgagcatatcatggcgctgggcaagctgcgtccgcccaccccgcccatggtcatcctggagccccccccaatcagccatgagtattatgacccggcggagtttatggagggcggcccgcaggaggcagaccgcttggatgagctggagtatgaggaggtggagctgtataaaagcagccaccgggacaagctgggcctgatggtttgctaccgcacggacgacgaggaggacctgggcatttatgtcggagaggtaaatcccaacagcattgcagccaaagacggccggatccgtgagggagaccgcatcatccagattaacggtgtagacgtccagaaccgggaagaggcggtggccatcctgagccaggaagagaacaccaacatctccctgctggtggcccgacctgagagtcagctggcgaaaaggtggaaggacagcgaccgggatgacttcctggatgactttggctctgagaatgagggggagctgcgtgctcgtaaactgaaatcaccccctgcccagcagcccggaaacgaagaggagaagggggctcccgatgccggcccaggcctgagcaacagccaggagctggacagcggggtgggccggactgacgagagcacccggaacgaagagagctctgagcacgacctgctgggggacgaacccccgagctccaccaacaccccgggaagcctgcgcaagtttggcctgcaaggggacgccctgcagagccgggacttccatttcagcatggactctctgctggccgagggggcggggctgggagggggcgacgtcccgggcctcacggatgaggagtatgagcgctaccgtgagctcctggagatcaagtgccacctggagaacggcaaccagctgggcctcctctttccccgggcctccggaggcaacagcgccctggacgtcaaccgcaacgagagcctgggccacgagatggccatgctggaggaggagctaaggcacctggaattcaagtgccgcaacatactgcgggcgcagaagatgcagcagctgcgtgagcgctgcatgaaggcctggctgctggaggaggagagcctctacgacctggcggccagcgagcccaagaagcacgagctgtccgacatctccgagctgcccgagaagtcggacaaggacagcaccagcgcctacaacactggggagagctgccgcagcaccccgctgcttgtggagcccctgcccgagagccccctgcggcgggccatggccggcaactccaacttgaaccggacccctcccggccccgctgttgccacccccgccaaggcagctcctccaccggggagccccgccaagttccggtccctctcccgggatcctgaggccggccggaggcagcacgcggaggagcgcggccgccgcaaccccaagacggggttgaccctggagcgtgtgggccctgaaagcagcccttacctctcgcggcgccaccgcggccagggccaggagggcgagcactaccacagctgcgtgcagctggccccgacgcgaggcctggaggagctgggccacggccccctgagcttggccggtggccctcgggtgggcggggtggcggccgcggccactgaagcaccgcgcatggagtggaaagtgaaggtgcgcagcgacggaacccgctacgtggccaagcggcccgtgcgagatcggctgctgaaagcccgtgccctgaagatccgggaggagcgcagcggtatgacgaccgacgacgacgcggtgagcgagatgaagatgggccgctactggagcaaggaggagcggaagcagcacctgatccgggcccgtgagcagcggaagcggcgcgagttcatgatgcagagccggctggagtgcctgcgggagcagcagaatggcgacagcaagcccgagctcaacatcattgccctgagccaccgcaaaaccatgaagaagcggaacaagaagatcctggacaactggatcaccatccaggagatgctggcccacggcgcgcgctccgccgatggcaagcgggtctacaaccctcttctctcagtcaccaccgtgtgagctgcccgggcgggtacacggcccaggcccagggaaccccctggggccccggccctcactctcctatagagattgtgtgtgtgtgtgtgtgcgcgcgcgcgtgctcgctgtgcgcacgcacacatctcctcgtctgggtgtgcgcacagggctttgttagcagagagaagcccctgaggagaagggacgcttttcttccttctgcccaagtaaagtgaccatgccagtggccagcactgggggcacacctgtgatgggcaccccttcagctgtgcgtgtgcattccccatcccccatgctcttgcgtgtgcttgcacgtgcacgcacacacacacccagtgctctctccacccgacccgtgtacttgcagacagggaagctgagctgaaaggagcacaagagagtgtccggcttcgctgctgagcgcggcctctccccgccgctgcgcactgcagttatttgtagacaaaggcacccctgatttttgtggtttttctccctttctgtgcttgccaatagttgttttgttttgtggacctgccctgggggctggcagctccttcaggcagcctggcagaagtggaactcccctctccactgatggctgggaagggagttggggaggaagagtgggagggagggctggggatggatgggagggaaggggagggaaaggtgggaggaatgggaagcagctgttctggtggcttccactctgaggtgtgggaacggggagcctctggggggcacctgtttccccagtgactcagagagagcaagactgcaggaacggaggggtcctgcagggtgtccaccaagaagtcacagagcccgttctgcgccccacaccatctggagcaggggcttctcttctgagtgaactgaggaaggtgcttagatggtgagggctctagaaaccaagccccatgagcagcagtggaagacctcgggccatgcggcctggggaggacttggtggcgatccgcaacctggaccccagtgagaggcggtgggctgactgggaaggagaggcccccaacctcctcaggatttgcacgtgtgaactaggctgcctgtggggtgccccttaggcttggagagccccagattggaggcagacagactgcaccaccccttccccccctgcatctcaagaataaagcaagctgcctttgtacttggttgaa

SEQ ID NO: 21784 - DNA, 3617 bp, Homo sapiens
  source 1..3617: mol_type = unassigned DNA
gtgcggggggcgccgaatctagatcccggcgggcctggagcgtgggagtgcgtgggcgtccccgggcgcggtccaagtccgtccgggggctgggtgcccaccccgacacccactcccgcctggccctgcccgaacgatgggctcccgggccttaggcgtctcgggtgaacgggaaggagctctccaagctgtctcaggagcaaactctgcaggccctgcgctcctccaaggagcccctggtgatccaggtgctgagacgcagcccccgcctccggggggacagctcctgtcacgacctgcagctggtggacagtggcactcagaccgacatcaccttcgagcatatcatggcgctgggcaagctgcgtccgcccaccccgcccatggtcatcctggagccgtacgtcctctctgagctccccccaatcagccatgagtattatgacccggcggagtttatggagggcggcccgcaggaggcagaccgcttggatgagctggagtatgaggaggtggagctgtataaaagcagccaccgggacaagctgggcctgatggtttgctaccgcacggacgacgaggaggacctgggcatttatgtcggagaggtaaatcccaacagcattgcagccaaagacggccggatccgtgagggagaccgcatcatccagattaacggtgtagacgtccagaaccgggaagaggcggtggccatcctgagccaggaagagaacaccaacatctccctgctggtggcccgacctgagagtcagctggcgaaaaggtggaaggacagcgaccgggatgacttcctggatgactttggctctgagaatgagggggagctgcgtgctcgtaaactgaaatcaccccctgcccagcagcccggaaacgaagaggagaagggggctcccgatgccggcccaggcctgagcaacagccaggagctggacagcggggtgggccggactgacgagagcacccggaacgaagagagctctgagcacgacctgctgggggacgaacccccgagctccaccaacaccccgggaagcctgcgcaagtttggcctgcaaggggacgccctgcagagccgggacttccatttcagcatggactctctgctggccgagggggcggggctgggagggggcgacgtcccgggcctcacggatgaggagtatgagcgctaccgtgagctcctggagatcaagtgccacctggagaacggcaaccagctgggcctcctctttccccgggcctccggaggcaacagcgccctggacgtcaaccgcaacgagagcctgggccacgagatggccatgctggaggaggagctaaggcacctggaattcaagtgccgcaacatactgcgggcgcagaagatgcagcagctgcgtgagcgctgcatgaaggcctggctgctggaggaggagagcctctacgacctggcggccagcgagcccaagaagcacgagctgtccgacatctccgagctgcccgagaagtcggacaaggacagcaccagcgcctacaacactggggagagctgccgcagcaccccgctgcttgtggagcccctgcccgagagccccctgcggcgggccatggccggcaactccaacttgaaccggacccctcccggccccgctgttgccacccccgccaaggcagctcctccaccggggagccccgccaagttccggtccctctcccgggatcctgaggccggccggaggcagcacgcggaggagcgcggccgccgcaaccccaagacggggttgaccctggagcgtgtgggccctgaaagcagcccttacctctcgcggcgccaccgcggccagggccaggagggcgagcactaccacagctgcgtgcagctggccccgacgcgaggcctggaggagctgggccacggccccctgagcttggccggtggccctcgggtgggcggggtggcggccgcggccactgaagcaccgcgcatggagtggaaagtgaaggtgcgcagcgacggaacccgctacgtggccaagcggcccgtgcgagatcggctgctgaaagcccgtgccctgaagatccgggaggagcgcagcggtatgacgaccgacgacgacgcggtgagcgagatgaagatgggccgctactggagcaaggaggagcggaagcagcacctgatccgggcccgtgagcagcggaagcggcgcgagttcatgatgcagagccggctggagtgcctgcgggagcagcagaatggcgacagcaagcccgagctcaacatcattgccctgagccaccgcaaaaccatgaagaagcggaacaagaagatcctggacaactggatcaccatccaggagatgctggcccacggcgcgcgctccgccgatggcaagcgggtctacaaccctcttctctcagtcaccaccgtgtgagctgcccgggcgggtacacggcccaggcccagggaaccccctggggccccggccctcactctcctatagagattgtgtgtgtgtgtgtgtgcgcgcgcgcgtgctcgctgtgcgcacgcacacatctcctcgtctgggtgtgcgcacagggctttgttagcagagagaagcccctgaggagaagggacgcttttcttccttctgcccaagtaaagtgaccatgccagtggccagcactgggggcacacctgtgatgggcaccccttcagctgtgcgtgtgcattccccatcccccatgctcttgcgtgtgcttgcacgtgcacgcacacacacacccagtgctctctccacccgacccgtgtacttgcagacagggaagctgagctgaaaggagcacaagagagtgtccggcttcgctgctgagcgcggcctctccccgccgctgcgcactgcagttatttgtagacaaaggcacccctgatttttgtggtttttctccctttctgtgcttgccaatagttgttttgttttgtggacctgccctgggggctggcagctccttcaggcagcctggcagaagtggaactcccctctccactgatggctgggaagggagttggggaggaagagtgggagggagggctggggatggatgggagggaaggggagggaaaggtgggaggaatgggaagcagctgttctggtggcttccactctgaggtgtgggaacggggagcctctggggggcacctgtttccccagtgactcagagagagcaagactgcaggaacggaggggtcctgcagggtgtccaccaagaagtcacagagcccgttctgcgccccacaccatctggagcaggggcttctcttctgagtgaactgaggaaggtgcttagatggtgagggctctagaaaccaagccccatgagcagcagtggaagacctcgggccatgcggcctggggaggacttggtggcgatccgcaacctggaccccagtgagaggcggtgggctgactgggaaggagaggcccccaacctcctcaggatttgcacgtgtgaactaggctgcctgtggggtgccccttaggcttggagagccccagattggaggcagacagactgcaccaccccttccccccctgcatctcaagaataaagcaagctgcctttgtacttggttg

SEQ ID NO: 21785 - DNA, 2853 bp, Homo sapiens
  source 1..2853: mol_type = unassigned DNA
catatcatggcgctgggcaagctgcgtccgcccaccccgcccatggtcatcctggagccgtacgtcctctctgagctggccgagggaggaccctcctgtccgggacgtcgctgccggaagtgccagggttgagggcctcagctcctcctcctccatcctctctcctctgccgcctcacaagcatcactccttgaatcttcttgcatcccttgtctgtctcattcctctacctgctctgaatttcctccatctcttcagcttctttctttggcccgaccggaagaagggcctttcatccaggcctggtggctcatgaccgcccccccaatcagccatgagtattatgacccggcggagtttatggagggcggcccgcaggaggcagaccgcttggatgagctggagtatgaggaggtggagctgtataaaagcagccaccgggacaagctgggcctgatggtttgctaccgcacggacgacgaggaggacctgggcatttatgtcggagaggtaaatcccaacagcattgcagccaaagacggccggatccgtgagggagaccgcatcatccagattaacggtgtagacgtccagaaccgggaagaggcggtggccatcctgagccaggaagagaacaccaacatctccctgctggtggcccgacctgagagtcagctggcgaaaaggtggaaggacagcgaccgggatgacttcctggatgactttggctctgagaatgagggggagctgcgtgctcgtaaactgaaatcaccccctgcccagcagcccggaaacgaagaggagaagggggctcccgatgccggcccaggcctgagcaacagccaggagctggacagcggggtgggccggactgacgagagcacccggaacgaagagagctctgagcacgacctgctgggggacgaacccccgagctccaccaacaccccgggaagcctgcgcaagtttggcctgcaaggggacgccctgcagagccgggacttccatttcagcatggactctctgctggccgagggggcggggctgggagggggcgacgtcccgggcctcacggatgaggagtatgagcgctaccgtgagctcctggagatcaagtgccacctggagaacggcaaccagctgggcctcctctttccccgggcctccggaggcaacagcgccctggacgtcaaccgcaacgagagcctgggccacgagatggccatgctggaggaggagctaaggcacctggaattcaagtgccgcaacatactgcgggcgcagaagatgcagcagctgcgtgagcgctgcatgaaggcctggctgctggaggaggagagcctctacgacctggcggccagcgagcccaagaagcacgagctgtccgacatctccgagctgcccgagaagtcggacaaggacagcaccagcgcctacaacactggggagagctgccgcagcaccccgctgcttgtggagcccctgcccgagagccccctgcggcgggccatggccggcaactccaacttgaaccggacccctcccggccccgctgttgccacccccgccaaggcagctcctccaccggggagccccgccaagttccggtccctctcccgggatcctgaggccggccggaggcagcacgcggaggagcgcggccgccgcaaccccaagacggggttgaccctggagcgtgtgggccctgaaagcagcccttacctctcgcggcgccaccgcggccagggccaggagggcgagcactaccacagctgcgtgcagctggccccgacgcgaggcctggaggagctgggccacggccccctgagcttggccggtggccctcgggtgggcggggtggcggccgcggccactgaagcaccgcgcatggagtggaaagtgaaggtgcgcagcgacggaacccgctacgtggccaagcggcccgtgcgagatcggctgctgaaagcccgtgccctgaagatccgggaggagcgcagcggtatgacgaccgacgacgacgcggtgagcgagatgaagatgggccgctactggagcaaggaggagcggaagcagcacctgatccgggcccgtgagcagcggaagcggcgcgagttcatgatgcagagccggctggagtgcctgcgggagcagcagaatggcgacagcaagcccgagctcaacatcattgccctgagccaccgcaaaaccatgaagaagcggaacaagaagatcctggacaactggatcaccatccaggagatgctggcccacggcgcgcgctccgccgatggcaagcgggtctacaaccctcttctctcagtcaccaccgtgtgagctgcccgggcgggtacacggcccaggcccagggaaccccctggggccccggccctcactctcctatagagattgtgtgtgtgtgtgtgtgcgcgcgcgcgtgctcgctgtgcgcacgcacacatctcctcgtctgggtgtgcgcacagggctttgttagcagagagaagcccctgaggagaagggacgcttttcttccttctgcccaagtaaagtgaccatgccagtggccagcactgggggcacacctgtgatgggcaccccttcagctgtgcgtgtgcattccccatcccccatgctcttgcgtgtgcttgcacgtgcacgcacacacacacccagtgctctctccacccgacccgtgtacttgcagacagggaagctgagctgaaaggagcacaagagagtgtccggcttcgctgctgagcgcggcctctccccgccgctgcgcactgcagttatttgtagacaaaggcacccctgcatctcaagaataaagcaagctgcctttgtacttggttg

SEQ ID NO: 21786 - DNA, 2109 bp, Homo sapiens
  source 1..2109: mol_type = unassigned DNA
cgggtcagtgaaaggcgtcttcccgttcccgccctccgcctcctctcgccggccagcaacatgggatgtaatatgtgcgtggtccagaaaccggaggagcagtacaaagtgatgctgcaggaggtggagctgtataaaagcagccaccgggacaagctgggcctgatggtttgctaccgcacggacgacgaggaggacctgggcatttatgtcggagaggtaaatcccaacagcattgcagccaaagacggccggatccgtgagggagaccgcatcatccagattaacggtgtagacgtccagaaccgggaagaggcggtggccatcctgagccaggaagagaacaccaacatctccctgctggtggcccgacctgagagtcagctggcgaaaaggtggaaggacagcgaccgggatgacttcctggatgactttggctctgagaatgagggggagctgcgtgctcgtaaactgaaatcaccccctgcccagcagcccggaaacgaagaggagaagggggctcccgatgccggcccaggcctgagcaacagccaggagctggacagcggggtgggccggactgacgagagcacccggaacgaagagagctctgagcacgacctgctgggggacgaacccccgagctccaccaacaccccgggaagcctgcgcaagtttggcctgcaaggggacgccctgcagagccgggacttccatttcagcatggactctctgctggccgagggggcggggctgggagggggcgacgtcccgggcctcacggatgaggagtatgagcgctaccgtgagctcctggagatcaagtgccacctggagaacggcaaccagctgggcctcctctttccccgggcctccggaggcaacagcgccctggacgtcaaccgcaacgagagcctgggccacgagatggccatgctggaggaggagctaaggcacctggaattcaagtgccgcaacatactgcgggcgcagaagatgcagcagctgcgtgagcgctgcatgaaggcctggctgctggaggaggagagcctctacgacctggcggccagcgagcccaagaagcacgagctgtccgacatctccgagctgcccgagaagtcggacaaggacagcaccagcgcctacaacactggggagagctgccgcagcaccccgctgcttgtggagcccctgcccgagagccccctgcggcgggccatggccggcaactccaacttgaaccggacccctcccggccccgctgttgccacccccgccaaggcagctcctccaccggggagccccgccaagttccggtccctctcccgggatcctgaggccggccggaggcagcacgcggaggagcgcggccgccgcaaccccaagacggggttgaccctggagcgtgtgggccctgaaagcagcccttacctctcgcggcgccaccgcggccagggccaggagggcgagcactaccacagctgcgtgcagctggccccgacgcgaggcctggaggagctgggccacggccccctgagcttggccggtggccctcgggtgggcggggtggcggccgcggccactgaagcaccgcgcatggagtggaaagtgaaggtgcgcagcgacggaacccgctacgtggccaagcggcccgtgcgagatcggctgctgaaagcccgtgccctgaagatccgggaggagcgcagcggtatgacgaccgacgacgacgcggtgagcgagatgaagatgggccgctactggagcaaggaggagcggaagcagcacctgatccgggcccgtgagcagcggaagcggcgcgagttcatgatgcagagccggctggagtgcctgcgggagcagcagaatggcgacagcaagcccgagctcaacatcattgccctgagccaccgcaaaaccatgaagaagcggaacaagaagatcctggacaactggatcaccatccaggagatgctggcccacggcgcgcgctccgccgatggcaagcgggtctacaaccctcttctctcagtcaccaccgtgtgagctgcccgggcgggtacacggcccaggcccagggaaccccctggggccccggccctcactctccta

SEQ ID NO: 21787 - DNA, 2032 bp, Homo sapiens
  source 1..2032: mol_type = unassigned DNA
cggcagtagctctcgcctgcgggtggtttgacaaggctggcggcgccacaccagcgaccaggcctggagctcacacttctgagaggcatcgcaagcgagggccttcacgttactgagaccccagccccgcacagaggctcatggagctcgaagcacgcagggctggcctctccagagctagcagattccttctggacctgtagggtgccgccctagcccagccgccatggcgcagggtttcgcagtgggcttcgacccactgggcctaggagacctgagctccggctctctgagctccctctcctcccgaggccacctaggcagcgactcaggctccaccgcaacgcgatacctgctaaggaagcaacaacggctgctgaacgggcccccccgcggaatccgagcctcatcgcccatgggacgcgtcatcctcatcaactcccccatcgaagccaacagtgatgaaagtgacatcatccattcagtccgggtggagaagagtccagcagggaggctgggcttcagcgtgcgcgggggctcagagcatggcctgggcatcttcgtcagcaaagtggaggaaggcagcagtgcagagcgggctggcctgtgcgtgggggacaagatcacggaggtgaatgggctgagcctggagagcaccaccatgggtagcgccgtaaaggtgctgaccagcagcagccgcctgcacatgatggttcggcgcatgggccgtgtgccgggcatcaagttctccaaggagaagaccacgtgggtggatgtggtgaatcggcgcctggtagtggagaagtgcggttcaacaccctccgacaccagctcagaagatggtgtccggcgcatcgtccacctatacacaacctccgacgacttctgcctgggcttcaacatccgtgggggcaaggagtttggcctgggcatctatgtgtccaaagtggaccatggtgggctggccgaggagaatggcatcaaggtgggggaccaggtcctggcagccaacggtgtcaggtttgacgacatcagccacagccaggccgtggaggtgctgaagggccaaacgcacatcatgctgaccatcaaggagaccggccggtatcctgcctacaaggagatggtttctgagtactgctggctggaccgactgagcaacggggtgctgcagcagctgtccccggcctctgagagcagctccagcgtctcttcgtgcgcctccagcgccccctacagctcgggctccctgccgtcggaccgcatggacatctgcctcgggcaggaggagcccggcagccgcggcccaggctgggggcgggcggacacagccatgcagacggagcccgatgcgggaggccgggtggagacctggtgcagcgtgcggcccacagtcatcctcagggacaccgccatccgctcggacggcccccatcccggccgccgccttgactctgcgctctctgagtctcccaagacggctttgctgctggccctcagccgaccccggccccccatcacgcgctcccagagctatctgaccttgtgggaggagaagcagcagcggaagaaggagaagtcggggtcccctggggagaagggtgccctgcagcgctccaagacgctgatgaacctcttcttcaagggagggcggcaggggaggctagcgcgggacgggcgcagagaggcctggacactggacagcgggagcctggccaaaacttaccctcgcctggacatagagaaagagatgggggtttcaccctgttgcccaggctagtctcaaattcctggactgaagctatctacccgccttagtctcccaaagtgctaggattacagcgtgatctaccacacctggccaatcccaactactctggaagctgaagcagcaagatcacttgagcccaggagtttaagaccagcctgggcaacatagcaagaccctgtctctaaagaaaaaaaaaaagtaaaagaaaaataaagcacgtcttggctcagctgctgatttaagctgggtctaaacatctga

SEQ ID NO: 21788 - DNA, 4013 bp, Homo sapiens
  source 1..4013: mol_type = unassigned DNA
tcgcctgcgggtggtttgacaaggctggcggcgccacaccagcgaccaggcctggagctcacacttctgagaggcatcgcaagcgagggccttcacgttactgagaccccagccccgcacagaggctcatggcgcagggtttcgcagtgggcttcgacccactgggcctaggagacctgagctccggctctctgagctccctctcctcccgaggccacctaggcagcgactcaggctccaccgcaacgcgatacctgctaaggaagcaacaacggctgctgaacgggcccccccgcggaatccgagcctcatcgcccatgggacgcgtcatcctcatcaactcccccatcgaagccaacagtgatgaaagtgacatcatccattcagtccgggtggagaagagtccagcagggaggctgggcttcagcgtgcgcgggggctcagagcatggcctgggcatcttcgtcagcaaagtggaggaaggcagcagtgcagagcgggctggcctgtgcgtgggggacaagatcacggaggtgaatgggctgagcctggagagcaccaccatgggtagcgccgtaaaggtgctgaccagcagcagccgcctgcacatgatggttcggcgcatgggccgtgtgccgggcatcaagttctccaaggagaagaccacgtgggtggatgtggtgaatcggcgcctggtagtggagaagtgcggttcaacaccctccgacaccagctcagaagatggtgtccggcgcatcgtccacctatacacaacctccgacgacttctgcctgggcttcaacatccgtgggggcaaggagtttggcctgggcatctatgtgtccaaagtggaccatggtgggctggccgaggagaatggcatcaaggtgggggaccaggtcctggcagccaacggtgtcaggtttgacgacatcagccacagccaggccgtggaggtgctgaagggccaaacgcacatcatgctgaccatcaaggagaccggccggtatcctgcctacaaggagatggtttctgagtactgctggctggaccgactgagcaacggggtgctgcagcagctgtccccggcctctgagagcagctccagcgtctcttcgtgcgcctccagcgccccctacagctcgggctccctgccgtcggaccgcatggacatctgcctcgggcaggaggagcccggcagccgcggcccaggctgggggcgggcggacacagccatgcagacggagcccgatgcgggaggccgggtggagacctggtgcagcgtgcggcccacagtcatcctcagggacaccgccatccgctcggacggcccccatcccggccgccgccttgactctgcgctctctgagtctcccaagacggctttgctgctggccctcagccgaccccggccccccatcacgcgctcccagagctatctgaccttgtgggaggagaagcagcagcggaagaaggagaagtcggggtcccctggggagaagggtgccctgcagcgctccaagacgctgatgaacctcttcttcaagggagggcggcaggggaggctagcgcgggacgggcgcagagaggcctggacactggacagcgggagcctggccaaaacttaccctcgcctggacatagagaaagcagggggcgtgggcccggtacagaagtttgtcacctggagactgagacgtgaccaggagaggggccgggccctgctgtctgccaggtctgggagtccctccagccagctgcctaatgtggatgagcaggttcaggcctgggagagccggcggcccctcattcaggacctggcccagaggctgctgactgatgacgaggtgctggctgtcacccgccactgctcccggtatgtgcacgagggaggcatagaggacctggtgaggcccctgctggccatcctcgacaggccggagaagctgctactgctgcaggacatcaggagtgtggtggcccccacagacctgggccgcttcgacagcatggtgatgcttgtggagctggaggcttttgaggccctcaagagcagggcagtccggcctcctgctttgagaccagcccggcaggacacgccacccaagcgtcaccttatcacccccgtgcctgacagccgcggaggcttctacctgctgccggtgaacggcttcccggaagaggaagataatggggagctgagggagcggctgggggccctcaaggtctccccaagtgcctctgcccctcgccacccccataaagggatcccccctctacaagacgtgccagtagatgccttcacccccctccgaattgcctgcacaccccctccccagctaccccccgtggctccccggcccctgcggcctaactggctgctgacagaacccctgagccgagagcaccctccgcagagccagatccggggccgggctcagagccgtagccgcagccgtagccgcagccgcagccgcagcagccggggtcaaggcaagtctccaggtagacgctccccatccccggtgcctacccctgcccccagcatgaccaatgggcgctaccacaagcctcggaaggccagaccccctctgccacgacctctggatggggaggcagccaaggtgggggccaagcaagggccctcggagagtggaactgaggggacggccaaggaggcagccatgaagaaccccagtggcgagctgaagacagtgacactgtccaagatgaagcagtccttaggtatcagcatttctgggggcattgagtccaaggtgcagcccatggtgaagatagagaagatcttccctgggggggccgctttcctcagtggggccctgcaggctggcttcgagcttgtggcagtggacggagagaatctagagcaggtgacccaccagcgtgcagtagacaccatccgtcgggcttatcgaaacaaggcccgggagcccatggagcttgtggtcagggtccccgggcccagcccacggccctcaccctctgactcatcagcccttactgatgggggccttcctgctgaccacttgcctgcccaccaaccccttgatgctgctccagttcctgcccactggctcccagaacctcccaccaatccccagactcctcccactgatgccaggctcctccagccaactcccagcccagccccctccccagccctccagactcctgattctaagcccgcaccctccccacgcatcccatgaccctccccctaacctcagattcacccactgactccagcatcccgttatccccaggacctctcctaccaacttcttcaggactctccagctcctgcccaccctgcctcctcccagtgccacactggtggctcacatctttccactttcttccctcctcagctgtcattaaggctctgccttagtgtccaaggacaaggtgctagtgggcagcctgtgtcacctgcactcactgctccccaacctcccaagccaggatagggggtgagaaagccaaggtctggagcttgggattggtgggcactttctcacatgctgtcccttatgagtcgcccaagcctccagggacacagactctcagacagggccctgaaggggtcaatgcatccattcctcaaccccaagcagcattctgtgcaaggaaacggatgaaaggcttttctagtccctgaaatcctgagagatcatttcacgttggggtccactaagacctcagacattctactggatttgtccttcctccatcaccttttctccccaagagagctctatgagggggaggagaatagccagcaaatggtgggggggggggggtcaaacaagttcctgtactctttatccagcacattcacattatttttaaacaaaaaaattttttttaattttttctttgggtttgtacaagaaatttacagtgtgaaaaatatacaagtgaaaacgaggccataaacctgggtgaagggagaggctgcttggtcacaaacacaaataaacaagacatttctg

SEQ ID NO: 21789 - DNA, 624 bp, Homo sapiens
  source 1..624: mol_type = unassigned DNA
gaccccggccccccatcacgcgctcccagagctatctgaccttgtgggaggagaagcagcagcggaagaaggagaagtcggggtcccctggggagaagggtgccctgcagcgctccaagacgctgatgaacctcttcttcaagggagggcggcaggggaggctagcgcgggacgggcgcagagaggcctggacactggacagcgggagcctggccaaaacttaccctcgcctggacatagagaaagcagggggcgtgggcccggtacagaagtttgtcacctggagactgagacgtgaccaggagaggggccgggccctgctgtctgccaggtctgggagtccctccagccagctgcctaatgtggatgagcaggttcaggcctgggagagccggcggcccctcattcaggacctggcccagaggctgctgactgatgacgaggtgctggctgtcacccgccactgctcccggtatgtgcacgagggaggcatagaggacctggtgaggcccctgctggccatcctcgacaggccggagaagctgctactgctgcaggacatcaggagtgtggtggcccccacagacctgggccgcttcgacagcatggtgatgcttgtggagc

SEQ ID NO: 21790 - DNA, 6484 bp, Homo sapiens
  source 1..6484: mol_type = unassigned DNA
ggtcccggccccgctgccgccgccgccacaccggcccttcgggagcgtctgaggaggcgcgggccgctgcgggctcgggcgccgcagcgcgccggcccgagcccctggacgaggcccacggagccgctcgccccgacccagccgcccgatgtcctcaaaatggaggcagcgggggcggcggcgtgaagaaagcggcgctgtgggcgcgggagtaggggcccgggcggaggcggtggcgggatggggctgctgctcatgatcctggcgtcggccgtgctgggttccttcctcacgctcctcgcccagttcttcctgctgtaccgcagacagcccgagccgccggcggacgaggccgcccgcgcgggcgagggcttccgctacatcaagccagtgccgggcctgctcctaagggagtacctttatggcggcggccgggatgaggagccctccggagcggcccctgagggcggcgcgacccccaccgcggcccccgagacccccgccccgccgacgcgggagacttgctacttcctcaacgccaccatcctattcctgttccgggagttgcgggacaccgcgctgacccgccgctgggtcaccaagaagatcaaggtggagttcgaggagctgctgcagaccaagacggccgggcgcctgctggaggggctgagcctgcgggacgtgttcctgggcgagacggtgcccttcatcaagaccatccggctcgtgcggccagtcgtgccctcggccaccggggagcccgatggccctgaaggggaggcgctgcccgccgcctgccccgaggagctggccttcgaggcggaggtggagtacaacgggggcttccacctggccatcgacgtggacctggtcttcggcaagtccgcctacttgtttgtcaagctgtcccgcgtggtgggaaggctgcgcttggtctttacgcgcgtgcccttcacccactggttcttctccttcgtggaagacccgctgatcgacttcgaggtgcgctcccagtttgaagggcggcccatgccccagctcacctccatcatcgtcaaccagctcaagaagatcatcaagcgcaagcacaccctaccgaattacaagatcaggtttaagccgttttttccataccagaccttgcaaggatttgaagaagatgaagagcatatccatatacaacaatgggcacttactgaaggccgtcttaaagttacgttgttagaatgtagcaggttactcatttttggatcctatgacagagaggcaaatgttcattgcacacttgagttaagcagtagtgtttgggaagaaaaacagaggagttctattaagacggttgaattaataaaaggaaatttacaaagtgttggacttacacttcgtcttgtccagtcaactgatgggtatgctgggcacgtcatcattgaaactgtggctccaaactcgcctgctgcaattgcagatcttcagcggggagatcgacttatcgccattggaggtgtgaaaatcacatcaacactgcaagtgttgaagcttatcaagcaggctggtgaccgagtcctggtgtactatgaaaggcctgttggccagagtaatcaaggtgcagtgctgcaagataactttggccagttggaagaaaactttttgtcaagctcatgccaatcgggttatgaagaggaagctgccgggttgacagtagatactgaaagtagagagctggattctgaatttgaagacttggcaagtgatgtcagagcacaaaatgagttcaaagatgaggcacaatcattaagtcatagtcccaaacgtgttccaacaacactttctattaaaccccttggagctatatcaccagttttaaaccgtaaattagctgtaggaagtcacccactaccaccgaaaattcagtccaaagatggaaataaacctccacccctaaaaacttctgagataacagacccagcacaagtgtcaaaaccaacccaaggatctgctttcaaaccacctgtgccaccacgaccacaagcgaaagttcctttgccttccgccgatgctccaaatcaggcagaaccagatgttctcgttgaaaagccagagaaggtggtgccacctcctcttgtagataaatctgctgaaaagcaagcaaaaaatgtggatgccatagacgatgcagctgcacctaagcaatttttagcaaagcaagaagtggccaaagatgtcacttcagaaacttcctgccctactaaggacagttcggacgaccgtcaaacatgggaatcatcagaaattctttatcgtaataagctaggaaaatggacaagaaccagagcatcctgtttgtttgacatagaagcctgtcacaggtacttaaacattgcattgtggtgcagggatcctttcaagttgggaggtctcatctgtttggggcatgttagtttaaaacttgaagatgtggctttaggatgcctagctacatcaaacacggaatacctttccaaattgagactggaagccccctcacctaaggctatagtcactagaaccgcactacgcaatctgagtatgcaaaagggattcaatgacaaattttgctatggtgacattactattcacttcaaatatttgaaagaaggagaatcagaccaccatgtagttactaacgtagaaaaagaaaaagaaccccatttggttgaagaagtttctgttctccctaaagaggagcaatttgttggacagatgggtttaacagaaaacaaacacagttttcaggatactcagttccagaacccaacatggtgtgactactgtaagaaaaaagtttggactaaagcagcttcccagtgtatgttttgtgcttatgtttgccataaaaaatgtcaagaaaagtgtctagctgagacttctgtttgtggagcaactgataggcgaatagacaggacactgaaaaaccttaggctggaaggacaggaaaccctcttaggcctgcctcctcgtgttgatgctgaagctagcaagtcagtcaataaaacaacaggtttgacaaggcatattatcaatactagttctcgtttattaaatttgcgtcaagtctctaaaactcgcctttctgaaccaggaaccgatctcgtagaaccttcaccaaaacacacacccaacacgtcagacaacgaaggcagtgacacggaggtctgtggtccaaacagtccttctaaacggggaaacagcacaggaataaagttagtgagaaaagagggtggtctggatgacagtgttttcattgcagttaaagaaattggtcgtgatctgtacaggggcttgcctacagaggaaaggatccagaaactagagttcatgttggataagctacagaatgaaattgatcaggagttggaacacaataattcccttgttagagaagaaaaagagacaactgatacaaggaaaaaatcacttctttctgctgccttagctaaatcaggtgaaaggctacaagctctaacacttcttatgattcactacagagcaggcattgaagatatagaaactttagaaagtctgtctttagaccagcactccaaaaaaataagcaagtacacagatgatacagaagaagaccttgataatgaaataagccaactaatagactctcagccattcagcagcatatcagatgacttatttggcccatccgagtctgtgtagcagacaggtctatttaagctttcaaatgaacagggtaaagttgcatctaaagtaccacagatacaaccatgtttaaatcctcgtatgcactctggcctgcttctccagttacttgcttgtgtaagaacaaaaatgagaaaggttgttttccagtaaaaacatgaccagcttactaattggttgttttggattgcatttatagctatgcttttttgggtttatactgggaatttatttttactaaattatttaacttttctaattatgtaattatgtaagctagcttttcatgtttatgtatgtatggtgtccccttgtgttatttttcttcctcttggtttttgaattagtgttaaatagaatactgtctagattcttaaaatattttcatttccatcatggttataacaaatttgctgcatgcccaaactgacaacagcaatcactgagggaacaggttttgaatctttcttttgtgttatgaagtttatcgtctctacttgcttgagatttttgttattttgggggtttgggggtgctttttgttttgtttttgccaaatgtaacatgaaagcagatgctgcagctttagtctgttatgctgatttagtaaaaaaaaattttttacatatattgcttgctttcgatgcttctgtgaaatttttttctaaagcttttgtgcagctgtatggtaaaaatatggtgattaatttgaagagcttacattgaaagacaatgtaataggaaataaatgtagattgcagttggtcaagaattttgtagagaggataacaagacttaattactgaaaaacagtaacatagcattttgaaatataatcttttaaaatattgatgctttccttttaaatggaaatttaaattttataattaaaagtttaaacatttatgataattttcctcatcagttctcccataggaaataaagcatgtgaaagggtatttaaagttttggaggactctttttaaaatgactgtgttgataactagtttgggctggttttgttttagaaaaaacattttcatgtaggagtattctgtgaaggaaaggaatcatgcaaaatatactttttgctttggcgtcttacagttgtaaaggaatggtgatcattctgaatacttctgtagtgagtattcattaagaaaagaatgacaaaaatagtattcatacataggaattgggaccagttctctgaaaatgaagatatactcacactgggtccattttacgggtcccagtaacatttgactgagggaaaacaagtaagctcgactgttgttggggtaccttaatggtttcggtctgttatatacctataaaatagacaagtatatgtttgtccctttgtaggtaactgctatgatgattgctatatagtgaaactgacatgagtttaaaactagatggagcagcttttattgctggcaggaaaaagcatggtgtaatattaaggactggggcccaggtctagactccaggactccataaaagagtttaagttcaagcccttccattaatgaactgtgtaagcataggcagttacaaaaggacccatctctaaaatgggaataataatactttacctccctcacagtattgttgtgagggaaacaatagcataactgcaaaagtgctttgaacagtaaaaagatatacaagtaaaaggcattatttatatgagtaagaaagacatttttgaggggagaaaagttattccactttaaaaatcaatagccaagtctcatgccttttgttactttagtaagcgaaaatttcaggtactaaatacctttcttagccaagtttataacaaaaacatctcagtatacttcattacttatttaagcgtgatgtcttttttttttttttttttttttttttttttttttttttttgagacagagtctcgctgtctcccaggctggagtgcagtggcatgatctcggctcactgcaagctccgcctcccaggttcacgccattctcctgcctcagcctccggagtagctgggagtacaggcgcggctaattttttgtatttttagtagagacggggtttcaccatgttagccaggatggtctcgatctcctgacctcgtgatccacctgcctcggcctcccaaagtgctgggattacaggcgtgagccaccacgcccggccacgtgatcttattttaaaagaacactgctatagaagaatttacacaccaaattccctgaaagctaaagtattgttccataacttacacttgaggcaatctgctcagtgtgtaaccactttataaaaaataacttaccattgataacctggaaggtggactacttgtaagtagctggtgtttattgattaaaccatggaagttttcatgatacccaagcatgttgctgaaactgatgcatttgaaagagctgttgaaataatgcaaaactttggttttataagaatctactcatgttttaaaagtatttaactctgtagaccacaattatagaaagctcagtaatgctgctaatgacatttgtaaactatatctgtaatgtagtgcaatatttttatatttcactgggagaggcagtagagacatcatagttgtactttagtgcaagtgggggaacactccaaatagcctagagtatagtaaggtacaaagcttcaatgaaaaaagctgtattatattacattactgatgtaatcttgctgccatgctatgtatcaatagctaaaaaataataataaagactaccacagaaaacaagaa

SEQ ID NO: 21791 - DNA, 4248 bp, Homo sapiens
  source 1..4248: mol_type = unassigned DNA
gtccggggagagccagcgagcgcgcgggcggcgtagccggcctgtctgggccgcctcgtggggagggagggggcgcccggccgcccggcggcgaccccggggcctggccgccaccatgggcttcgagctggaccgcttcgacggcgacgtggacccggacctgaagtgcgcgctgtgccacaaggtcctggaggacccgctgaccacgccgtgcggccacgtcttctgcgccggctgcgtgctgccctgggtggtgcaggagggcagctgcccggcgcgctgccgcggtcgcctgtcggccaaagagctcaaccacgtcctgccgctcaagcgccttatcctcaagctggacatcaagtgcgcgtacgcgacgcgcggctgcggccgggtggtcaagctgcagcagctgccggagcacctcgagcgctgcgacttcgcgcccgcgcgctgtcgccacgcgggttgcggccaggtgctgctgcggcgcgacgtggaggcgcacatgcgcgacgcctgcgacgcgcggccagtgggccgctgccaggagggctgcgggctacccttgacgcacggcgagcagcgcgcgggcggccactgctgcgcgcgagcgctgcgggcgcacaacggcgcgctccaggcccgcctgggcgcgctgcacaaggcgctcaagaaggaggcgctgcgcgctgggaagcgcgagaagtcgctggtggcccagctggccgcggcgcagcttgagctgcagatgaccgcgctgcgctaccagaagaaattcaccgaatacagcgcgcgcctcgactcgctcagccgctgcgtggccgcgccgcccggcggcaagggcgaagaaaccaaaagtctgactcttgtcctgcatcgggactccggctccctgggattcaatattattggtggccggccgagtgtggataaccacgatggatcatccagtgaaggaatctttgtatccaagatagttgacagtgggcctgcagccaaggaaggaggcctgcaaattcatgacaggattattgaggtcaacggcagagacttatccagagcaactcatgaccaggctgtggaagctttcaagacagccaaggagcccatagtggtgcaggtgttgagaagaacaccaaggaccaaaatgttcacgcctccatcagagtctcagctggtggacacgggaacccaaaccgacatcacctttgaacatatcatggccctcactaagatgtcctctcccagcccacccgtgctggatccctatctcttgccagaggagcatccctcagcccatgaatactacgatccaaatgactacattggagacatccatcaggagatggacagggaggagctggagctggaggaagtggacctctacagaatgaacagccaggacaagctgggcctcactgtgtgctaccggacggacgatgaagacgacattgggatttatatcagtgagattgaccctaacagcattgcagccaaggatgggcgcatccgagaaggagaccgcattatccagattaatgggatagaggtgcagaaccgtgaagaggctgtggctcttctaaccagtgaagaaaataaaaacttttcattgctgattgcaaggcctgaactccagctggatgagggctggatggatgatgacaggaacgactttctggatgacctgcacatggacatgctggaggagcagcaccaccaggccatgcaattcacagctagcgtgctgcagcagaagaagcacgacgaagacggtgggaccacagatacagccaccatcttgtccaaccagcacgagaaggacagcggtgtggggcggaccgacgagagcacccgtaatgacgagagctcggagcaagagaacaatggcgacgacgccaccgcatcctccaacccgctggcggggcagaggaagctcacctgcagccaggacaccttgggcagcggcgacctgcccttcagcaacgagtctttcatttcggccgactgcacggacgccgactacctggggatcccggtggacgagtgcgagcgcttccgcgagctcctggagctcaagtgccaggtgaagagcgccaccccttacggcctgtactaccctagcggccccctggacgccggcaagagtgaccctgagagcgtggacaaggagctggagctgctgaacgaagagctgcgcagcatcgagctggagtgcctgagcatcgtgcgcgcccacaagatgcagcagctcaaggagcagtaccgcgagtcctggatgctgcacaacagcggcttccgcaactacaacaccagcatcgacgtgcgcagacacgagctctcagatatcaccgagctcccggagaaatccgacaaggacagctcgagcgcctacaacacaggcgagagctgccgcagcaccccgctcaccctggagatctcccccgacaactccttgaggagagcggcggagggcatcagctgcccgagcagcgaaggggctgtggggaccacggaagcctacgggccagcctccaagaatctgctctccatcacggaagatcccgaagtgggcacccctacctatagcccgtccctgaaggagctggaccccaaccagcccctggaaagcaaagagcggagagccagcgacgggagccggagccccacgcccagccagaagctgggcagcgcctacctgccctcctatcaccactccccatacaagcacgcgcacatcccggcgcacgcccagcactaccagagctacatgcagctgatccagcagaagtcggccgtggagtacgcgcaaagccagatgagcctggtgagcatgtgcaaggacctgagctctcccaccccgtcggagccgcgcatggagtggaaggtgaagatccgcagcgacgggacgcgctacatcaccaagaggcccgtgcgggaccgcctgctgcgggagcgcgccctgaagatccgggaagagcgcagcggcatgaccaccgacgacgacgcggtgagcgagatgaagatggggcgctactggagcaaggaggagaggaagcagcacctggtgaaggccaaggagcagcggcggcggcgcgagttcatgatgcagagcaggttggattgtctcaaggagcagcaagcagccgatgacaggaaggagatgaacattctcgaactgagccacaaaaagatgatgaagaagaggaataagaaaatcttcgataactggatgacgatccaagaactcttaacccacggcacaaaatccccggacggcactagagtatacaattccttcctatcggtgactactgtataattttcacttctgcattatgtacataaaggagaccactaccactggggtagaaattcctgcctcgttcaatgcggcaagtttttgtatataagataagtacggtcttcatgtttatagtccaaatttgcaaaccctacaactctgggtgtcataggtctattttaagggaagagagagaaaaacacccttactatcttggaaggcaatattaacaaacagagcttttttcaaatagcaattgtacttttctacctgtacccttttacataaagtgtttaaatttcagaaagatcttttattaagcatactttcacagaataacttgtttaaactatattcatataaaaaagttaaacacgctttttttcctgcctaaaacacaaatacaactgccagtatgtatttttaatggaaccctattttataatggtacgttactgaatgtgtttcatatgcgtgaccgttaagatattatcatttaggtgaaggtttcaactcaaaaccacccaacccggtggttaacgatttaatacatataaccaaaccggcagcgtttagagttgggatatacatttaaacattttcctggttaaggttcccaagagagtgtaaaggttttagcagaaagcaaaatatcttgcatctttatggaagtttaaagcatgtttgcaaatattgcagcccattgaaagaatttgcatgtacaggaaagttgtggatggagacggtttgtggaattttaagtgctcattgtagtaaacttttgctttgtagatttgaaggtacagacttatacaggcaagttcacaaaatcatgattagttacaaacagtaaaatgaagttaaaataaattattattttctatttgatatgttttgatgtgattcctcattttgcagtggtgcctataaaataaaagccttttgcagtg

SEQ ID NO: 21792 - DNA, 2288 bp, Homo sapiens
  source 1..2288: mol_type = unassigned DNA
gagcgcgcgggcggcgtagccggcctgtctgggccgcctcgtggggagggagggggcgcccggccgcccggcggcgaccccggggcctggccgccaccatgggcttcgagctggaccgcttcgacggcgacgtggacccggacctgaagtgcgcgctgtgccacaaggtcctggaggacccgctgaccacgccgtgcggccacgtcttctgcgccggctgcgtgctgccctgggtggtgcaggagggcagctgcccggcgcgctgccgcggtcgcctgtcggccaaagagctcaaccacgtcctgccgctcaagcgccttatcctcaagctggacatcaagtgcgcgtacgcgacgcgcggctgcggccgggtggtcaagctgcagcagctgccggagcacctcgagcgctgcgacttcgcgcccgcgcgctgtcgccacgcgggttgcggccaggtgctgctgcggcgcgacgtggaggcgcacatgcgcgacgcctgcgacgcgcggccagtgggccgctgccaggagggctgcgggctacccttgacgcacggcgagcagcgcgcgggcggccactgctgcgcgcgagcgctgcgggcgcacaacggcgcgctccaggcccgcctgggcgcgctgcacaaggcgctcaagaaggaggcgctgcgcgctgggaagcgcgagaagtcgctggtggcccagctggccgcggcgcagcttgagctgcagatgaccgcgctgcgctaccagaagaaattcaccgaatacagcgcgcgcctcgactcgctcagccgctgcgtggccgcgccgcccggcggcaagggcgaagaaaccaaaagtctgactcttgtcctgcatcgggactccggctccctgggattcaatattattggtggccggccgagtgtggataaccacgatggatcatccagtgaaggaatctttgtatccaagatagttgacagtgggcctgcagccaaggaaggaggcctgcaaattcatgacaggattattgaggtcaacggcagagacttatccagagcaactcatgaccaggctgtggaagctttcaagacagccaaggagcccatagtggtgcaggtgttgagaagaacaccaaggaccaaaatgttcacgcctccatcagagtctcagctggtggacacgggaacccaaaccgacatcacctttgaacatatcatggccctcactaagatgtcctctcccagcccacccgtgctggatccctatctcttgccagaggagcatccctcagcccatgaatactacgatccaaatgactacattggagacatccatcaggagatggacagggaggagctggagctggaggaagtggacctctacagaatgaacagccaggacaagctgggcctcactgtgtgctaccggacggacgatgaagacgacattgggatttatatcagtgagattgaccctaacagcattgcagccaaggatgggcgcatccgagaaggagaccgcattatccagattaatgggatagaggtgcagaaccgtgaagaggctgtggctcttctaaccagtgaagaaaataaaaacttttcattgctgattgcaaggcctgaactccagctggatgagggctggatggatgatgacaggaacgactttctggatgacctgcacatggacatgctggaggagcagcaccaccaggccatgcaattcacagctagcgtgctgcagcagaagaagcacgacgaagacggtgggaccacagatacagccaccatcttgtccaaccagcacgagaaggacagcggtgtggggcggaccgacgagagcacccgtaatgacgagagctcggagcaagagaacaatggcgacgacgccaccgcatcctccaacccgctggcggggcagaggaagctcacctgcagccaggacaccttgggcagcggcgacctgcccttcagcaacgagtctttcatttcggccgactgcacggacgccgactacctggggatcccggtggaaggtgaagatccgcagcgacgggacgcgctacatcaccaagaggcccgtgcgggaccgcctgctgcgggagcgcgccctgaagatccgggaagagcgcagcggcatgaccaccgacgacgacgcggtgagcgagatgaagatggggcgctactggagcaaggaggagaggaagcagcacctggtgaaggccaaggagcagcggcggcggcgcgagttcatgatgcagagcaggttggattgtctcaaggagcagcaagcagccgatga

SEQ ID NO: 21793 - DNA, 2778 bp, Homo sapiens
  source 1..2778: mol_type = unassigned DNA
gcgaggggaggaagggaagcgtggaaggggggagagagttgttgtctagcctctgagagcagcgccaatgtgaagcgttgcagtcgcttgactcacctgaggctctccaaggataccttcaatgcctgcactgtaagggagctgcttttcccgggtgctggcgagaacggaagccttcctttgacgtttttctaaacatgggatgcagtctgtgcagcctgcagaagcaagaggagcagtacaaattactctatgaagtttgtcaggtcaacggcagagacttatccagagcaactcatgaccaggctgtggaagctttcaagacagccaaggagcccatagtggtgcaggtgttgagaagaacaccaaggaccaaaatgttcacgcctccatcagagtctcagctggtggacacgggaacccaaaccgacatcacctttgaacatatcatggccctcactaagatgtcctctcccagcccacccgtgctggatccctatctcttgccagaggagcatccctcagcccatgaatactacgatccaaatgactacattggagacatccatcaggagatggacagggaggagctggagctggaggaagtggacctctacagaatgaacagccaggacaagctgggcctcactgtgtgctaccggacggacgatgaagacgacattgggatttatatcagtgagattgaccctaacagcattgcagccaaggatgggcgcatccgagaaggagaccgcattatccagattaatgggatagaggtgcagaaccgtgaagaggctgtggctcttctaaccagtgaagaaaataaaaacttttcattgctgattgcaaggcctgaactccagctggatgagggctggatggatgatgacaggaacgactttctggatgacctgcacatggacatgctggaggagcagcaccaccaggccatgcaattcacagctagcgtgctgcagcagaagaagcacgacgaagacggtgggaccacagatacagccaccatcttgtccaaccagcacgagaaggacagcggtgtggggcggaccgacgagagcacccgtaatgacgagagctcggagcaagagaacaatggcgacgacgccaccgcatcctccaacccgctggcggggcagaggaagctcacctgcagccaggacaccttgggcagcggcgacctgcccttcagcaacgagtctttcatttcggccgactgcacggacgccgactacctggggatcccggtggacgagtgcgagcgcttccgcgagctcctggagctcaagtgccaggtgaagagcgccaccccttacggcctgtactaccctagcggccccctggacgccggcaagagtgaccctgagagcgtggacaaggagctggagctgctgaacgaagagctgcgcagcatcgagctggagtgcctgagcatcgtgcgcgcccacaagatgcagcagctcaaggagcagtaccgcgagtcctggatgctgcacaacagcggcttccgcaactacaacaccagcatcgacgtgcgcagacacgagctctcagatatcaccgagctcccggagaaatccgacaaggacagctcgagcgcctacaacacaggcgagagctgccgcagcaccccgctcaccctggagatctcccccgacaactccttgaggagagcggcggagggcatcagctgcccgagcagcgaaggggctgtggggaccacggaagcctacgggccagcctccaagaatctgctctccatcacggaagatcccgaagtgggcacccctacctatagcccgtccctgaaggagctggaccccaaccagcccctggaaagcaaagagcggagagccagcgacgggagccggagccccacgcccagccagaagctgggcagcgcctacctgccctcctatcaccactccccatacaagcacgcgcacatcccggcgcacgcccagcactaccagagctacatgcagctgatccagcagaagtcggccgtggagtacgcgcaaagccagatgagcctggtgagcatgtgcaaggacctgagctctcccaccccgtcggagccgcgcatggagtggaaggtgaagatccgcagcgacgggacgcgctacatcaccaagaggcccgtgcgggaccgcctgctgcgggagcgcgccctgaagatccgggaagagcgcagcggcatgaccaccgacgacgacgcggtgagcgagatgaagatggggcgctactggagcaaggaggagaggaagcagcacctggtgaaggccaaggagcagcggcggcggcgcgagttcatgatgcagagcaggttggattgtctcaaggagcagcaagcagccgatgacaggaaggagatgaacattctcgaactgagccacaaaaagatgatgaagaagaggaataagaaaatcttcgataactggatgacgatccaagaactcttaacccacggcacaaaatccccggacggcactagagtatacaattccttcctatcggtgactactgtataattttcacttctgcattatgtacataaaggagaccactaccactggggtagaaattcctgcctcgttcaatgcggcaagtttttgtatataagataagtacggtcttcatgtttatagtccaaatttgcaaaccctacaactctgggtgtcataggtctattttaagggaagagagagaaaaacacccttactatcttggaaggcaatattaacaaacagagcttttttc

SEQ ID NO: 21794 - DNA, 2927 bp, Homo sapiens
  source 1..2927: mol_type = unassigned DNA
agcatttgctcagtactctcaacataaaccaagcttagatcgcaatgaaactgcggacctgcaggctgccttgcttcactgagtcaatttttaaatgaagatggaacacaagaggatgatcttattgttcagtaaatttactctaatacataaaccccatggtggaagatggtatttggtcaacggcagagacttatccagagcaactcatgaccaggctgtggaagctttcaagacagccaaggagcccatagtggtgcaggtgttgagaagaacaccaaggaccaaaatgttcacgcctccatcagagtctcagctggtggacacgggaacccaaaccgacatcacctttgaacatatcatggccctcactaagatgtcctctcccagcccacccgtgctggatccctatctcttgccagaggagcatccctcagcccatgaatactacgatccaaatgactacattggagacatccatcaggagatggacagggaggagctggagctggaggaagtggacctctacagaatgaacagccaggacaagctgggcctcactgtgtgctaccggacggacgatgaagacgacattgggatttatatcagtgagattgaccctaacagcattgcagccaaggatgggcgcatccgagaaggagaccgcattatccagattaatgggatagaggtgcagaaccgtgaagaggctgtggctcttctaaccagtgaagaaaataaaaacttttcattgctgattgcaaggcctgaactccagctggatgagggctggatggatgatgacaggaacgactttctggatgacctgcacatggacatgctggaggagcagcaccaccaggccatgcaattcacagctagcgtgctgcagcagaagaagcacgacgaagacggtgggaccacagatacagccaccatcttgtccaaccagcacgagaaggacagcggtgtggggcggaccgacgagagcacccgtaatgacgagagctcggagcaagagaacaatggcgacgacgccaccgcatcctccaacccgctggcggggcagaggaagctcacctgcagccaggacaccttgggcagcggcgacctgcccttcagcaacgagtctttcatttcggccgactgcacggacgccgactacctggggatcccggtggacgagtgcgagcgcttccgcgagctcctggagctcaagtgccaggtgaagagcgccaccccttacggcctgtactaccctagcggccccctggacgccggcaagagtgaccctgagagcgtggacaaggagctggagctgctgaacgaagagctgcgcagcatcgagctggagtgcctgagcatcgtgcgcgcccacaagatgcagcagctcaaggagcagtaccgcgagtcctggatgctgcacaacagcggcttccgcaactacaacaccagcatcgacgtgcgcagacacgagctctcagatatcaccgagctcccggagaaatccgacaaggacagctcgagcgcctacaacacaggcgagagctgccgcagcaccccgctcaccctggagatctcccccgacaactccttgaggagagcggcggagggcatcagctgcccgagcagcgaaggggctgtggggaccacggaagcctacgggccagcctccaagaatctgctctccatcacggaagatcccgaagtgggcacccctacctatagcccgtccctgaaggagctggaccccaaccagcccctggaaagcaaagagcggagagccagcgacgggagccggagccccacgcccagccagaagctgggcagcgcctacctgccctcctatcaccactccccatacaagcacgcgcacatcccggcgcacgcccagcactaccagagctacatgcagctgatccagcagaagtcggccgtggagtacgcgcaaagccagatgagcctggtgagcatgtgcaaggacctgagctctcccaccccgtcggagccgcgcatggagtggaaggtgaagatccgcagcgacgggacgcgctacatcaccaagaggcccgtgcgggaccgcctgctgcgggagcgcgccctgaagatccgggaagagcgcagcggcatgaccaccgacgacgacgcggtgagcgagatgaagatggggcgctactggagcaaggaggagaggaagcagcacctggtgaaggccaaggagcagcggcggcggcgcgagttcatgatgcagagcaggttggattgtctcaaggagcagcaagcagccgatgacaggaaggagatgaacattctcgaactgagccacaaaaagatgatgaagaagaggaataagaaaatcttcgataactggatgacgatccaagaactcttaacccacggcacaaaatccccggacggcactagagtatacaattccttcctatcggtgactactgtataattttcacttctgcattatgtacataaaggagaccactaccactggggtagaaattcctgcctcgttcaatgcggcaagtttttgtatataagataagtacggtcttcatgtttatagtccaaatttgcaaaccctacaactctgggtgtcataggtctattttaagggaagagagagaaaaacacccttactatcttggaaggcaatattaacaaacagagcttttttcaaatagcaattgtacttttctacctgtacccttttacataaagtgtttaaatttcagaaagatcttttattaagcatactttcacagaataacttgtttaaactatattcatataaaaaagttaaacacgctttttttcctgcctaaaacacaaatacaactgccagtatgtatttttaatggaaccctattttataatggtacgttactgaatgtgtttcatatgcgtgaccgtta

SEQ ID NO: 21795 - DNA, 3411 bp, Homo sapiens
  source 1..3411: mol_type = unassigned DNA
aagatacttagggaaagcgaagaagagcatgctgctacacaccactctggcttacgcttccagctaacagcggtttgtctgtgtttctggactgaagtgactgatgaaaaacagtagtcaagtctggagggtgattccctttcagttcacttgcctttcagttctggggaaattagaagatttgctctctctctctgcttcttagaatgggctgcaatttgtgcacttttcagaaaagagaggaacactacaaactgctgtatgaagtttcccaggagctgtgacttgaacaatgctattctgcatgaaattgagaaattgccagtgttcccaacctgatggagagtatgtgtgggatcttagttctgcttcattaagctccttgtgaatgagtggtaagagacaatttttccttaaacctttggcattgttgacatgttggccatccactgtcaatgggaaggatctttcaaaggccactcatgaagaggcagtggaagcttttcgcaatgccaaggagcccattgtggtgcaggtgttaaggcgaacacctcttagtagaccagcctatgggatggcttcagaagtgcagcttatgaatgccagcactcagacggacatcaccttcgaacacatcatggctctggccaagcttcgtccacctacccctccagtgccagacatctgtccattcctgctctcagacagctgccattctctacatccaatggagcatgaattttatgaggacaatgagtatatttccagcttgcctgctgatgcagacagaacagaagactttgaatatgaggaggtcgagttgtgtcgtgttagcagtcaagagaagctgggcctgacagtctgttaccgaacagatgatgaagaagacaccggcatttatgtcagcgaggttgacccaaatagcattgctgccaaagacggccggattcgagaaggggatcggattttgcaaataaatggggaagatgtccagaatcgagaagaagcagtggccttgctgtctaacgatgagtgtaagagaatcgtgctgcttgttgcaaggccagagattcagctggatgaaggctggctggaagatgaaaggaatgaattcttagaggagttaaacttggagatgttggaagaagagcataatgaagcaatgcagcccactgccaatgaggtggagcagccaaaaaagcaagaagaagaagaaggcacaacagacactgcaacatcctcatccaacaaccatgagaaggacagtggagtaggacgtacagatgaaagcttgcgaaatgatgagagctcagagcaggagaatgcagccgaggaccccaatagcacatctttgaagagcaagagagacctggggcagagccaagacactctgggaagtgttgaacttcagtacaatgagagcctcgtatctggtgaatacattgactcagactgcattggcaacccagatgaggactgtgaaagattcaggcagctcttggagctcaaatgcaagattcgaaatcatggagagtatgacctgtattactcaagcagcacaattgaatgcaatcaaggggagcaagagggagtggagcatgagctacagttgcttaatgaagaactgagaaacattgagcttgagtgtcagaatatcatgcaggctcacaggctccagaaagtgacagaccagtatggagacatctggacattgcatgatggaggattccggaattataacaccagcatagatatgcaaaggggaaagctagatgacatcatggagcatccagaaaagtctgacaaggacagttctagtgcttacaacacagctgagagctgcagaagtactccgctcactgtagaccgttcccctgacagttcccttccaagggtgatcaacctcaccaataagaaaaacctgagaagcacaatggcagccacccagtcctcttccggacagagcagtaaagagtcgacctccaccaaagccaaaaccactgagcaaggttgtagcgctgaaagcaaggagaaggttttagaaggcagcaagcttcctgatcaagagaaggcagtcagcgaacacatcccttacctctctccttaccacagctcctcatatagatatgcaaacatcccagcacacgcccggcattatcaaagctacatgcagttaattcaacagaaatctgcagtcgagtatgctcagagtcagctcagcttggtgagcatgtgcaaggagtctcagaagtgttcagagcccaagatggaatggaaggtgaaaattaggagcgacgggacacggtacatcacaaagagacccgtgcgagaccgaatcctgaaggaacgtgccttaaagatcaaggaagagcggagtggcatgaccacagacgatgacaccatgagcgagatgaaaatggggcgctactggagcaaagaggagagaaagcagcacctggttagggccaaagagcagcgccgtcgccgtgagttcatgatgcgaagcaggttagagtgtctcaaggagagccctcagagcggcagtgagggcaagaaggagatcaatatcattgaactgagtcacaaaaagatgatgaaaaagagaaacaagaaaattttggacaactggatgacaatccaagaactgatgacccatggggccaagtctccagatggcacgagagtccataatgccttcttgtcggtgaccactgtatgaccgaatgaatggaatgcatgcgactgattttaggaggatgctaccagtttcggtagagtatgattgcctcgttcaatgtggcgtttttatatatattttgtgactctttatagtttaaattttttgtaagcaaaaaatacctggtaatttttcatttgtttttcatatactggtaccttctttttggctgagatctttcttttacttgtgatatattcatattactcgtttataaaaaatcaaaaacaaaaggaaagaaaacaaaaaaaacttgcacaaaaatactgaggagccaattaatttcctacttcaatgtatctaatgtaagtgaaaatctggatttatttctctagtttacttattttctactttaataataactcaatgccaaaatatttctatgcttgtttcttggcataatacattttaaatcaaacctgttcgtaataaatcatgtgccacatcttgtcttacacataaaagccactgcttttaacatcccattgtacatttaacacataaatggtgttaacatcccattgtacatttaacacataaatggccattgtctttgtctcagtaaagtgtaggtggacaatcttcctgtgatatgtagtgacattggtcatgtagctagataattatggtaattgtgacaattaaagagaaataaattattgattatccttcag

SEQ ID NO: 21796 - DNA, 3347 bp, Homo sapiens
  source 1..3347: mol_type = unassigned DNA
tccctaacatgggctttgccctggagcgcttcgcagaagccgtggacccggctctggagtgcaaactgtgcggccaggtgcttgaagagcccctgtgcacgccgtgcgggcacgtcttctgcgccagctgcctgttgccctgggcggtgcggaggcgccggtgcccgctgcagtgccagcccttggcgcccggcgagctgtaccgggtgctgccgctgcgcagcctcatccagaagctgcgagtccagtgcgactaccgcgcccgcggctgcggccactcggtcaggctgcacgagctggaggcgcacgtcgagcactgcgacttcggccctgcccgccggctccgcagccgcgggggctgcgcttcggggctgggcggtggtgaggtgcccgcgcgggggggctgcggtccgacacccagggctggccggggcgggggcgcgcgcggggggccgccgggcggccgctggggccgcgggcggggacccgggcctcgggtcctcgcctggaggcggcgcgagaaggcgctgctggcgcagctctgggcgctgcagggcgaggtgcagctcacggcgcgcaggtaccaggagaagttcacccaatacatggctcacgtccgcaacttcgtcggcgacctcggtggcggccaccgcagggatggagagcataagccattcactattgtgttagaaagagaaaatgacactttgggattcaatattataggaggtcgaccaaatcagaataatcaggaaggaacatcgactgaaggaatttacgtttcaaaaattttagaaaatggacctgctgacagagcagatggcctggagattcatgacaaaatcatggaggtcaatgggaaggatctttcaaaggccactcatgaagaggcagtggaagcttttcgcaatgccaaggagcccattgtggtgcaggtgttaaggcgaacacctcttagtagaccagcctatgggatggcttcagaagtgcagcttatgaatgccagcactcagacggacatcaccttcgaacacatcatggctctggccaagcttcgtccacctacccctccagtgccagacatctgtccattcctgctctcagacagctgccattctctacatccaatggagcatgaattttatgaggacaatgagtatatttccagcttgcctgctgatgcagacagaacagaagactttgaatatgaggaggtcgagttgtgtcgtgttagcagtcaagagaagctgggcctgacagtctgttaccgaacagatgatgaagaagacaccggcatttatgtcagcgaggttgacccaaatagcattgctgccaaagacggccggattcgagaaggggatcggattttgcaaataaatggggaagatgtccagaatcgagaagaagcagtggccttgctgtctaacgatgagtgtaagagaatcgtgctgcttgttgcaaggccagagattcagctggatgaaggctggctggaagatgaaaggaatgaattcttagaggagttaaacttggagatgttggaagaagagcataatgaagcaatgcagcccactgccaatgaggtggagcagccaaaaaagcaagaagaagaagaaggcacaacagacactgcaacatcctcatccaacaaccatgagaaggacagtggagtaggacgtacagatgaaagcttgcgaaatgatgagagctcagagcaggagaatgcagccgaggaccccaatagcacatctttgaagagcaagagagacctggggcagagccaagacactctgggaagtgttgaacttcagtacaatgagagcctcgtatctggtgaatacattgactcagactgcattggcaacccagatgaggactgtgaaagattcaggcagctcttggagctcaaatgcaagattcgaaatcatggagagtatgacctgtattactcaagcagcacaattgaatgcaatcaaggggagcaagagggagtggagcatgagctacagttgcttaatgaagaactgagaaacattgagcttgagtgtcagaatatcatgcaggctcacaggctccagaaagtgacagaccagtatggagacatctggacattgcatgatggaggattccggaattataacaccagcatagatatgcaaaggggaaagctagatgacatcatggagcatccagaaaagtctgacaaggacagttctagtgcttacaacacagctgagagctgcagaagtactccgctcactgtagaccgttcccctgacagttcccttccaagggtgatcaacctcaccaataagaaaaacctgagaagcacaatggcagccacccagtcctcttccggacagagcagtaaagagtcgacctccaccaaagccaaaaccactgagcaaggttgtagcgctgaaagcaaggagaaggttttagaaggcagcaagcttcctgatcaagagaaggcagtcagcgaacacatcccttacctctctccttaccacagctcctcatatagatatgcaaacatcccagcacacgcccggcattatcaaagctacatgcagttaattcaacagaaatctgcagtcgagtatgctcagagtcagctcagcttggtgagcatgtgcaaggagtctcagaagtgttcagagcccaagatggaatggaaggtgaaaattaggagcgacgggacacggtacatcacaaagagacccgtgcgagaccgaatcctgaaggaacgtgccttaaagatcaaggaagagcggagtggcatgaccacagacgatgacaccatgagcgagatgaaaatggggcgctactggagcaaagaggagagaaagcagcacctggttagggccaaagagcagcgccgtcgccgtgagttcatgatgcgaagcaggttagagtgtctcaaggagagccctcagagcggcagtgagggcaagaaggagatcaatatcattgaactgagtcacaaaaagatgatgaaaaagagaaacaagaaaattttggacaactggatgacaatccaagaactgatgacccatggggccaagtctccagatggcacgagagtccataatgccttcttgtcggtgaccactgtatgaccgaatgaatggaatgcatgcgactgattttaggaggatgctaccagtttcggtagagtatgattgcctcgttcaatgtggcgtttttatatatattttgtgactctttatagtttaaattttttgtaagcaaaaaatacctggtaatttttcatttgtttttcatatactggtaccttctttttggctgagatctttcttttacttgtgatatattcatattactcg

SEQ ID NO: 21797 - DNA, 3041 bp, Homo sapiens
  source 1..3041: mol_type = unassigned DNA
acgggggagtgttgccatgaactgactggaaactctgtgtgtgtatccgtgagtgcaagatacttagggaaagcgaagaagagcatgctgctacacaccactctggcttacgcttccagctaacagcggtttgtctgtgtttctggactgaagtgactgatgaaaaacagtagtcaagtctggagggtgattccctttcagttcacttgcctttcagttctggggaaattagaagatttgctctctctctctgcttcttagaatgggctgcaatttgtgcacttttcagaaaagagaggaacactacaaactgctgtatgaagtttcccaggtcaatgggaaggatctttcaaaggccactcatgaagaggcagtggaagcttttcgcaatgccaaggagcccattgtggtgcaggtgttaaggcgaacacctcttagtagaccagcctatgggatggcttcagaagtgcagcttatgaatgccagcactcagacggacatcaccttcgaacacatcatggctctggccaagcttcgtccacctacccctccagtgccagacatctgtccattcctgctctcagacagctgccattctctacatccaatggagcatgaattttatgaggacaatgagtatatttccagcttgcctgctgatgcagacagaacagaagactttgaatatgaggaggtcgagttgtgtcgtgttagcagtcaagagaagctgggcctgacagtctgttaccgaacagatgatgaagaagacaccggcatttatgtcagcgaggttgacccaaatagcattgctgccaaagacggccggattcgagaaggggatcggattttgcaaataaatggggaagatgtccagaatcgagaagaagcagtggccttgctgtctaacgatgagtgtaagagaatcgtgctgcttgttgcaaggccagagattcagctggatgaaggctggctggaagatgaaaggaatgaattcttagaggagttaaacttggagatgttggaagaagagcataatgaagcaatgcagcccactgccaatgaggtggagcagccaaaaaagcaagaagaagaagaaggcacaacagacactgcaacatcctcatccaacaaccatgagaaggacagtggagtaggacgtacagatgaaagcttgcgaaatgatgagagctcagagcaggagaatgcagccgaggaccccaatagcacatctttgaagagcaagagagacctggggcagagccaagacactctgggaagtgttgaacttcagtacaatgagagcctcgtatctggtgaatacattgactcagactgcattggcaacccagatgaggactgtgaaagattcaggcagctcttggagctcaaatgcaagattcgaaatcatggagagtatgacctgtattactcaagcagcacaattgaatgcaatcaaggggagcaagagggagtggagcatgagctacagttgcttaatgaagaactgagaaacattgagcttgagtgtcagaatatcatgcaggctcacaggctccagaaagtgacagaccagtatggagacatctggacattgcatgatggaggattccggaattataacaccagcatagatatgcaaaggggaaagctagatgacatcatggagcatccagaaaagtctgacaaggacagttctagtgcttacaacacagctgagagctgcagaagtactccgctcactgtagaccgttcccctgacagttcccttccaagggtgatcaacctcaccaataagaaaaacctgagaagcacaatggcagccacccagtcctcttccggacagagcagtaaagagtcgacctccaccaaagccaaaaccactgagcaaggttgtagcgctgaaagcaaggagaaggttttagaaggcagcaagcttcctgatcaagagaaggcagtcagcgaacacatcccttacctctctccttaccacagctcctcatatagatatgcaaacatcccagcacacgcccggcattatcaaagctacatgcagttaattcaacagaaatctgcagtcgagtatgctcagagtcagctcagcttggtgagcatgtgcaaggagtctcagaagtgttcagagcccaagatggaatggaaggtgaaaattaggagcgacgggacacggtacatcacaaagagacccgtgcgagaccgaatcctgaaggaacgtgccttaaagatcaaggaagagcggagtggcatgaccacagacgatgacaccatgagcgagatgaaaatggggcgctactggagcaaagaggagagaaagcagcacctggttagggccaaagagcagcgccgtcgccgtgagttcatgatgcgaagcaggttagagtgtctcaaggagagccctcagagcggcagtgagggcaagaaggagatcaatatcattgaactgagtcacaaaaagatgatgaaaaagagaaacaagaaaattttggacaactggatgacaatccaagaactgatgacccatggggccaagtctccagatggcacgagagtccataatgccttcttgtcggtgaccactgtatgaccgaatgaatggaatgcatgcgactgattttaggaggatgctaccagtttcggtagagtatgattgcctcgttcaatgtggcgtttttatatatattttgtgactctttatagtttaaattttttgtaagcaaaaaatacctggtaatttttcatttgtttttcatatactggtaccttctttttggctgagatctttcttttacttgtgatatattcatattactcgtttataaaaaatcaaaaacaaaaggaaagaaaacaaaaaaaacttgcacaaaaatactgaggagccaattaatttcctacttcaatgtatctaatgtaagtgaaaatctggatttatttctctagtttacttattttctactttaataataactcaatgccaaaatatttctatgcttgtttcttggcataatacattttaaatcaaacctgtt

SEQ ID NO: 21798 - DNA, 4349 bp, Homo sapiens
  source 1..4349: mol_type = unassigned DNA
gatttggcccggagaacgagatcaccctctcaatgaaaggcagatgtccctttaaggtttgcttctacagcccgtggactttagcctaaacacggacccgcgaagctggctttatttgtccatgtctcggacagagcctgggaagctgccagtgagatttcagagaccaagagcgcgaaggggcgggcgatgtggcaatccgtctgggatgtgaaaagcgtggagcgcatttagaggaattcgacgaaaacacaggaaatcactcctctcccgctcctgggcgccgctgccactggggcagaggactgggaaccgcggcagcgggataagtggcccagccagagagcgcagctcccgcgcccggtcctgccctgcgaaccagcgcggccccctggcgctgaggctgctccggccatggcccctcggccccgcgcccgcccaggggtcgctgtcgcctgctgctggctcctcactgacagggatggaagagaaaacttaggaagttgaagtttggcattaaaataaaggactcgccaccactctgtgcaccttcttgagggagttcattcgtccggagcgcctcacagcttagtgcgcctgcgcacgcgcgaactgcggccccgcctctcctttggggacgggagacgtgcgtcgggtcgcgggacgggggctgcgcatgcgccttcatttcgtcagcccgctgttgcgtgctgccagcgggaactgtgtaggggtagattttcgctgcagtgttccccgagcctgttagacgcagcgcgccgggagactgagagaggaaaggatagaggaagtgctgccctaggctgcatgagtcgaagcaagcgtgtttccttcccgccaggcaagtgcccttagaaaccgggccccgcccccttcctggcctgcattcccatcccctctcccggggcggaggtgaggacctccttggttcctttggttctgtcagtgagccccttccttggccatgaagctcgtgaggaagaacatcgagaaggacaatgcgggccaggtgaccctggtccccgaggagcctgaggacatgtggcacacttacaacctcgtgcaggtgggcgacagcctgcgcgcctccaccatccgcaaggtacagacagagtcctccacgggcagcgtgggcagcaaccgggtccgcactaccctcactctctgcgtggaggccatcgacttcgactctcaagcctgccagctgcgggttaaggggaccaacatccaagagaatgagtatgtcaagatgggggcttaccacaccatcgagctggagcccaaccgccagttcaccctggccaagaagcagtgggatagtgtggtactggagcgcatcgagcaggcctgtgacccagcctggagcgctgatgtggcggctgtggtcatgcaggaaggcctcgcccatatctgcttagtcactcccagcatgaccctcactcgggccaaggtggaggtgaacatccctaggaaaaggaaaggcaattgctctcagcatgaccgggccttggagcggttctatgaacaggtggtccaggctatccagcgccacatacactttgatgttgtaaagtgcatcctggtggccagcccaggatttgtgagggagcagttctgcgactacctgtttcaacaagcagtgaagaccgacaacaaactgctcctggaaaaccggtccaaatttcttcaggtacatgcctcctccggacacaagtactccctgaaagaggccctttgtgaccctactgtggctagccgcctttcagacactaaagctgctggggaagtcaaagccttggatgacttctataaaatgttacagcatgaaccggatcgagctttctatggactcaagcaggtggagaaggccaatgaagccatggcaattgacacattgctcatcagcgatgagctcttcaggcatcaggatgtagccacacggagccggtatgtgaggctggtggacagtgtgaaagagaatgcaggcaccgttaggatattctctagtcttcacgtttctggggaacagctcagccagttgactggggtagctgccattctccgcttccctgttcccgaactttctgaccaagagggtgattccagttctgaagaggattaatgattgaaacttaaaattgagacaatcttgtgtttcctaaactgttacagtacatttctcagcatccttgtgacagaaagctgcaagaatggcactttttgattcatacagggatttcttatgtctttggctacactagatattttgtgattggcaagacatgtatttaaacaataaactaaaaggaaataatctccacgtactaccatcttgattaaattgtgtaattttttataggaattatgagttatctgtagtacttggaaacagaaaatgtgtgtatttaaagacgatgcctatgcagtatattgtttgggatagattgcaaaatttcacactgcatgctttgaaacagttttccttagaaaaagcttttgctatcttatcctgtttacattatttctttattttaattctgcttggtgttcttgcattgcatttaatgatcccttttctccccacctccacacactacattttttttagatttaaatagttttactattttaaatgattgccgtacaattagtagacttgaagacaagttttaaatatttttcttcaaaggcttgttaaaccaatcatgttaaaaggaaattcttggttttggtttgttgttgttagcattagtcatatttgatttagagggtaacttaaatcagttatttttagctttttagaactttgatctgctagggattgtcaaaataatctccttgaggcatctttatttttaaaatgagattaaagtatgtgatttgcttgttatgtggctaattagtggcaaagctggaagtcattcccagtctggactttagttctttgcgccaaaacatgctatattatttatttatttttttgcttgtcaaagttatacttaattctgttttatatttgtatgtggcattaatttgggtttgcacatttttattggactattttagttgtgaagaagcctgttctaaagtttaagtcacatgactagtatgtggcagttgacttaaactccaatactctttactatcattgacttaaactctgatactctttactataattatggaattgtgcaaatacctctgagtttaaaatattatttttattatttttggtgcacattcctaaaagttaaggaaggagcctcagtaatggaattgcttcttgaccttttgcaaacctcaatttagcaaaataattaggaacgatctaatagtgatgatacagtttttaactgctggatcagcgacgcctatttcaagtagtgatactaactaaactttcgccggtctttcctgtgtctgtgggccttcctcctggtgtgacagacttggggatttcttgtaaacttcctaactagtctgaacctttttatttcttattgggaactgacacttccctatactttaaaactcacatatgtatatttttgtacatctatctcctaattcaaaagtaattgagattgtcatttcattataattccgtgagtatctttaaattactatcaaatatgttactaaataatttaataagaatatagaaatgaagccactgagatccttaaagttgaaacctgattgttattatattttcagtaaggatttggagatttttggacatttttactctcataatctatgcagtactgaaatgaggtctaataaatataaccaatacatgttaggccataggttcttaaatttagctacctgttcacctcaacttgagagctcttaaaaccctcagtgtccaggttgcagctcagactagttaaataacgttttatccctagaaatgttttttttaaagctacccagatgattccaataggcgtcaaggctaatagccactgattcaggccttgctattcaaaagtatggtccgtaaaccagcagcatccctgagagcttgttggaaactagaattcagggatcttttgtagacctactgagacaggcgctacctgtaccaacatctctagatgattcctgtgcataataaaatctgataaacaaaggcaataggttattcttcctgtgctggtaaatctctggcaggggtccccagtcaggaaaaagatttgagtattaaggtctttcaaaaaagttaactggccatactcaactgtctataaaacctctataaatttctgtttttatgtctatgaattattaaataaaatttaactcatttttaagaaattaca

SEQ ID NO: 21799 - DNA, 1629 bp, Homo sapiens
  source 1..1629: mol_type = unassigned DNA
ctgagtgtgacgtcagaatcaccatggccagctatccttaccggcagggctgcccaggagctgcaggacaagcaccaggagcccctccgggtagctactaccctggaccccccaatagtggagggcagtatggtagtgggctaccccctggtggtggttatgggggtcctgcccctggagggccttatggaccaccagctggtggagggccctatggacaccccaatcctgggatgttcccctctggaactccaggaggaccatatggcggtgcagctcccgggggcccctatggtcagccacctccaagttcctacggtgcccagcagcctgggctttatggacagggtggcgcccctcccaatgtggatcctgaggcctactcctggttccagtcggtggactcagatcacagtggctatatctccatgaaggagctaaagcaggccctggtcaactgcaattggtcttcattcaatgatgagacctgcctcatgatgataaacatgtttgacaagaccaagtcaggccgcatcgatgtctacggcttctcagccctgtggaaattcatccagcagtggaagaacctcttccagcagtatgaccgggaccgctcgggctccattagctacacagagctgcagcaagctctgtcccaaatgggctacaacctgagcccccagttcacccagcttctggtctcccgctactgcccacgctctgccaatcctgccatgcagcttgaccgcttcatccaggtgtgcacccagctgcaggtgctgacagaggccttccgggagaaggacacagctgtacaaggcaacattcggctcagcttcgaggacttcgtcaccatgacagcttctcggatgctatgacccaaccatctgtggagagtggagtgcaccagggacctttcctggcttcttagagtgagagaagtatgtggacatctcttcttttcctgtccctctagaagaacattctcccttgcttgatgcaacactgttccaaaagagggtggagagtcctgcatcatagccaccaaatagtgaggaccggggctgaggccacacagataggggcctgatggaggagaggatagaagttgaatgtcctgatggccatgagcagttgagtggcacagcctggcaccaggagcaggtccttgtaatggagttagtgtccagtcagctgagctccaccctgatgccagtggtgagtgttcatcggcctgttaccgttagtacctgtgttccctcaccaggccatcctgtcaaacgagcccattttctccaaagtggaatctgaccaagcatgagagagatctgtctatgggaccagtggcttggattctgccacacccataaatccttgtgtgttaacttctagctgcctggggctggccctgctcagacaaatctgctccctgggcatctttggccaggcttctgccctctgcagctgggacccctcacttgcctgccatgctctgctcggcttcagtctccaggagacagtggtcacctctccctgccaatactttttttaatttgcattttttttcatttggggccaaaagtccagtgaaattgtaagcttcaataaaaggatgaaactctggagttc

SEQ ID NO: 21800 - DNA, 992 bp, Homo sapiens
  source 1..992: mol_type = unassigned DNA
agaatcaccatggccagctatccttaccggcagggctgcccaggagctgcaggacaagcaccaggagcccctccgggtagctactaccctggaccccccaatagtggagggcagtatggtagtgggctaccccctggtggtggttatgggggtcctgcccctggagggccttatggaccaccagctggtggagggccctatggacaccccaatcctgggatgttcccctctggaactccaggaggaccatatggcggtgcagctcccgggggcccctatggtcagccacctccaagttcctacggtgcccagcagcctgggctttatggacaggggatacatgctgaaggagcagctcctgtttgggatatgttatctttgtggcagagagaaggagcaggagagctagcaagaatgcacaatgcctcttaaagcttctctgaagtactgtatgtcttgcccacttgcattcttttggccagagcaccccctgatcaagactgacatcagtaggatgggaaaggatgcccctctgcaagccaccaggcagtgggagaggatgtacaatgctcttatagggaaggggagattagcaagtaatctaataatagattattgaactggccttttaaaccattgtaccatattagtacaatgtctgtgggtgtgcagactgtgtctcctggctagagattattagccaggagacgataatgtagcctaccatggggagaaactcagtttaaatatccgtttctctgtgaaaatatctcagaagacacacattccaggctctttgctgaggattttattttgctgttatctcatttaatcatcacaacaattctggggaaatgggttcattttagaaatgtgaaaatcattactcagaaaattgtacattttgcctaaagtcacacaagctagtaaggatcagatccagggtttgaatccaggtctgctttgattccaaagcctgagcccttctatac

SEQ ID NO: 21801 - DNA, 1940 bp, Homo sapiens
  source 1..1940: mol_type = unassigned DNA
tcattcatccccattcaggctttcctcagcatttattaaggactctctgctccagcctctcactctcactctcctccgctcaaactcagctcacttgagagtctcctcccgccagctgtggaaagaactttgcgtctctccagcaatgcatctccttgcgattctgttttgtgctctctggtctgcagtgttggccgagaactcggatgattatgatctcatgtatgtgaatttggacaacgaaatagacaatggactccatcccactgaggaccccacgccgtgcgcctgcggtcaggagcactcggaatgggacaagctcttcatcatgctggagaactcgcagatgagagagcgcatgctgctgcaagccacggacgacgtcctgcggggcgagctgcagaggctgcgggaggagctgggccggctcgcggaaagcctggcgaggccgtgcgcgccgggggctcccgcagaggccaggctgaccagtgctctggacgagctgctgcaggcgacccgcgacgcgggccgcaggctggcgcgtatggagggcgcggaggcgcagcgcccagaggaggcggggcgcgccctggccgcggtgctagaggagctgcggcagacgcgagccgacctgcacgcggtgcagggctgggctgcccggagctggctgccggcaggttgtgaaacagctattttattcccaatgcgttccaagaagatttttggaagcgtgcatccagtgagaccaatgaggcttgagtcttttagtgcctgcatttgggtcaaagccacagatgtattaaacaaaaccatcctgttttcctatggcacaaagaggaatccatatgaaatccagctgtatctcagctaccaatccatagtgtttgtggtgggtggagaggagaacaaactggttgctgaagccatggtttccctgggaaggtggacccacctgtgcggcacctggaattcagaggaagggctcacatccttgtgggtaaatggtgaactggcggctaccactgttgagatggccacaggtcacattgttcctgagggaggaatcctgcagattggccaagaaaagaatggctgctgtgtgggtggtggctttgatgaaacattagccttctctgggagactcacaggcttcaatatctgggatagtgttcttagcaatgaagagataagagagaccggaggagcagagtcttgtcacatccgggggaatattgttgggtggggagtcacagagatccagccacatggaggagctcagtatgtttcataaatgttgtgaaactccacttgaagccaaagaaagaaactcacacttaaaacacatgccagttgggaaggtctgaaaactcagtgcataataggaacacttgagactaatgaaagagagagttgagaccaatctttatttgtactggccaaatactgaataaacagttgaaggaaagacattggaaaaagcttttgaggataatgttactagactttatgccatggtgctttcagtttaatgctgtgtctctgtcagataaactctcaaataattaaaaaggactgtattgttgaacagagggacaattgttttacttttctttggttaattttgttttggccagagatgaattttacattggaagaataacaaaataagatttgttgtccattgttcattgttattggtatgtaccttattacaaaaaaaagatgaaaacatatttatactacaaggtgacttaacaactataaatgtagtttatgtgttataatcgaatgtcacgtttttgagaagatagtcatataagttatattgcaaaagggatttgtattaatttaagactatttttgtaaagctctactgtaaataaaatattttataaaactagctcacgtcatttaattataaatttaagagatgttttgga

SEQ ID NO: 21802 - DNA, 1422 bp, Homo sapiens
  source 1..1422: mol_type = unassigned DNA
atggggagtggaaactgggaggtcacaggtccaccttgtggcagtcggtgtgaacggcctcccggactcccacgcggggtccacggacagttccggagtgctgtgggcctgtcgggcctgcgctggttccggagattccaggaggtgacctggacacacctgcagaacatcgccagcaactacaacgtgtcctacaacgttgacgtccggttccggagcctggcggaagagagccaggctgtggctcaggcagtcaaccggtcacaggcctcggtgcagggggagctggcgcagctcaaggcctgggtgaggaagctgcagcgccgaggccggaaagtagacacgcggctgcgggccttggacctcaccctgggcgagaggagccagcagcgggcccgggaaaggaaggcacacaaggcccagagggacgccctgcaggactcactggcacgcctggagggcctcgtccacagccagggcgccaggctggctgctctggaggggcggctgcccgtggcccaccctggcactgcagccctcgggccggccctggtcccaaccccaacccagcctgaggagctgggcccgacctccctgaagcttcagagggacaggcaggagctccgagctgcctctgagcacaggggccccccacaggactcctcggcccctctccaagggaggcgggagcctccagcctcaggcagccatcgggtactcagtgggactgccccaaaagaccctcggcagcaggcatggtccccccaggtgccaggagagatttgcggcgtgggccccaccctcgttttcccaaacgcctccaccaggaacgtggtcttcctcagccctggtttcgtcactgccctgcgagccctgtccttctgcagctgggtccgcacggcctccggccgcctgggcaccctcctgtcctacgccaccgaggacaatgacaacaagctggtgctgcacggccgagactccctgctgcccggatccatccacttcgtgatcggggacccggccttcagggagctgcccttgcagctgctgctggacggccagtggcaccacatctgtgtcatctggacgtccacccagggcaggtactggctccacgtggatcgcaggctggtggccaccggctcccgcttcagggagggctatgagatcccccccggagggtccctcgtgctgggccaggaacaagacagcgtggggggcggattcgacagctccgaggccttcgtggggagcatgtctggcttggctatctgggatcgggcgctggttcccggggaagttgcaaaccttgccatcgggaaagagttcccgacaggtgccatcctgacgctggccaatgctgcactagcaggcggatttgtgcagggggccaactgcacctgcctggaacgctgtccctga

SEQ ID NO: 21803 - DNA, 1437 bp, Homo sapiens
  source 1..1437: mol_type = unassigned DNA
atgggttgctcgtggaggaagaccttgtctttcttccttgtttttgtgcctatatatctacatggggcttcatcgcaggaagccgccccagtggggcccaggaaaccgtttttcgagaggctccgtaggctggaggaacagttccggagattccaggaggtgacctggacacacctgcagaacatcgccagcaactacaacgtgtcctacaacgttgacgtccggttccggagcctggcggaagagagccaggctgtggctcaggcagtcaaccggtcacaggcctcggtgcagggggagctggcgcagctcaaggcctgggtgaggaagctgcagcgccgaggccggaaagtagacacgcggctgcgggccttggacctcaccctgggcgagaggagccagcagcgggcccgggaaaggaaggcacacaaggcccagagggacgccctgcaggactcactggcacgcctggagggcctcgtccacagccagggcgccaggctggctgctctggaggggcggctgcccgtggcccaccctggcactgcagccctcgggccggccctggtcccaaccccaacccagcctgaggagctgggcccgacctccctgaagcttcagagggacaggcaggagctccgagctgcctctgagcacaggggccccccacaggactcctcggcccctctccaagggaggcgggagcctccagcctcaggcagccatcgggtactcagtgggactgccccaaaagaccctcggcagcaggcatggtccccccaggtgccaggagagatttgcggcgtgggccccaccctcgttttcccaaacgcctccaccaggaacgtggtcttcctcagccctggtttcgtcactgccctgcgagccctgtccttctgcagctgggtccgcacggcctccggccgcctgggcaccctcctgtcctacgccaccgaggacaatgacaacaagctggtgctgcacggccgagactccctgctgcccggatccatccacttcgtgatcggggacccggccttcagggagctgcccttgcagctgctgctggacggccagtggcaccacatctgtgtcatctggacgtccacccagggcaggtactggctccacgtggatcgcaggctggtggccaccggctcccgcttcagggagggctatgagatcccccccggagggtccctcgtgctgggccaggaacaagacagcgtggggggcggattcgacagctccgaggccttcgtggggagcatgtctggcttggctatctgggatcgggcgctggttcccggggaagttgcaaaccttgccatcgggaaagagttcccgacaggtgccatcctgacgctggccaatgctgcactagcaggcggatttgtgcagggggccaactgcacctgcctggaacgctgtccctga

SEQ ID NO: 21804 - DNA, 1748 bp, Homo sapiens
  source 1..1748: mol_type = unassigned DNA
tcagaatgtggcttagggcagccacaatcttatcaggagcttctctgtttgggatcaggggaaccggtgactttcagaggccgataaggcgggacccaacttgtatataaggggcagctcatgctgctgctctgcaccttcctcccgtcttgccttctccctcgagttgggacccgggaagaaccatgaagtggctgctgctgctgggtctggtggcactctctgagtgcatcatgtacaaggtccccctcatcagaaagaagtccttgaggcgcaccctgtccgagcgtggcctgctgaaggacttcctgaagaagcacaacctcaacccagccagaaagtacttcccccagtggaaggctcccaccctggtagatgaacagcccctggagaactacctggatatggagtacttcggcactatcggcatcggaactcctgcccaggatttcaccgtcgtctttgacaccggctcctccaacctgtgggtgccctcagtctactgctccagtcttgcctgcaccaaccacaaccgcttcaaccctgaggattcttccacctaccagtccaccagcgagacagtctccatcacctacggcaccggcagcatgacaggcatcctcggatacgacactgtccaggttggaggcatctctgacaccaatcagatcttcggcctgagcgagacggaacctggctccttcctgtattatgctcccttcgatggcatcctggggctggcctaccccagcatttcctcctccggggccacacccgtctttgacaacatctggaaccagggcctggtttctcaggacctcttctctgtctacctcagcgccgatgaccagagtggcagcgtggtgatctttggtggcattgactcttcttactacactggaagtctgaactgggtgcctgttaccgtcgagggttactggcagatcaccgtggacagcatcaccatgaacggagaggccatcgcctgcgctgagggctgccaggccattgttgacaccggcacctctctgctgaccggcccaaccagccccattgccaacatccagagcgacatcggagccagcgagaactcagatggcgacatggtggtcagctgctcagccatcagcagcctgcccgacatcgtcttcaccatcaatggagtccagtaccccgtgccacccagtgcctacatcctgcagagcgaggggagctgcatcagtggcttccagggcatgaacctccccaccgaatctggagagctttggatcctgggtgatgtcttcatccgccagtactttaccgtcttcgacagggcaaacaaccaggtcggcctggcccccgtggcttaagcctaagtctcttcagccacctcccaggaagatctggcctctgtcctgtgcccactttagatgtatctaattctcctgactgttcttcccaggggagtgtggaggtcttggccctgttccctgtcctaccaataacgtagaataaaaacataacccactgaaacaggttttgtggagctgcttctctttgctggtctttttccttcacattactggggttagaacaccagggcagggatgaaaatgaccacatccatttggatggcacccaacatagtgaccccagcagctgacacttcatgatggagccaagaagacagagaggcttcgggggttgtgctggaagcatcataaaaagacctgggggtcaaaatactgggctaattgtcttctcat

SEQ ID NO: 21805 - DNA, 1269 bp, Homo sapiens
  source 1..1269: mol_type = unassigned DNA
tctgcaccttcctcccgtcttgccttctccctcgagttgggacccgggaagaaccatgaagtggctgctgctgctgggtctggtggcactctctgagtgcatcatgtacaaggtccccctcatcagaaagaagtccttgaggcgcaccctgtccgagcgtggcctgctgaaggacttcctgaagaagcacaacctcaacccagccagaaagtacttcccccagtggaaggctcccaccctggtagatgaacagcccctggagaactacctggatatggagtacttcggcactatcggcatcggaactcctgcccaggatttcaccgtcgtctttgacaccggctcctccaacctgtgggtgccctcagtctactgctccagtcttgcctgcaccaaccacaaccgcttcaaccctgaggattcttccacctaccagtccaccagcgagacagtctccatcacctacggcaccggcagcatgacaggcatcctcggatacgacactgtccagactgtagccatctggagatcagctgccatgggcctggtttctcaggacctcttctctgtctacctcagcgccgatgaccagagtggcagcgtggtgatctttggtggcattgactcttcttactacactggaagtctgaactgggtgcctgttaccgtcgagggttactggcagatcaccgtggacagcatcaccatgaacggagaggccatcgcctgcgctgagggctgccaggccattgttgacaccggcacctctctgctgaccggcccaaccagccccattgccaacatccagagcgacatcggagccagcgagaactcagatggcgacatggtggtcagctgctcagccatcagcagcctgcccgacatcgtcttcaccatcaatggagtccagtaccccgtgccacccagtgcctacatcctgcagagcgaggggagctgcatcagtggcttccagggcatgaacctccccaccgaatctggagagctttggatcctgggtgatgtcttcatccgccagtactttaccgtcttcgacagggcaaacaaccaggtcggcctggcccccgtggcttaagcctaagtctcttcagccacctcccaggaagatctggcctctgtcctgtgcccactttagatgtatctaattctcctgactgttcttcccaggggagtgtggaggtcttggccctgttccctgtcctaccaataacgtagaataaaaacataacccactgaaacaggttttgtgga

SEQ ID NO: 21806 - DNA, 1228 bp, Homo sapiens
  source 1..1228: mol_type = unassigned DNA
tctgcaccttcctcccgtcttgccttctccctcgagttgggacccgggaagaaccatgaagtggctgctgctgctgggtctggtggcactctctgagtgcatcatgtacaaggtccccctcatcagaaagaagtccttgaggcgcaccctgtccgagcgtggcctgctgaaggacttcctgaagaagcacaacctcaacccagccagaaagtacttcccccagtggaaggctcccaccctggtagatgaacagcccctggagaactacctggatatggagtacttcggcactatcggcatcggaactcctgcccaggatttcaccgtcgtctttgacaccggctcctccaacctgtgggtgccctcagtctactgctccagtcttgcctgcaccaaccacaaccgcttcaaccctgaggattcttccacctaccagtccaccagcgagacagtctccatcacctacggcaccggcagcatgacaggcatcctcggatacgacactgtccaggttggaggcatctctgacaccaatcagatcttcggcctgagcgagacggaacctggctccttcctgtattatgctcccttcgatggcatcctggggctggcctaccccagcatttcctcctccggggccacacccgtctttgacaacatctggaaccagggcctggtttctcaggacctcttctctgtctacctcagcgccgatgaccagagtggcagcgtggtgatctttggtggcattgactcttcttactacactggaagtctgaactgggtgcctgttaccgtcgagggttactggcagatcaccgtggacagcatcaccatgaacggagaggccatcgcctgcgctgagggctgccaggccattgttgacaccggcacctctctgctgaccggcccaaccagccccattgccaacatccagagcgacatcggagccagcgagaactcagatggcgacatggtggtcagctgctcagccatcagcagcctgcccgacatcgtcttcaccatcaatggagtccagtaccccgtgccacccagtgcctacatcctgcagctccccagcgaggggagctgcatcagtggcttccagggcatgaacctccccaccgaatctggagagctttggatcctgggtgatgtcttcatccgccagtactttaccgtcttcgacagggcaaacaaccaggtcggcctggcccccgtggcttaa

SEQ ID NO: 21807 - DNA, 1748 bp, Homo sapiens
  source 1..1748: mol_type = unassigned DNA
tcagaatgtggctcagggcagccacaatcttatcaggagcttctctgtttgggatcaggggaaccggtgactttcagaggccgataaggcgggacccaacttgtatataaggggcagctcatgctgctgctctgcaccttcctcccatcttgccttctccctcgagttgggacccgggaagaaccatgaagtggctgctgctgctgggtctggtggcgctctctgagtgcatcatgtacaaggtccccctcatcagaaagaagtccttgaggcgcaccctgtccgagcgtggcctgctgaaggacttcctgaagaagcacaacctcaacccagccagaaagtacttcccccagtgggaggctcccaccctggtagatgaacagcccctggagaactacctggatatggagtacttcggcactatcggcatcggaactcctgcccaggatttcaccgtcgtctttgacaccggctcctccaacctgtgggtgccctcagtctactgctccagtcttgcctgcaccaaccacaaccgcttcaaccctgaggattcttccacctaccagtccaccagcgagacagtctccatcacctacggcaccggcagcatgacaggcatcctcggatacgacactgtccaggttggaggcatctctgacaccaatcagatcttcggcctgagcgagacggaacctggctccttcctgtattatgctcccttcgatggcatcctggggctggcctaccccagcatttcctcctccggggccacacccgtctttgacaacatctggaaccagggcctggtttctcaggacctcttctctgtctacctcagcgccgatgaccagagtggcagcgtggtgatctttggtggcattgactcttcttactacactggaagtctgaactgggtgcctgttaccgtcgagggttactggcagatcaccgtggacagcatcaccatgaacggagaggccatcgcctgcgctgagggctgccaggccattgttgacaccggcacctctctgctgaccggcccaaccagccccattgccaacatccagagcgacatcggagccagcgagaactcagatggcgacatggtggtcagctgctcagccatcagcagcctgcccgacatcgtcttcaccatcaatggagtccagtaccccgtgccacccagtgcctacatcctgcagagcgaggggagctgcatcagtggcttccagggcatgaacctccccaccgaatctggagagctttggatcctgggtgatgtcttcatccgccagtactttaccgtcttcgacagggcaaacaaccaggtcggcctggcccccgtggcttaagcctaagtctcttcagccacctcccaggaagatctggcctctgtcctgtgcccactttagatgtatctaattctcctgactgttcttcccaggggagtgtggaggtcttggccctgttccctgtcctaccaataacgtagaataaaaacataacccactgaaacaggttttgtggagctgcttctctttgctggtctttttccttcacattactggggttagaacgccagggcagggatgaaaatgaccacatccatttggatggcacccaacatagtgaccccagcagctgacacttcatgatggagccaagaagacagagaggcttcgggggttgtgctggaagcatcataaaaagacctgggggtcaaaatactgggctaattgtcttctcat

SEQ ID NO: 21808 - DNA, 1398 bp, Homo sapiens
  source 1..1398: mol_type = unassigned DNA
tctgcaccttcctcccatcttgccttctccctcgagttgggacccgggaagaaccatgaagtggctgctgctgctgggtctggtggcgctctctgagtgcatcatgtacaaggtccccctcatcagaaagaagtccttgaggcgcaccctgtccgagcgtggcctgctgaaggacttcctgaagaagcacaacctcaacccagccagaaagtacttcccccagtgggaggctcccaccctggtagatgaacagcccctggagaactacctggatatggagtacttcggcactatcggcatcggaactcctgcccaggatttcaccgtcgtctttgacaccggctcctccaacctgtgggtgccctcagtctactgctccagtcttgcctgcaccaaccacaaccgcttcaaccctgaggattcttccacctaccagtccaccagcgagacagtctccatcacctacggcaccggcagcatgacaggcatcctcggatacgacactgtccaggttggaggcatctctgacaccaatcagatcttcggcctgagcgagacggaacctggctccttcctgtattatgctcccttcgatggcatcctggggctggcctaccccagcatttcctcctccggggccacacccgtctttgacaacatctggaaccagggcctggtttctcaggacctcttctctgtctacctcagcgccgatgacaagagtggcagcgtggtgatctttggtggcattgactcttcttactacactggaagtctgaactgggtgcctgttaccgtcgagggttactggcagatcaccgtggacagcatcaccatgaacggagagaccatcgcctgtgctgagggctgccaggccattgttgacaccggcacctctctgctgaccggcccaaccagccccattgccaacatccagagcgacatcggagccagcgagaactcagatggcgacatggtggtcagctgctcagccatcagcagcctgcccgacatcgtcttcaccatcaatggagtccagtaccccgtgccacccagtgcctacatcctgcagagcgaggggagctgcatcagtggcttccagggcatgaacgtccccaccgaatctggagagctttggatcctgggtgatgtcttcatccgccagtactttaccgtcttcgacagggcaaacaaccaggtcggcctggcccctgtggcttaagcctaagtctcttcagccacctcccaggaagatctggcctccgtcctatgcccactttagatgtatctaattctcctgactgttcttcccaggggagtgtgaaggtcttggccctgttccctgtcctaccaataacgtagaataaaaacataacccactgaaacaggttttgtgga

SEQ ID NO: 21809 - DNA, 1269 bp, Homo sapiens
  source 1..1269: mol_type = unassigned DNA
tctgcaccttcctcccatcttgccttctccctcgagttgggacccgggaagaaccatgaagtggctgctgctgctgggtctggtggcgctctctgagtgcatcatgtacaaggtccccctcatcagaaagaagtccttgaggcgcaccctgtccgagcgtggcctgctgaaggacttcctgaagaagcacaacctcaacccagccagaaagtacttcccccagtgggaggctcccaccctggtagatgaacagcccctggagaactacctggatatggagtacttcggcactatcggcatcggaactcctgcccaggatttcaccgtcgtctttgacaccggctcctccaacctgtgggtgccctcagtctactgctccagtcttgcctgcaccaaccacaaccgcttcaaccctgaggattcttccacctaccagtccaccagcgagacagtctccatcacctacggcaccggcagcatgacaggcatcctcggatacgacactgtccagactgtagccatctggagatcagctgccatgggcctggtttctcaggacctcttctctgtctacctcagcgccgatgaccagagtggcagcgtggtgatctttggtggcattgactcttcttactacactggaagtctgaactgggtgcctgttaccgtcgagggttactggcagatcaccgtggacagcatcaccatgaacggagaggccatcgcctgcgctgagggctgccaggccattgttgacaccggcacctctctgctgaccggcccaaccagccccattgccaacatccagagcgacatcggagccagcgagaactcagatggcgacatggtggtcagctgctcagccatcagcagcctgcccgacatcgtcttcaccatcaatggagtccagtaccccgtgccacccagtgcctacatcctgcagagcgaggggagctgcatcagtggcttccagggcatgaacctccccaccgaatctggagagctttggatcctgggtgatgtcttcatccgccagtactttaccgtcttcgacagggcaaacaaccaggtcggcctggcccccgtggcttaagcctaagtctcttcagccacctcccaggaagatctggcctctgtcctgtgcccactttagatgtatctaattctcctgactgttcttcccaggggagtgtggaggtcttggccctgttccctgtcctaccaataacgtagaataaaaacataacccactgaaacaggttttgtgga

SEQ ID NO: 21810 - DNA, 1228 bp, Homo sapiens
  source 1..1228: mol_type = unassigned DNA
tctgcaccttcctcccatcttgccttctccctcgagttgggacccgggaagaaccatgaagtggctgctgctgctgggtctggtggcgctctctgagtgcatcatgtacaaggtccccctcatcagaaagaagtccttgaggcgcaccctgtccgagcgtggcctgctgaaggacttcctgaagaagcacaacctcaacccagccagaaagtacttcccccagtgggaggctcccaccctggtagatgaacagcccctggagaactacctggatatggagtacttcggcactatcggcatcggaactcctgcccaggatttcaccgtcgtctttgacaccggctcctccaacctgtgggtgccctcagtctactgctccagtcttgcctgcaccaaccacaaccgcttcaaccctgaggattcttccacctaccagtccaccagcgagacagtctccatcacctacggcaccggcagcatgacaggcatcctcggatacgacactgtccaggttggaggcatctctgacaccaatcagatcttcggcctgagcgagacggaacctggctccttcctgtattatgctcccttcgatggcatcctggggctggcctaccccagcatttcctcctccggggccacacccgtctttgacaacatctggaaccagggcctggtttctcaggacctcttctctgtctacctcagcgccgatgaccagagtggcagcgtggtgatctttggtggcattgactcttcttactacactggaagtctgaactgggtgcctgttaccgtcgagggttactggcagatcaccgtggacagcatcaccatgaacggagaggccatcgcctgcgctgagggctgccaggccattgttgacaccggcacctctctgctgaccggcccaaccagccccattgccaacatccagagcgacatcggagccagcgagaactcagatggcgacatggtggtcagctgctcagccatcagcagcctgcccgacatcgtcttcaccatcaatggagtccagtaccccgtgccacccagtgcctacatcctgcagctccccagcgaggggagctgcatcagtggcttccagggcatgaacctccccaccgaatctggagagctttggatcctgggtgatgtcttcatccgccagtactttaccgtcttcgacagggcaaacaaccaggtcggcctggcccccgtggcttaa

SEQ ID NO: 21811 - DNA, 1519 bp, Homo sapiens
  source 1..1519: mol_type = unassigned DNA
tcagaatgtggctcagggcagccacaatcttatcaggagcttctctgtttgggatcaggggaaccggtgactttcagaggccgataaggcgggacccaacttgtatataaggggcagctcatgctgctgctctgcaccttcctcccatcttgccttctccctcgagttgggacccgggaagaaccatgaagtggctgctgctgctgggtctggtggcgctctctgagtgcatcatgtacaaggtccccctcatcagaaagaagtccttgaggcgcaccctgtccgagcgtggcctgctgaaggacttcctgaagaagcacaacctcaacccagccagaaagtacttcccccagtgggaggctcccaccctggtagatgaacagcccctggagaactacctggatatggagtacttcggcactatcggcatcggaactcctgcccaggatttcaccgtcgtctttgacaccggctcctccaacctgtgggtgccctcagtctactgctccagtcttgcctgcaccaaccacaaccgcttcaaccctgaggattcttccacctaccagtccaccagcgagacagtctccatcacctacggcaccggcagcatgacaggcatcctcggatacgacactgtccaggttggaggcatctctgacaccaatcagatcttcggcctgagcgagacggaacctggctccttcctgtattatgctcccttcgatggcatcctggggctggcctaccccagcatttcctcctccggggccacacccgtctttgacaacatctggaaccagggcctggtttctcaggacctcttctctgtctacctcagcgccgatgacaagagtggcagcgtggtgatctttggtggcattgactcttcttactacactggaagtctgaactgggtgcctgttaccgtcgagggttactggcagatcaccgtggacagcatcaccatgaacggagagaccatcgcctgtgctgagggctgccaggccattgttgacaccggcacctctctgctgaccggcccaaccagccccattgccaacatccagagcgacatcggagccagcgagaactcagatggcgacatggtggtcagctgctcagccatcagcagcctgcccgacatcgtcttcaccatcaatggagtccagtaccccgtgccacccagtgcctacatcctgcagagcgaggggagctgcatcagtggcttccagggcatgaacgtccccaccgaatctggagagctttggatcctgggtgatgtcttcatccgccagtactttaccgtcttcgacagggcaaacaaccaggtcggcctggcccctgtggcttaagcctaagtctcttcagccacctcccaggaagatctggcctccgtcctatgcccactttagatgtatctaattctcctgactgttcttcccaggggagtgtgaaggtcttggccctgttccctgtcctaccaataacgtagaataaaaacataacccactgaaacagg

SEQ ID NO: 21812 - DNA, 1269 bp, Homo sapiens
  source 1..1269: mol_type = unassigned DNA
tctgcaccttcctcccatcttgccttctccctcgagttgggacccgggaagaaccatgaagtggctgctgctgctgggtctggtggcgctctctgagtgcatcatgtacaaggtccccctcatcagaaagaagtccttgaggcgcaccctgtccgagcgtggcctgctgaaggacttcctgaagaagcacaacctcaacccagccagaaagtacttcccccagtgggaggctcccaccctggtagatgaacagcccctggagaactacctggatatggagtacttcggcactatcggcatcggaactcctgcccaggatttcaccgtcgtctttgacaccggctcctccaacctgtgggtgccctcagtctactgctccagtcttgcctgcaccaaccacaaccgcttcaaccctgaggattcttccacctaccagtccaccagcgagacagtctccatcacctacggcaccggcagcatgacaggcatcctcggatacgacactgtccagactgtagccatctggagatcagctgccatgggcctggtttctcaggacctcttctctgtctacctcagcgccgatgacaagagtggcagcgtggtgatctttggtggcattgactcttcttactacactggaagtctgaactgggtgcctgttaccgtcgagggttactggcagatcaccgtggacagcatcaccatgaacggagagaccatcgcctgtgctgagggctgccaggccattgttgacaccggcacctctctgctgaccggcccaaccagccccattgccaacatccagagcgacatcggagccagcgagaactcagatggcgacatggtggtcagctgctcagccatcagcagcctgcccgacatcgtcttcaccatcaatggagtccagtaccccgtgccacccagtgcctacatcctgcagagcgaggggagctgcatcagtggcttccagggcatgaacgtccccaccgaatctggagagctttggatcctgggtgatgtcttcatccgccagtactttaccgtcttcgacagggcaaacaaccaggtcggcctggcccctgtggcttaagcctaagtctcttcagccacctcccaggaagatctggcctccgtcctatgcccactttagatgtatctaattctcctgactgttcttcccaggggagtgtgaaggtcttggccctgttccctgtcctaccaataacgtagaataaaaacataacccactgaaacaggttttgtgga

SEQ ID NO: 21813 - DNA, 1228 bp, Homo sapiens
  source 1..1228: mol_type = unassigned DNA
tctgcaccttcctcccatcttgccttctccctcgagttgggacccgggaagaaccatgaagtggctgctgctgctgggtctggtggcgctctctgagtgcatcatgtacaaggtccccctcatcagaaagaagtccttgaggcgcaccctgtccgagcgtggcctgctgaaggacttcctgaagaagcacaacctcaacccagccagaaagtacttcccccagtgggaggctcccaccctggtagatgaacagcccctggagaactacctggatatggagtacttcggcactatcggcatcggaactcctgcccaggatttcaccgtcgtctttgacaccggctcctccaacctgtgggtgccctcagtctactgctccagtcttgcctgcaccaaccacaaccgcttcaaccctgaggattcttccacctaccagtccaccagcgagacagtctccatcacctacggcaccggcagcatgacaggcatcctcggatacgacactgtccaggttggaggcatctctgacaccaatcagatcttcggcctgagcgagacggaacctggctccttcctgtattatgctcccttcgatggcatcctggggctggcctaccccagcatttcctcctccggggccacacccgtctttgacaacatctggaaccagggcctggtttctcaggacctcttctctgtctacctcagcgccgatgacaagagtggcagcgtggtgatctttggtggcattgactcttcttactacactggaagtctgaactgggtgcctgttaccgtcgagggttactggcagatcaccgtggacagcatcaccatgaacggagagaccatcgcctgtgctgagggctgccaggccattgttgacaccggcacctctctgctgaccggcccaaccagccccattgccaacatccagagcgacatcggagccagcgagaactcagatggcgacatggtggtcagctgctcagccatcagcagcctgcccgacatcgtcttcaccatcaatggagtccagtaccccgtgccacccagtgcctacatcctgcagctccccagcgaggggagctgcatcagtggcttccagggcatgaacgtccccaccgaatctggagagctttggatcctgggtgatgtcttcatccgccagtactttaccgtcttcgacagggcaaacaaccaggtcggcctggcccctgtggcttaa

SEQ ID NO: 21814 - DNA, 2084 bp, Homo sapiens
  source 1..2084: mol_type = unassigned DNA
agacgcaagatggcggctgtggtgctggcggcgacgcggttgctgcggggctcgggttcttggggctgttcgcggctgaggtttggacctcctgcgtacagacggtttagtagtggtggtgcctatcccaacatccccctctcttctcccttacctggagtacccaagcctgtttttgctacagttgatggacaggaaaagtttgaaaccaaagtaaccacattggataatgggcttcgcgtggcatctcagaataagtttggacagttttgtacagtaggaattcttatcaattcaggatcgagatatgaagcgaaataccttagtggaattgctcactttttggaaaaattggcattttcgtctactgctcgatttgacagcaaagatgaaattctgcttacgttggaaaagcatgggggtatctgtgactgccagacatcaagagacaccaccatgtatgctgtgtctgctgatagcaaaggcttggacacggtggttgccttactggctgatgtggttctgcagccccggctaacagatgaagaagtcgagatgacgcggatggcggtccagtttgagctggaggacctgaacctgcggcctgacccagagccacttctcaccgagatgattcatgaagcggcttacagggagaacacagttggcctccaccgtttctgccccacagaaaacgtagcaaagatcaaccgagaggtgctgcattcctacctgaggaactactacactcccgaccgcatggtgctggccggcgtgggcgtggagcacgagcatctggtggactgtgcccggaagtacctcctgggggtccagccggcctgggggagcgcagaggccgtggatattgacagatctgtggcccagtacactggggggattgccaagctagaaagagacatgtccaatgtcagcctgggcccgacccccatccccgagctcacgcacatcatggttggactggagagctgctccttcctggaggaggacttcatcccctttgcagtgttgaacatgatgatgggcggaggtggctccttctcggctggtgggcccggcaagggcatgttctccaggctctacctcaacgtgctcaacaggcaccactggatgtataacgcgacctcctaccaccacagctacgaggacactggcctcctttgcatccatgccagcgccgacccaagacaggttcgagaaatggtagaaatcatcacaaaggagtttattttaatgggcggaaccgtggacacggtggagctggaacgagccaagacgcagctgacatcaatgctcatgatgaacctggaatccaggcctgtgatcttcgaggatgtggggaggcaggtgctggccactcgctccagaaagctgccgcacgagctgtgcacgctcatccgcaacgtgaagccggaagatgtgaagagagtcgcttctaagatgctccgagggaagccggcagtggccgccctgggtgacctgactgacctgcccacgtatgagcacatccagaccgccctgtcgagtaaggacgggcgcctgcccaggacgtaccggctcttccggtagaaccgctccccggcctgacagacccagggagctgcagctggagcccgttcccgtgcgtgttagtttggacacgaatttagtctaaaaagctgtctggttgtataaacggtgcaaacaatgtcgccacagcacccacgcggtttgcattcttttggaactcaatgtgccgatcagtggagtcagtatcgagcctgaccaccgcaagccaggaagcaggtgaagtgcccagcgctggagtgcagcgtgccacgaggagggcggtcggtgcttccctcctcgggctgtgggcacatggggccccgcaggttccttggaggagccctgagctgggaggcagcaaaggctgacctatcaaagcctcccggaggccaccgtgctgggtaccaggactcacctctgacaagcaggagaaggtaagggcccggtcagctccaaggagcgcgctccacgcgcgtgcacacagcttccctggtaataaagagctggcatctttctta

SEQ ID NO: 21815 - DNA, 713 bp, Homo sapiens
  source 1..713: mol_type = unassigned DNA
ggagacgcaagatggcggctgtggtgctggcggcgacgcggttgctgcggggctcgggttcttggggctgttcgcggctgaggtttggacctcctgcgtacagacggtttagtagtggtggtgcctatcccaacatccccctctcttctcccttacctggagtacccaagcctgtttttgctacagttgatggacaggaaaagtttgaaaccaaagtaaccacattggataatgggcttcgcgtggcatctcagaataagtttggacagttttgtacagtaggaattcttatcaattcaggatcgagatatgaagcgaaataccttagtggaattgctcactttttggaaaaattggcattttcgtctactgctcgatttgacagcaaagatgaaattctgcttacgttggaaaagcatgggggtatctgtgactgccagacatcaagatgaagaagtcgagatgacgcggatggcggtccagtttgagctggaggacctgaacctgcggcctgacccagagccacttctcaccgagatgattcatgaagtaaaatgtcaaactcgagaatgcccccgcatctcgaacagtggtcctcgggacaccaggggtggtggggagggtgcctccgtgatgttgtccttgcaggttatggatatatacagaacatttttttgttttttgagatgaggtttctccacattgcctacgct

SEQ ID NO: 21816 - DNA, 1987 bp, Homo sapiens
  source 1..1987: mol_type = unassigned DNA
gacgcaagatggcggctgtggtgctggcggcgacgcggttgctgcggggctcgggttcttggggctgttcgcggctgaggtttggacctcctgcgtacagacggtttagtagtggtggtgcctatcccaacatccccctctcttctcccttacctggagtacccaagcctgtttttgctacagttgatggacaggaaaagtttgaaaccaaagtaaccacattggataatgggcttcgcgtggcatctcagaataagtttggacagttttgtacagtaggaattcttatcaattcaggatcgagatatgaagcgaaataccttagtggaattgctcactttttggaaaaattggcattttcgtctactgctcgatttgacagcaaagatgaaattctgcttacgttggaaaagcatgggggtatctgtgactgccagacatcaagatgaagaagtcgagatgacgcggatggcggtccagtttgagctggaggacctgaacctgcggcctgacccagagccacttctcaccgagatgattcatgaagcggcttacagggagaacacagttggcctccaccgtttctgccccacagaaaacgtagcaaagatcaaccgagaggtgctgcattcctacctgaggaactactacactcccgaccgcatggtgctggccggcgtgggcgtggagcacgagcatctggtggactgtgcccggaagtacctcctgggggtccagccggcctgggggagcgcagaggccgtggatattgacagatctgtggcccagtacactggggggattgccaagctagaaagagacatgtccaatgtcagcctgggcccgacccccatccccgagctcacgcacatcatggttggactggagagctgctccttcctggaggaggacttcatcccctttgcagtgttgaacatgatgatgggcggaggtggctccttctcggctggtgggcccggcaagggcatgttctccaggctctacctcaacgtgctcaacaggcaccactggatgtataacgcgacctcctaccaccacagctacgaggacactggcctcctttgcatccatgccagcgccgacccaagacaggttcgagaaatggtagaaatcatcacaaaggagtttattttaatgggcggaaccgtggacacggtggagctggaacgagccaagacgcagctgacatcaatgctcatgatgaacctggaatccaggcctgtgatcttcgaggatgtggggaggcaggtgctggccactcgctccagaaagctgccgcacgagctgtgcacgctcatccgcaacgtgaagccggaagatgtgaagagagtcgcttctaagatgctccgagggaagccggcagtggccgccctgggtgacctgactgacctgcccacgtatgagcacatccagaccgccctgtcgagtaaggacgggcgcctgcccaggacgtaccggctcttccggtagaaccgctccccggcctgacagacccagggagctgcagctggagcccgttcccgtgcgtgttagtttggacacgaatttagtctaaaaagctgtctggttgtataaacggtgcaaacaatgtcgccacagcacccacgcggtttgcattcttttggaactcaatgtgccgatcagtggagtcagtatcgagcctgaccaccgcaagccaggaagcaggtgaagtgcccagcgctggagtgcagcgtgccacgaggagggcggtcggtgcttccctcctcgggctgtgggcacatggggccccgcaggttccttggaggagccctgagctgggaggcagcaaaggctgacctatcaaagcctcccggaggccaccgtgctgggtaccaggactcacctctgacaagcaggagaaggtaagggcccggtcagctccaaggagcgcgctccacgcgcgtgcacacagcttccctggtaataaagagctggcatctttctt

SEQ ID NO: 21817 - DNA, 1029 bp, Homo sapiens
  source 1..1029: mol_type = unassigned DNA
tacactggggggattgccaagctagaaagagacatgtccaatgtcagcctgggcccgacccccatccccgagctcacgcacatcatggttggactggagagctgctccttcctggaggaggacttcatcccctttgcagtgttgaacatgatgatgggcggaggtggctccttctcggctggtgggcccggcaagggcatgttctccaggctctacctcaacgtgctcaacaggcaccactggatgtataacgcgacctcctaccaccacagctacgaggacactggcctcctttgcatccatgccagcgccgacccaagacaggttcgagaaatggtagaaatcatcacaaaggagtttattttaatgggcggaaccgtggacacggtggagctggaacgagccaagacgcagctgacatcaatgctcatgatgaacctggaatccaggcctgtgatcttcgaggatgtggggaggcaggtgctggccactcgctccagaaagctgccgcacgagctgtgcacgctcatccgtgagtaccgcaggggtagtgaggggctgccgcaggcctcggccaggctcagaggaggccgtctcgccctcccgcaggccgtggtgggcctgtggtatgtccatcacacccagaatctggggccttcaccagttgtcctcagcaggggcggccaagggcagggtcgtggggtcgcagacctggtctcacttcccggccccaccatgcacctgctgcctccttggcaggtgaccccaccctctgcacccctgggaggggctgtcactactgcccagagttgttaaagagcactcaagttagtaggcgagaagggctcagtagaggactgctacattgtacgtggagtagcagtggctcggaatgccgctgtaccgttgctggctctcgggcaggagtctcagccccaggtttccggggcccccatgagtgaccttaggaggtctgaatttcctgaaactgccaagttgtatgtgcatcggactcttctgggggacagg

SEQ ID NO: 21818 - DNA, 2010 bp, Homo sapiens
  source 1..2010: mol_type = unassigned DNA
atttggctctggaggaggtgggtcaaggactccatgccccgccccctgccccgcccttaccccgccccatgcattggcacccggaggggctcagctgacgccgcacttcacgtgacgccggtgccgggcgaacatggcggcggccaccggaccctcgttttggctggggaatgaaaccctgaaggtgccgctggcgctctttgccttgaaccggcagcgcctgtgtgagcggctgcggaagaaccctgctgtgcaggccggctccatcgtggtcctgcagggcggggaggagactcagcgctactgcaccgacaccggggtcctcttccgccaggagtccttctttcactgggcgttcggtgtcactgagccaggctgctatggtgtcatcgatgttgacactgggaagtcgaccctgtttgtgcccaggcttcctgccagccatgccacctggatgggaaagatccattccaaggagcacttcaaggagaagtatgccgtggacgacgtccagtacgtagatgagattgccagcgtcctgacgtcacagaagccctctgtcctcctcactttgcgtggcgtcaacacggacagcggcagtgtctgcagggaggcctcctttgacggcatcagcaagttcgaagtcaacaataccattcttcacccagagatcgttgagtgccgagtgtttaagacggatatggagctggaggttctgcgctataccaataaaatctccagcgaggcccaccgtgaggtaatgaaggctgtaaaagtgggaatgaaagaatatgagttggaaagcctcttcgagcactactgctactcccggggcggcatgcgccacagctcctacacctgcatctgcggcagtggtgagaactcagccgtgctacactacggacacgccggagctcccaacgaccgaacgatccagaatggggatatgtgcctgttcgacatgggcggtgagtattactgcttcgcttccgacatcacctgctcctttcccgccaacggcaagttcactgcagaccagaaggccgtctatgaggcagtgctgcggagctcccgtgccgtcatgggtgccatgaagccaggtgtctggtggcctgacatgcaccgcctggctgaccgcatccacctggaggagctggcccacatgggcatcctgagcggcagcgtggacgccatggtccaggctcacctgggggccgtgtttatgcctcacgggcttggccacttcctgggcattgacgtgcacgacgtgggaggctacccagagggcgtggagcgcatcgacgagcccggcctgcggagcctgcgcactgcacggcacctgcagccaggcatggtgctcaccgtggagccgggcatctacttcatcgaccacctcctggatgaggccctggcggacccggcccgcgcctccttccttaaccgcgaggtcctgcagcgctttcgcggttttggcggggtccgcatcgaggaggacgtcgtggtgactgacagcggcatagagctgctgacctgcgtgccccgcactgtggaagagattgaagcatgcatggcaggctgtgacaaggcctttacccccttctctggccccaagtagagccagccagaaatcccagcgcacctgggggcctggccttgcaacctcttttcgtgatgggcagcctgctggtcagcactccagtagcgagagacggcacccagaatcagatcccagcttcggcatttgatcagaccaaacagtgctgtttcccggggaggaaacacttttttaattacccttttgcaggctcccacctttaatctgttttataccttgcttattaaatgagcgacttaaaatgattgaaaataatgctgttctttagtagcaactaaaatgtgtcttgctgtcatttatattccttttcccaggaaagaagcatttctgatactttctgtcaaaaatcaatatgcagaatggcatttgcaataaaaggtttcctaaaatggtcc

SEQ ID NO: 21819 - DNA, 1887 bp, Homo sapiens
  source 1..1887: mol_type = unassigned DNA
atttggctctggaggaggtgggtcaaggactccatgccccgccccctgccccgcccttaccccgccccatgcattggcacccggaggggctcagctgacgccgcacttcacgtgacgccggtgccgggcgaacatggcggcggccaccggaccctcgttttggctggggaatgaaaccctgaaggtgccgctggcgctctttgccttgaaccggcagcgcctgtgtgagcggctgcggaagaaccctgctgtgcaggccggctccatcgtggtcctgcagggcggggaggagactcagcgctactgcaccgacaccggggtcctcttccgccaggagtccttctttcactgggcgttcggtgtcactgagccaggctgctatggtgtcatcgatgttgacactgggaagtcgaccctgtttgtgcccaggcttcctgccagccatgccacctggatgggaaagatccattccaaggagcacttcaaggagaagtatgccgtggacgacgtccagtacgtagatgagattgccagcgtcctgacgtcacagaagccctctgtcctcctcactttgcgtggcgtcaacacggacagcggcagtgtctgcagggaggcctcctttgacggcatcagcaagttcgaagtcaacaataccattcttcacccagagatcgttgagtgcctcttcgagcactactgctactcccggggcggcatgcgccacagctcctacacctgcatctgcggcagtggtgagaactcagccgtgctacactacggacacgccggagctcccaacgaccgaacgatccagaatggggatatgtgcctgttcgacatgggcggtgagtattactgcttcgcttccgacatcacctgctcctttcccgccaacggcaagttcactgcagaccagaaggccgtctatgaggcagtgctgcggagctcccgtgccgtcatgggtgccatgaagccaggtgtctggtggcctgacatgcaccgcctggctgaccgcatccacctggaggagctggcccacatgggcatcctgagcggcagcgtggacgccatggtccaggctcacctgggggccgtgtttatgcctcacgggcttggccacttcctgggcattgacgtgcacgacgtgggaggctacccagagggcgtggagcgcatcgacgagcccggcctgcggagcctgcgcactgcacggcacctgcagccaggcatggtgctcaccgtggagccgggcatctacttcatcgaccacctcctggatgaggccctggcggacccggcccgcgcctccttccttaaccgcgaggtcctgcagcgctttcgcggttttggcggggtccgcatcgaggaggacgtcgtggtgactgacagcggcatagagctgctgacctgcgtgccccgcactgtggaagagattgaagcatgcatggcaggctgtgacaaggcctttacccccttctctggccccaagtagagccagccagaaatcccagcgcacctgggggcctggccttgcaacctcttttcgtgatgggcagcctgctggtcagcactccagtagcgagagacggcacccagaatcagatcccagcttcggcatttgatcagaccaaacagtgctgtttcccggggaggaaacacttttttaattacccttttgcaggctcccacctttaatctgttttataccttgcttattaaatgagcgacttaaaatgattgaaaataatgctgttctttagtagcaactaaaatgtgtcttgctgtcatttatattccttttcccaggaaagaagcatttctgatactttctgtcaaaaatcaatatgcagaatggcatttgcaataaaaggtttcctaaaatggtcc

SEQ ID NO: 21820 - DNA, 1818 bp, Homo sapiens
  source 1..1818: mol_type = unassigned DNA
atttggctctggaggaggtgggtcaaggactccatgccccgccccctgccccgcccttaccccgccccatgcattggcacccggaggggctcagctgacgccgcacttcacgtgacgccggtgccgggcgaacatggcggcggccaccggaccctcgttttggctggggaatgaaaccctgaaggtgccgctggcgctctttgccttgaaccggcagcgcctgtgtgagcggctgcggaagaaccctgctgtgcaggccggctccatcgtggtcctgcagggcggggaggagactcagcgctactgcaccgacaccggggtcctcttccgccagattgccagcgtcctgacgtcacagaagccctctgtcctcctcactttgcgtggcgtcaacacggacagcggcagtgtctgcagggaggcctcctttgacggcatcagcaagttcgaagtcaacaataccattcttcacccagagatcgttgagtgccgagtgtttaagacggatatggagctggaggttctgcgctataccaataaaatctccagcgaggcccaccgtgaggtaatgaaggctgtaaaagtgggaatgaaagaatatgagttggaaagcctcttcgagcactactgctactcccggggcggcatgcgccacagctcctacacctgcatctgcggcagtggtgagaactcagccgtgctacactacggacacgccggagctcccaacgaccgaacgatccagaatggggatatgtgcctgttcgacatgggcggtgagtattactgcttcgcttccgacatcacctgctcctttcccgccaacggcaagttcactgcagaccagaaggccgtctatgaggcagtgctgcggagctcccgtgccgtcatgggtgccatgaagccaggtgtctggtggcctgacatgcaccgcctggctgaccgcatccacctggaggagctggcccacatgggcatcctgagcggcagcgtggacgccatggtccaggctcacctgggggccgtgtttatgcctcacgggcttggccacttcctgggcattgacgtgcacgacgtgggaggctacccagagggcgtggagcgcatcgacgagcccggcctgcggagcctgcgcactgcacggcacctgcagccaggcatggtgctcaccgtggagccgggcatctacttcatcgaccacctcctggatgaggccctggcggacccggcccgcgcctccttccttaaccgcgaggtcctgcagcgctttcgcggttttggcggggtccgcatcgaggaggacgtcgtggtgactgacagcggcatagagctgctgacctgcgtgccccgcactgtggaagagattgaagcatgcatggcaggctgtgacaaggcctttacccccttctctggccccaagtagagccagccagaaatcccagcgcacctgggggcctggccttgcaacctcttttcgtgatgggcagcctgctggtcagcactccagtagcgagagacggcacccagaatcagatcccagcttcggcatttgatcagaccaaacagtgctgtttcccggggaggaaacacttttttaattacccttttgcaggctcccacctttaatctgttttataccttgcttattaaatgagcgacttaaaatgattgaaaataatgctgttctttagtagcaactaaaatgtgtcttgctgtcatttatattccttttcccaggaaagaagcatttctgatactttctgtcaaaaatcaatatgcagaatggcatttgcaataaaaggtttcctaaaatggtcc

SEQ ID NO: 21821 - DNA, 577 bp, Homo sapiens
  source 1..577: mol_type = unassigned DNA
aaagattggtatggccttagctcttagccaaacaccttcctgacaccatgagggccagcagcttcttgatcgtggtggtgttcctcatcgctgggacgctggttctagaggcagctgtcacgggagttcctgttaaaggtcaagacactgtcaaaggccgtgttccattcaatggacaagatcccgttaaaggacaagtttcagttaaaggtcaagataaagtcaaagcgcaagagccagtcaaaggtccagtctccactaagcctggctcctgccccattatcttgatccggtgcgccatgttgaatccccctaaccgctgcttgaaagatactgactgcccaggaatcaagaagtgctgtgaaggctcttgcgggatggcctgtttcgttccccagtgagagggagccggtccttgctgcacctgtgccgtccccagagctacaggccccatctggtcctaagtccctgctgcccttccccttcccacactgtccattcttcctcccattcaggatgcccacggctggagctgcctctctcatccactttccaataaagagttccttctgctcca

SEQ ID NO: 21822 - DNA, 1158 bp, Homo sapiens
  source 1..1158: mol_type = unassigned DNA
ccgggtcactgttaagggggccgccatggcccggctgtggggcgcgctgagtctttggccactgtgggcggccgtgccgtggggcggggcggcagccgtcggtgtccgggcttgcagctccacggccgccccggacggcgtcgagggcccggcgctgcggcgctcctattggcgccacctgaggcgtctggtgctgggtcctcccgaaccgccgttctcgcacgtgtgccaagtcggggacccggtgctgcgcggcgtggcggccccggtggagcgggcgcagctaggcgggcccgagctgcagcggctgacgcaacggctggtccaggtgatgcggcggcggcgctgcgtgggcctaagcgcgccgcagctgggggtgccgcggcaggtgctggcgctggagctccccgaggcgctgtgtcgggagtgcccgccccgccagcgcgcgctccgccaaatggagcccttccccctgcgcgtgttcgtgaaccccagcctgcgagtgcttgacagccgcctggtcacctttcccgagggctgcgagagcgtcgccggcttcctggcctgcgtgccccgcttccaggcggtgcagatctcagggctggaccccaatggagaacaggtggtgtggcaggcgagcgggtgggcagcccgcatcatccagcacgagatggaccacctgcagggctgcctgtttattgacaaaatggacagcaggacgttcacaaacgtctattggatgaaggtgaatgactaaagctttgctactggggctgaggattccggataccaagacgcaaacactttcactttgagctgggcaaatcttacttggcatcaacttggatggctcgcatatgacaggaaactggattgccaaggcatggcagactgagctggaggaagatgtcagaaatgtttgccctgaaatcagttacggacaaaatgttggctacaacttgaggagaaaaatcacccccaaaggagtggacatttcctaacaattctgtatggaggaaggtggggtaattgcattcgtctgcagtagacacgagttcctcggacctgtataatctcccaaagccaaggtttggtaataatgtagtccccaaatacctgaaagctgtctttaaaaatgcaggtaagcatgtgactggc

SEQ ID NO: 21823 - DNA, 1048 bp, Homo sapiens
  source 1..1048: mol_type = unassigned DNA
gcccctggaggaactgaacccactatcggtcatggggccgagactaaatgtggcgggttgtctttaatctgctgccaagaggaaactcattcaggcaagttcagccctttatgaggaattcccctgtggtcacattccaattcctggacctgctgccaccctcagaactgcatgctccttcttcagactttctaagaatgactcaggtcattggtggagtgaagtcaagatttccaactcagtcacctgaagagatggagataccattcatggagctggaggtccctggagatttgggaattcagataacaagctaagataaggagtttgcctacctctgtcctagagcgaagcctgagccttgggcgcgcagcacaccacaagtatctgttactgtgttttgcagaagcttcaggcggggatataagccccacaaggaaagcgctgagcagaggaggcctcagcttgacctgcggcagtgcagcccttgggacttccctcgccttccacctcctgctcgtctgcttcacaagctatcgctatggtgttcgtgcgcaggccgtggcccgccttgaccacagtgcttctggccctgctcgtctgcctaggggcgctggtcgacgcctaccccatcaaacccgaggctccccgcgaagacgcctcgccggaggagctgaaccgctactacgcctccctgcgccactacctcaacctggtcacccggcagcggtatgggaaaagagacggcccggacacgcttctttccaaaacgttcttccccgacggcgaggaccgccccgtcaggtcgcggtcggagggcccagacctgtggtgaggacccctgaggcctcctgggagatctgccaaccacgcccacgtcatttgcatacgcactcccgaccccagaaacccggattctgcctcccgacggcggcgtctgggcagggttcgggtgcggccctccgcccgcgtctcggtgcccccgccccctgggctggagggctgtgtgtggtccttccctggtcccaaaataaagagcaaattccac

SEQ ID NO: 21824 - DNA, 3846 bp, Homo sapiens
  source 1..3846: mol_type = unassigned DNA
tcagaactcacacttcttcctggcaaagaagtgcccaggacgggagctggggagccagggctgatctaggaggctgggagccaggtgacaggatggccccaaagagagttgtgcagctgtccctgaagatgcctacccatgccgtgtgtgtggtgggagtcgaggcacatgtggacattcacagtgatgtgcccaagggtgccaacagcttcagggtctctggaagctccggggtggaggtcttcatggtctacaaccgcacacgtgtgaaagagcccataggcaaggcccgttggccgctagacactgatgcagacatggtcgtatctgtgggcacagccagtaaggaattaaaggacttcaaggtgagggtctcctactttggggagcaggaagaccaagctctgggccgcagcgtgctttacctcactggcgtcgatatttcccttgaggttgacacaggccgcacaggcaaggtgaagaggagccaaggggacaagaaaacctggcgctggggccctgagggctatggggctatcttgctggtgaactgtgaccgggacaatcacaggtccgcagagcctgacctcacccacagctggctgatgtcgctggctgacctgcaggacatgtccccaatgctgctgagctgcaatggccccgacaagctcttcgacagccacaagcttgtcttgaacgtgcccttttctgattccaaaagagtgagggtcttctgtgccaggggtgggaattctctctcggactacaaacaggtgctggggccccagtgtctgtcctatgaagttgagcgacagccaggggagcaggagatcaagttctatgtggaggggctgaccttccccgatgccgatttcctagggctggtttccctcagtgtcagcctggtggacccggggaccctgcccgaggtgaccctcttcacagacactgtgggcttccgcatggccccctggatcatgacgcccaacactcagcctcctgaggagctgtatgtgtgcagagtgatggacactcatggctccaatgagaaattcctggaggacatgtcttatctgacattgaaagccaactgcaagctgaccatctgccctcaagttgaaaatcgaaatgaccgctggatccaggacgagatggagtttggctacatcgaggcccctcacaaatccttccccgtggtctttgactcccccaggaacaggggcctgaaagatttcccctataagaggatcctgggtcctgactttggatatgttacccgggagatcccgctccctggtccctccagccttgactccttcggcaacctggacgtcagcccgcccgtcacggtgggcggcacggaataccccctgggccggatcctcatcgggagcagcttccccaagtccggtgggcggcagatggccagggcagtgcggaacttcctgaaggcacagcaggtgcaggcacccgtggagctctactcggactggctctctgtgggccatgtggacgagtttctgacctttgtgcctacctctgaccaaaagggcttccggctgctcctggctagccccagcgcttgcctcaaactcttccaagagaagaaagaagagggttatggggaggcagcccagtttgatgggttaaaacaccaggcaaaaagaagcattaatgagatgctggcagacagacacctccagagagacaatcttcatgcacagaaatgcattgactggaaccgtaatgtgctgaagcgggagctgggcctggcagagagtgacatcgtggacattccccagctcttcttcctgaaaaacttctacgcggaagccttcttcccagacatggttaacatggtggtcttaggcaagtacctgggcatccccaagccctacgggcccatcatcaatggccgctgctgcctggaggagaaggtgcagtccctgctggagcctctgggcctgcactgcatcttcattgatgactacttgtcctaccacgagctgcagggggagatccactgtggcaccaacgtgcgcaggaagccctttcccttcaaatggtggaacatggtgccctgagcctgcccccacccgccatcctctctgccctcttgctagggaaccctgccagggtgaaggcaaggaacaaccacctggcctccattctcttgggggagtcttggcactttgcaaacatcctggccaccatgggcaccaggacacagggatggataccacctaccctcgcctctggaatggcctacccaacccgagaagaatgcacctcattcttccctggcctctttcccacccacagcccccagaggctctagatcaacaatgttagcatgttccagaatggctgtgggaggcctagggagatgggccccacttagaattgctcccccttcattctgatgcctccctggggaacaaggataatgactttgcatctgcacctggaacggggcctgggggacctggggtctggtgtgccaggcaccaggctgcctctgctcttggaaaactaggaaaggggatcagaaacatcctctccccgctctaggtttcttctcccaaaggggacccaaggctgtgacacttacctccacccccatccagcacccttcagctgtgtgtggacaaacaaggacagaaaaacccagtgtccaagggccaatttaaatagaaaaaaagacaacaaaattttaatagctgactccgacctcagaagagtgattgctacctttctggaaagactttaattaccagagctggcttctcccagctcagaaatgctgagaagccaacgtgaggcctgaggacacacaaaggatgacggggcaggaggggatgaggtcagggtagcagagtgtgtgacgacggatttgggggcctagaggtgtccgtggttcctgggctgggattttggactctggatttgaagggagctggagcttccagatgtagcaggggtagggggccagatgttagaagagggtgtgtgtgttgggaggaaattaggttatctctgaaggtggagtttaatttcctttaatagtctttaattattccccttcattctgcaggcagtgggaggggaaggcttgcccggtctctctcagcaacccagggaccctgcacatagcttaggtttcatccctgaataaaccgctgtgcaggcccatgtcccctcccacagtagggaagacagctgccacgggaggttaatagcccggagtgaggtcactgagacatgcacaggcaggctggttcagctgggctgcagggcacgggcaggaggaagccagcctaccctcttcccccactgccagtgaggccattgtagggcagttggccctagggcttcggtccatctaggttttcagtggcccctgctgagacctcacactgagccaactactgtcactgttttaaccaacaaaagctagcctggaactgctatggttaaagtgggtgagcgggaacctgaaaatccccttctggaaggttctacagaactctatttgcaagctcctgctttaacctgagcgtcctctgctcaggatcataccccagcctgcactgagtcaagaaggagaaggaggctctgaaggggccgggggtgtgagctggggttgggactcccctgagaaagagctgtgggtaggaagggagtgagcattgcagagatagggctgggggtcggggccacactgagtgtgggaagctctggagttgctgctgggccatcgaggggccctggtgttggctctgagaatgttctgggtgaccagtcacctactttctgatcaataaaaatgtcgacatgcatttctta

SEQ ID NO: 21825 - DNA, 1476 bp, Homo sapiens
  source 1..1476: mol_type = unassigned DNA
aaattggagaagctggggaggtgagatacagtctggcacagagacagaggaatagactcattgacttctcccattaggaagtcagaatagcttctgtcctaaccatggcttaaaagggtcctgaggtcatgaagttcccagggcaggtggctgcaggtccggtgggcggcagatggccagggcagtgcggaacttcctgaaggcacagcaggtgcaggcacccgtggagctctactcggactggctctctgtgggccatgtggacgagtttctgacctttgtgcctacctctgaccaaaagggcttccggctgctcctggctagccccagcgcttgcctcaaactcttccaagagaagaaagaagagggttatggggaggcagcccagtttgatgggttaaaacaccaggcaaaaagaagcattaatgagatgctggcagacagacacctccagagagacaatcttcatgcacaggttaacatggtggtcttaggcaagtacctgggcatccccaagccctacgggcccatcatcaatggccgctgctgcctggaggagaaggtgcagtccctgctggagcctctgggcctgcactgcatcttcattgatgactacttgtcctaccacgagctgcagggggagatccactgtggcaccaacgtgcgcaggaagccctttcccttcaaatggtggaacatggtgccctgagcctgcccccacccgccatcctctctgccctcttgctagggaaccctgccagggtgaaggcaaggaacaaccacctggcctccattctcttgggggagtcttggcactttgcaaacatcctggccaccatgggcaccaggacacagggatggataccacctaccctcgcctctggaatggcctacccaacccgagaagaatgcacctcattcttccctggcctctttcccacccacagcccccagaggctctagatcaacaatgttagcatgttccagaatggctgtgggaggcctagggagatgggccccacttagaattgctcccccttcattctgatgcctccctggggaacaaggataatgactttgcatctgcacctggaacggggcctgggggacctggggtctggtgtgccaggcaccaggctgcctctgctcttggaaaactaggaaaggggatcagaaacatcctctccccgctctaggtttcttctcccaaaggggacccaaggctgtgacacttacctccacccccatccagcacccttcagctgtgtgtggacaaacaaggacagaaaaacccagtgtccaagggccaatttaaatagaaaaaaagacaacaaaattttaatagctgactccgacctcagaagagtgattgctacctttctggaaagactttaattaccagagctggcttctcccagctcagaaatgctgagaagccaacgtgaggcctgaggacacacaaaggatgacggggca

SEQ ID NO: 21826 - DNA, 1483 bp, Homo sapiens
  source 1..1483: mol_type = unassigned DNA
attaggaagtcagaatagcttctgtcctaaccatggcttaaaagggtcctgaggtcatgaagttcccagggcaggtggctgcagggcttccggctgctcctggctagccccagcgcttgcctcaaactcttccaagagaagaaagaagagggttatggggaggcagcccagtttgatgggttaaaacaccaggcaaaaagaagcattaatgagatgctggcagacagacacctccagagagacaatcttcatgcacagaaatgcattgactggaaccgtaatgtgctgaagcgggagctgggcctggcagagagtgacatcgtggacattccccagctcttcttcctgaaaaacttctacgcggaagccttcttcccagacatggttaacatggtggtcttaggcaagtacctgggcatccccaagccctacgggcccatcatcaatggccgctgctgcctggaggagaaggtgcagtccctgctggagcctctgggcctgcactgcatcttcattgatgactacttgtcctaccacgagctgcagggggagatccactgtggcaccaacgtgcgcaggaagccctttcccttcaaatggtggaacatggtgccctgagcctgcccccacccgccatcctctctgccctcttgctagggaaccctgccagggtgaaggcaaggaacaaccacctggcctccattctcttgggggagtcttggcactttgcaaacatcctggccaccatgggcaccaggacacagggatggataccacctaccctcgcctctggaatggcctacccaacccgagaagaatgcacctcattcttccctggcctctttcccacccacagcccccagaggctctagatcaacaatgttagcatgttccagaatggctgtgggaggcctagggagatgggccccacttagaattgctcccccttcattctgatgcctccctggggaacaaggataatgactttgcatctgcacctggaacggggcctgggggacctggggtctggtgtgccaggcaccaggctgcctctgctcttggaaaactaggaaaggggatcagaaacatcctctccccgctctaggtttcttctcccaaaggggacccaaggctgtgacacttacctccacccccatccagcacccttcagctgtgtgtggacaaacaaggacagaaaaacccagtgtccaagggccaatttaaatagaaaaaaagacaacaaaattttaatagctgactccgacctcagaagagtgattgctacctttctggaaagactttaattaccagagctggcttctcccagctcagaaatgctgagaagccaacgtgaggcctgaggacacacaaaggatgacggggcaggaggggatgaggtcagggtagcagagtgtgtgacgacggatttgggggcctagaggtgtccgtggttcctgggctgggattttggactctggatttg

SEQ ID NO: 21827 - DNA, 939 bp, Homo sapiens
  source 1..939: mol_type = unassigned DNA
aaaaattggagaagctggggaggtgagatacagtctggcacagagacagaggaatagactcattgacttctcccattaggaagtcagaatagcttctgtcctaaccatggcttaaaagggtcctgaggtcatgaagttcccagggcaggtggctgcaggtccggtgggcggcagatggccagggcagtgcggaacttcctgaaggcacagcaggtgcaggcacccgtggagctctactcggactggctctctgtgggccatgtggacgagtttctgacctttgtgcctacctctgaccaaaagggcttccggctgctcctggctagccccagcgcttgcctcaaactcttccaagagaagaaagaagagggttatggggaggcagcccagtttgatgggttaaaacaccaggcaaaaagaagcattaatgagatgctggcagacagacacctccagagagacaatcttcatgcacagaaatgcattgactggaaccgtaatgtgctgaagcgggagctgggcctggcagagagtgacatcgtggacattccccagctcttcttcctgaaaaacttctacgcggaagccttcttcccagacatggttaacatggtggtcttaggcaagtacctgggcatccccaagccctacgggcccatcatcaatggccgctgctgcctggaggagaaggtgcagtccctgctggagcctctgggcctgcactgcatcttcattgatgactacttgtcctaccacgagctgcagggggagatccactgtggcaccaacgtgcgcaggaagccctttcccttcaaatggtggaacatggtgccctgagcctgcccccacccgccatcctctctgccctcttgctagggaaccctgccagggtgaaggcaaggaacaaccacctggcctccattctcttgggggagtctt

SEQ ID NO: 21828 - DNA, 1607 bp, Homo sapiens
  source 1..1607: mol_type = unassigned DNA
cgcacctgctgcaggtgctcccggccgccccggaccagcgagcgcgggcactgcggcggggaggatgctgcgcgagcggaccgtgcggctgcagtacgggagccgcgtggaggcggtgtacgtgctgggcacctacctctggaccgatgtctacagcgcggccccagccggggcccaaaccttcagcctgaagcactcggaacacgtgtgggtggaggtggtgcgtgatggggaggctgaggaggtggccaccaatggcaagcagcgctggcttctctcgcccagcaccaccctgcgggtcaccatgagccaggcgagcaccgaggccagcagtgacaaggtcaccgtcaactactatgacgaggaagggagcattcccatcgaccaggcggggctcttcctcacagccattgagatctccctggatgtggacgcagaccgggatggtgtggtggagaagaacaacccaaagaaggcatcctggacctggggccccgagggccagggggccatcctgctggtgaactgtgaccgagagacaccctggttgcccaaggaggactgccgtgatgagaaggtctacagcaaggaagatctcaaggacatgtcccagatgatcctgcggaccaaaggccccgaccgcctccccgccggatacgagatagttctgtacatttccatgtcagactcagacaaagtgggcgtgttctacgtggagaacccgttcttcggccaacgctatatccacatcctgggccggcggaagctctaccatgtggtcaagtacacgggtggctccgcggagctgctgttcttcgtggaaggcctctgtttccccgacgagggcttctcaggcctggtctccatccatgtcagcctgctggagtacatggcccaggacattcccctgactcccatcttcacggacaccgtgatattccggattgctccgtggatcatgacccccaacatcctgcctcccgtgtcggtgtttgtgtgctgcatgaaggataattacctgttcctgaaagaggtgaagaaccttgtggagaaaaccaactgtgagctgaaggtctgcttccagtacctaaaccgaggcgatcgctggatccaggatgaaattgagtttggctacatcgaggccccccataaaggcttccccgtggtgctggactctccccgagatggaaacctaaaggacttccctgtgaaggagctcctgggcccagattttggctacgtgacccgggagcccctctttgagtctgtcaccagccttgactcatttggaaacctggaggtcagtcccccagtgaccgtgaacggcaagacatacccgcttggccgcatcctcatcgggagcagctttcctctgtaagagaagccaggctggggctaggggctgtgggagtggggaagtcactgtttctcttttggggtggcctgggttgctcacacatggagcaagtggctgggggaattattccctcccacgacttcctgttaagaggccgacactcttggaaagaaaatcaagctagcctttatatctttgtgtgatttaggatctaatatataactaaataaacaactcttttccccaagtg

SEQ ID NO: 21829 - DNA, 4345 bp, Homo sapiens
  source 1..4345: mol_type = unassigned DNA
cgcacctgctgcaggtgctcccggccgccccggaccagcgagcgcgggcactgcggcggggaggatgctgcgcgagcggaccgtgcggctgcagtacgggagccgcgtggaggcggtgtacgtgctgggcacctacctctggaccgatgtctacagcgcggccccagccggggcccaaaccttcagcctgaagcactcggaacacgtgtgggtggaggtggtgcgtgatggggaggctgaggaggtggccaccaatggcaagcagcgctggcttctctcgcccagcaccaccctgcgggtcaccatgagccaggcgagcaccgaggccagcagtgacaaggtcaccgtcaactactatgacgaggaagggagcattcccatcgaccaggcggggctcttcctcacagccattgagatctccctggatgtggacgcagaccgggatggtgtggtggagaagaacaacccaaagaaggcatcctggacctggggccccgagggccagggggccatcctgctggtgaactgtgaccgagagacaccctggttgcccaaggaggactgccgtgatgagaaggtctacagcaaggaagatctcaaggacatgtcccagatgatcctgcggaccaaaggccccgaccgcctccccgccggatacgagatagttctgtacatttccatgtcagactcagacaaagtgggcgtgttctacgtggagaacccgttcttcggccaacgctatatccacatcctgggccggcggaagctctaccatgtggtcaagtacacgggtggctccgcggagctgctgttcttcgtggaaggcctctgtttccccgacgagggcttctcaggcctggtctccatccatgtcagcctgctggagtacatggcccaggacattcccctgactcccatcttcacggacaccgtgatattccggattgctccgtggatcatgacccccaacatcctgcctcccgtgtcggtgtttgtgtgctgcatgaaggataattacctgttcctgaaagaggtgaagaaccttgtggagaaaaccaactgtgagctgaaggtctgcttccagtacctaaaccgaggcgatcgctggatccaggatgaaattgagtttggctacatcgaggccccccataaaggcttccccgtggtgctggactctccccgagatggaaacctaaaggacttccctgtgaaggagctcctgggcccagattttggctacgtgacccgggagcccctctttgagtctgtcaccagccttgactcatttggaaacctggaggtcagtcccccagtgaccgtgaacggcaagacatacccgcttggccgcatcctcatcgggagcagctttcctctgtctggtggtcggaggatgaccaaggtggtgcgtgacttcctgaaggcccagcaggtgcaggcgcccgtggagctctactcagactggctgactgtgggccacgtggatgagttcatgtcctttgtccccatccccggcacaaagaaattcctgctactcatggccagcacctcggcctgctacaagctcttccgagagaagcagaaggacggccatggagaggccatcatgttcaaaggcttgggtgggatgagcagcaagcgaatcaccatcaacaagattctgtccaacgagagccttgtgcaggagaacctgtacttccagcgctgcctagactggaaccgtgacatcctcaagaaggagctgggactgacagagcaggacatcattgacctgcccgctctgttcaagatggacgaggaccaccgtgccagagccttcttcccaaacatggtgaacatgatcgtgctggacaaggacctgggcatccccaagccattcgggccacaggttgaggaggaatgctgcctggagatgcacgtgcgtggcctcctggagcccctgggcctcgaatgcaccttcatcgacgacatttctgcctaccacaaatttctgggggaagtccactgtggcaccaacgtccgcaggaagcccttcaccttcaagtggtggcacatggtgccctgacctgccaggggccctggcgtttgcctccttcgcttagttctccagaccctccctcacacgcccagagccttctgctgacatggactggacagccccgctgggagacctttgggacgtggggtggaatttggggtatctgtgccttgccctccctgagaggggcctcagtgtcctctgaagccatccccagtgagcctcgactctgtccctgctgaaaatagctgggccagtgtctctgtagccctgacataaggaacagaacacaacaaaacacagcaaaccatgtgcccaaactgctccccaaagaattttgagtctctaatctgacactgaatgaggggagaagggaaggagattctgggattgccagttcttccagcagccatgctctgaaaatcaaggtagaatccatggaaagggaccccaggaccccgggaccctagacgtatcttgaactgccatcgtcatttcaaatacatctccctcagggtttccaggtggccacccccaattattcattccttaccaacctctcaaatcctcttggctttctctctgcagtgtggacactgttggctagtcctccccactccctgagggtccagtaagttagcttagaaccttcctggaaacatttcatctgagcaggtttccccacgtgtgggatgctccttttgcctcatctgtctcagggatgcaggctcccccgcatgcatggggatttctccccagaccagcatacttgtgacctgagagttcaatgcgtaaagatgcccctggtcagccatatccatcttctcttgcctggtccttgattctctggccgctccctgaccttcctccttccactgccttgactttcttcctttttattcctggtgccatctgtccaggcagctagacaagaacttgttcgccagcagccagattcaggccttcccaggggcataataagtgaccagcccctcctctccggacatcagatccaacacataaggaccctggcctaccctccagcccaacagccagttctgggtcagctgccaacttaggggtggtttgattatcccattgaaattcaccagtgcctttgccaaagaccctctcatttggacatacccagattcattccctggctccaactgaaaagactcagtttcaatcgttaaaagttcctttagggccagaagaataaatgaattataatcccattttgaagaaccgatttataaccaatgaaaaggttataatgtaatttatattcttggaggaacaagattttcatttgggattatttccttcaaccattcaacaaacatttgttgtatgccactaagcgccaggcacggcgttgggctctgcaaacacagtggttagtagcagtctggacctggtccctactggcatggaacccatcactccccaacatgcaaagcccacatttaaaggccagcctctgccccttcagtgatgcgctctttagaaatgccagtccactatattcagaaatccgcagggcacaaaacttccagcaagtcactgttgtggtgaaatgggcagtgggggtggggggtcttctttaaacaggcccccttcccatctacctagccagtacccatccaatgagtccccagagcctccagaagctgttgtctcctctctggggacagcagctcctgcctttggaggccaaagccccagatctctccagccccagagctgaaaacaccaagtgcctatttgagggtgtctgtctggagacttagagtttgtcatgtgtgtgtgtgtgtttggttaatgtgggtttatgggttttctttcttttttttctttttttttttagtctacattagggggaagtgagcgcctcccatgtgcagacagtgtgtctttatagatttttctaaggctttccccaatgatgtcggtaatttctgatgtttctgaagttcccaggactcacacacccgttcccatctcacttgcccacccagtgtgacaaccctcggtgtggatatacccccgtggactcatggctcttccccacccccactttctataaatgtaggcctagaatacgcttctctgttgcaaaactcagctaagttcctgcttccaccttgatgttgaaatatcttatgtaagagggcaggggatgtcgtgaagatggcaagaagaacacagtttcaaatttctggaaaagagcctgtggtggagatctaaagatgtttagggaagagctcgactaaagaacaatgaaataaatggtccaaggggaagtca

SEQ ID NO: 21830 - DNA, 2333 bp, Homo sapiens
  source 1..2333: mol_type = unassigned DNA
gcaggctgctggagaaggcgcacctgctgcaggtgctcccggccgccccggaccagcgagcgcgggcactgcggcggggaggatgctgcgcgagcggaccgtgcggctgcagtacgggagccgcgtggaggcggtgtacgtgctgggcacctacctctggaccgatgtctacagcgcggccccagccggggcccaaaccttcagcctgaagcactcggaacacgtgtgggtggaggtggtgcgtgatggggaggctgaggaggtggccaccaatggcaagcagcgctggcttctctcgcccagcaccaccctgcgggtcaccatgagccaggcgagcaccgaggccagcagtgacaaggtcaccgtcaactactatgacgaggaagggagcattcccatcgaccaggcggggctcttcctcacagccattgagatctccctggatgtggacgcagaccgggatggtgtggtggagaagaacaacccaaagaagacccgttcttcggccaacgctatatccacatcctgggccggcggaagctctaccatgtggtcaagtacacgggtggctccgcggagctgctgttcttcgtggaaggcctctgtttccccgacgagggcttctcaggcctggtctccatccatgtcagcctgctggagtacatggcccagcatgaaggataattacctgttcctgaaagaggtgaagaaccttgtggagaaaaccaactgtgagctgaaggtctgcttccagtacctaaaccgaggcgatcgctggatccaggatgaaattgagtttggctacatcgaggccccccataaaggcttccccgtggtgctggactctccccgagatggaaacctaaaggacttccctgtgaaggagctcctgggcccagattttggctacgtgacccgggagcccctctttgagtctgtcaccagccttgactcatttggaaacctggaggtcagtcccccagtgaccgtgaacggcaagacatacccgcttggccgcatcctcatcgggagcagctttcctctgtctggtggtcggaggatgaccaaggtggtgcgtgacttcctgaaggcccagcaggtgcaggcgcccgtggagctctactcagactggctgactgtgggccacgtggatgagttcatgtcctttgtccccatccccggcacaaagaaattcctgctactcatggccagcacctcggcctgctacaagctcttccgagagaagcagaaggacggccatggagaggccatcatgttcaaaggcttgggtgggatgagcagcaagcgaatcaccatcaacaagattctgtccaacgagagccttgtgcaggagaacctgtacttccagcgctgcctagactggaaccgtgacatcctcaagaaggagctgggactgacagagcaggacatcattgacctgcccgctctgttcaagatggacgaggaccaccgtgccagagccttcttcccaaacatggtgaacatgatcgtgctggacaaggacctgggcatccccaagccattcgggccacaggttgaggaggaatgctgcctggagatgcacgtgcgtggcctcctggagcccctgggcctcgaatgcaccttcatcgacgacatttctgcctaccacaaatttctgggggaagtccactgtggcaccaacgtccgcaggaagcccttcaccttcaagtggtggcacatggtgccctgacctgccaggggccctggcgtttgcctccttcgcttagttctccagaccctccctcacacgcccagagccttctgctgacatggactggacagccccgctgggagacctttgggacgtggggtggaatttggggtatctgtgccttgccctccctgagaggggcctcagtgtcctctgaagccatccccagtgagcctcgactctgtccctgctgaaaatagctgggccagtgtctctgtagccctgacataaggaacagaacacaacaaaacacagcaaaccatgtgcccaaactgctccccaaagaattttgagtctctaatctgacactgaatgaggggagaagggaaggagattctgggattgccagttcttccagcagccatgctctgaaaatcaaggtagaatccatggaaagggaccccaggaccccgggaccctagacgtatcttgaactgccatcgtcatttcaaatacatctccctcagggtttccaggtggccacccccaattattcattccttaccaacctctcaaatcctcttggctttctctctgcagtgtggacactgttggctagtcctccccactccctgagggt

SEQ ID NO: 21831 - DNA, 3189 bp, Homo sapiens
  source 1..3189: mol_type = unassigned DNA
agtgttggggttggcggccacagctaagtccaacaccagcatgtcgctgcagagaatcgtgcgtgtgtccctggagcatcccaccagcgcggtgtgtgtggctggcgtggagaccctcgtggacatttatgggtcagtgcctgagggcacagaaatgtttgaggtctatgggacgcctggcgtggacatctacatctctcccaacatggagaggggccgggagcgtgcagacaccaggcggtggcgctttgacgcgactttggagatcatcgtggtcatgaactcccccagcaatgacctcaacgacagccatgttcagatttcctaccactccagccatgagcctctgcccctggcctatgcggtgctctacctcacctgtgttgacatctctctggattgcgacctgaactgtgagggaaggcaggacaggaactttgtagacaagcggcagtgggtctgggggcccagtgggtatggcggcatcttgctggtgaactgtgaccgtgatgatccgagctgtgatgtccaggacaattgtgaccagcacgtgcactgcctgcaagacctggaagacatgtctgtcatggtcctgcggacgcagggccctgcagccctctttgatgaccacaaacttgtcctccatacctccagctatgatgccaaacgggcacaggtcttccacatctgcggtcctgaggatgtgtgtgaggcctataggcatgtgctgggccaagataaggtgtcctatgaggtaccccgcttgcatggggatgaggagcgcttcttcgtggaaggcctgtccttccctgatgccggcttcacaggactcatctccttccatgtcactctgctggacgactccaacgaggatttctcggcatcccctatcttcactgacactgtggtgttccgagtggcaccctggatcatgacgcccagcactctgccacccctagaggtgtatgtgtgccgtgtgaggaacaacacgtgttttgtggatgcggtggcagagctggccaggaaggccggctgcaagctgaccatctgcccacaggccgagaaccgcaacgaccgctggatccaggatgagatggagctgggctacgttcaggcgccgcacaagaccctcccggtggtctttgactccccaaggaatggggaactgcaggatttcccttacaaaagaatcctgggtccagattttggttacgtgactcgggaaccacgcgacaggtctgtgagtggcctggactcctttgggaacctggaggtcagccctccagtggtggccaatgggaaagagtaccccctggggaggatcctcattgggggcaacctgcctgggtcaagtggccgcagggtcacccaggtggtgcgggacttcctccatgcccagaaggtgcagccccccgtggagctctttgtggactggttggccgtgggccatgtggatgagtttctgagctttgtccctgcccccgatgggaagggcttccggatgctcctggccagccctggggcctgcttcaagctcttccaggaaaagcagaagtgtggccacgggagggccctcctgttccagggggttgttgatgatgagcaggtcaagaccatctccatcaaccaggtgctctccaataaagacctcatcaactacaataagtttgtgcagagctgcatcgactggaaccgtgaggtgctgaagcgggagctgggcctggcagagtgtgacatcattgacatcccacagctcttcaagaccgagaggaaaaaagcaacggccttcttccctgacttggtgaacatgctggtgctggggaagcacctgggcatccccaagccctttgggcccatcatcaatggctgctgctgcctggaggagaaggtgcggtccctgctggagccgctgggcctccactgcaccttcattgatgacttcactccataccacatgctgcatggggaggtgcactgtggcaccaatgtgtgcagaaagcccttctctttcaagtggtggaacatggtgccctgagacagctcccacccaccatcctgtccccctggggcgggcattggcccaggtggtggagacagagacaggcccctgaacgataagcaccaagagaccccaaggctccagatggaacactgagggtgaccgtccctctcagaagccttttccctggaagtgtccatgcctcacctgcaacccatgtggttctcagacttgaatcttctcggccccccaaaaagaaggacctcatttcttatagcctctcctgtgattcaacacaacccatggagatgtccccttctcactctgaaatcatccatttggggacaaatccacattggggtctagaaacatccacgtatctcatcagccatcttgtcctgtgcatcctaacagaggaaggatccatgattctgctttggtccaattgcttcctctctgcagaggaacaaccctaaaaccagaccactccacgcaggacaggcaggagagattcttcctaaagcctcccccataaaaagggagctgtggatccacttagatcagggcggaaccatctttcacccggccaagctcctgcccagatgttgaccctcacccagcgtgagctgtcacatagtaggagcttctagatgcatgtggaagcaatgagagttgtcccttagccttataaactccccatgatctgacatgcagaaatccagccttgtccagaatcctcctggaatttcttggagacgaaagtatctgggggattgttgggtactagggagactgggtacaagggtgaaaagtagttcccataatacacatggttgactatggtgatccaccttgtgatggttaatattaggtgtctggagaaggttgcttcattggccctgggacttctctctgcaggaggagagaacgctgcctctcctctggattggtctcaggctctctgttggcctttggtcagcgtttccacatcctgctctgctgcaggagagggggctaaggggctggatccaccaaggcagctcacagcgggaaaactctgggaatgaaccactgaattcaggggatgggggtgggggggcggttctcgaggtgtgtgccagctacacgtgtgttctgtatgggtccagctgcgtttccatcactcgctaataaatcaacagaaacacaaa

SEQ ID NO: 21832 - DNA, 833 bp, Homo sapiens
  source 1..833: mol_type = unassigned DNA
acagccagagggacgagctagcccgacgatggcccaggggacattgatccgtgtgaccccagagcagcccacccatgccgtgtgtgtgctgggcaccttgactcagcttgacatctgcagctctgcccctgaggactgcacgtccttcagcatcaacgcctccccaggggtggtcgtggatattgcccacggccctccagccaagaagaaatccacaggttcctccacatggcccctggaccctggggtagaggtgaccctgacgatgaaagtggccagtggtagcacaggcgaccagaaggttcagatttcatactacggacccaagactccaccagtcaaagctctactctacctcaccggggtggatggagtctcaccctgtcacccaggctggagtgcaatgcatgatctcgctcactgcaacctgcgtctccaggttcaagcgatcctctgcttcagcgtccctagtagctggactacaggcgcttgccaccacgcctggctaatttttgtatttttagtagagatggagtttcaccatgttggccaggctggtctcgaacttctgacctcaggtgatctgcctgcctcaggctcccaaagtgctcggattactggcatgaaccactgcgccaggccctctatttttttgatactcaaatatctataacaaaaagtagataatgacactgtcttatacaagaatatagatagtgttcctcaaattccattatttatatctcatcttcaccatttctgccatatcaatgatccacctatactcatatttatgtaatgttcttctttaaataaaatccattcttaaactt

SEQ ID NO: 21833 - DNA, 2267 bp, Homo sapiens
  source 1..2267: mol_type = unassigned DNA
agccagagggacgagctagcccgacgatggcccaggggacattgatccgtgtgaccccagagcagcccacccatgccgtgtgtgtgctgggcaccttgactcagcttgacatctgcagctctgcccctgaggactgcacgtccttcagcatcaacgcctccccaggggtggtcgtggatattgcccacggccctccagccaagaagaaatccacaggttcctccacatggcccctggaccctggggtagaggtgaccctgacgatgaaagtggccagtggtagcacaggcgaccagaaggttcagatttcatactacggacccaagactccaccagtcaaagctctactctacctcaccggggtggaaatctccttgtgcgcagacatcacccgcaccggcaaagtgaagccaaccagagctgtgaaagatcagaggacctggacctggggcccttgtggacagggtgccatcctgctggtgaactgtgacagagacaatctcgaatcttctgccatggactgcgaggatgatgaagtgcttgacagcgaagacctgcaggacatgtcgctgatgaccctgagcacgaagacccccaaggacttcttcacaaaccatacactggtgctccacgtggccaggtctgagatggacaaagtgagggtgtttcaggccacacggggcaaactgtcctccaagtgcagcgtagtcttgggtcccaagtggccctctcactacctgatggtccccggtggaaagcacaacatggacttctacgtggaggccctcgctttcccggacaccgacttcccggggctcattaccctcaccatctccctgctggacacgtccaacctggagctccccgaggctgtggtgttccaagacagcgtggtcttccgcgtggcgccctggatcatgacccccaacacccagcccccgcaggaggtgtacgcgtgcagtatttttgaaaatgaggacttcctgaagtcagtgactactctggccatgaaagccaagtgcaagctgaccatctgccctgaggaggagaacatggatgaccagtggatgcaggatgaaatggagatcggctacatccaagccccacacaaaacgctgcccgtggtcttcgactctccaaggaacagaggcctgaaggagtttcccatcaaacgcgtgatgggtccagattttggctatgtaactcgagggccccaaacagggggtatcagtggactggactcctttgggaacctggaagtgagccccccagtcacagtcaggggcaaggaatacccgctgggcaggattctcttcggggacagctgttatcccagcaatgacagccggcagatgcaccaggccctgcaggacttcctcagtgcccagcaggtgcaggcccctgtgaagctctattctgactggctgtccgtgggccacgtggacgagttcctgagctttgtgccagcacccgacaggaagggcttccggctgctcctggccagccccaggtcctgctacaaactgttccaggagcagcagaatgagggccacggggaggccctgctgttcgaagggatcaagaaaaaaaaacagcagaaaataaagaacattctgtcaaacaagacattgagagaacataattcatttgtggagagatgcatcgactggaaccgcgagctgctgaagcgggagctgggcctggccgagagtgacatcattgacatcccgcagctcttcaagctcaaagagttctctaaggcggaagcttttttccccaacatggtgaacatgctggtgctagggaagcacctgggcatccccaagcccttcgggcccgtcatcaacggccgctgctgcctggaggagaaggtgtgttccctgctggagccactgggcctccagtgcaccttcatcaacgacttcttcacctaccacatcaggcatggggaggtgcactgcggcaccaacgtgcgcagaaagcccttctccttcaagtggtggaacatggtgccctgagcccatcttccctggcgtcctctccctcctggccagatgtcgctgggtcctctgcagtgtggcaagcaagagctcttgtgaatattgtggctccctgggggcggccagccctcccagcagtggcttgctttcttctcctgtgatgtcccagtttcccactctgaagatcccaacatggtcctagcactgcacactcagttctgctctaagaagctgcaataaagtttttttaagtcactttgtacatga

SEQ ID NO: 21834 - DNA, 841 bp, Homo sapiens
  source 1..841: mol_type = unassigned DNA
acagccagagggacgagctagcccgacgatggcccaggggacattgatccgtgtgaccccagagcagcccacccatgccgtgtgtgtgctgggcaccttgactcagcttgacatctgcagctctgcccctgaggactgcacgtccttcagcatcaacgcctccccaggggtggtcgtggatattgcccacggccctccagccaagaagaaatccacaggttcctccacatggcccctggaccctggggtagaggtgaccctgacgatgaaagtggccagtggtagcacaggcgaccagaaggttcagatttcatactacggacccaagactccaccagtcaaagctctactctacctcaccggggtggatggagtctcaccctgtcacccaggctggagtgcaatggcatgatctcggctcactgcaacctgcgtctcccaggttcaagcgatcctcctgcttcagcgtccctagtagctgggactacaggcgcttgccaccacgcctggctaatttttgtatttttagtagagatggagtttcaccatgttggccaggctggtctcgaacttctgacctcaggtgatctgcctgcctcaggctcccaaagtgctcggattactggcatgaaccactgcgccaggccctctattcctttttgatacctcaaatatctataacaaaaagtagataatgacactgtcttatacaagaatatagatagtgttcctcaaattccattatttatatctcatcttcaccatttctgccatatcaatgatccacctatactcatatttatgtaatgttcttctttaaataaaatccattcttaaactt

SEQ ID NO: 21835 - DNA, 3446 bp, Homo sapiens
  source 1..3446: mol_type = unassigned DNA
ggtgtgtggccgccgcaggacgcccgccgtgcccgggccatgaagtagcggctgctggcggcgccgctgcccaaccgccagccccagccccgcgctgcgctgcccggtcctctcccggcggggtcgtatcggcgtggacatggctggccgcgtccctagcctgctagttctccttgtttttccaagcagctgtttggctttccgaagcccactttctgtctttaagaggtttaaagaaactaccagaccattttccaatgaatgtcttggtaccaccagacccgtagttcctattgattcatcagattttgcattggatattcgcatgcctggggttacacctaaacagttgacttcaagcctcgagccagcatggatactgtccatcacatgttactttttggatgcaatatgccttcatccactggaagttactggttttgtgatgaaggaacctgtacagataaagccaatattctgtatgcctgggcgagaaatgctccccctacccggctccccaaaggtgttggattcagagttggaggagagactggaagtaaatactttgtactacaggtacactatggggatattagtgcttttagagataataacaaggactgttctggtgtgtccttacacctcacacgtctgccacagcctttaattgctggcatgtaccttatgatgtctgttgacactgttatcccagcaggagaaaaagtggtgaattctgacatttcatgccattataaaaattatccaatgcatgtctttgcctatagagttcacactcaccatttaggtaaggtagtaagtggatacagagtaagaaatggacagtggacactgattggacggcagagccctcagctgccacaggctttctaccctgtggggcatccagttgatgtaagttttggtgacctactggctgcaagatgtgtattcactggtgaaggaaggacagaagccacacacattggtggcacgtctagtgatgaaatgtgcaacttatacattatgtattacatggaagccaagcatgcagtttctttcatgacctgtacccagaatgtagctccagatatgttcagaaccataccaccagaggccaacattccaattcccgtgaagtctgatatggttatgatgcatgaacatcataaagaaacagaatataaagataagattcctttactacagcagccaaaacgagaagaagaagaagtgttagaccagggtgatttctattcactactttccaagctgctaggagaaagggaagatgttgttcatgtgcacaaatataatcctacagaaaaggcagaatcagagtcagacctggtagctgagattgcaaatgtagtccaaaaaaaggatcttggtcgatctgatgccagagagggtgcagaacatgagaggggtaatgctattcttgtcagagacagaattcacaaattccacagactagtatctaccttgaggccaccagagagcagagttttctcattacagcagcccccacctggtgaaggcacctgggaaccagaacacacaggagatttccacatggaagaggcactggattggcctggagtatacttgttaccaggccaggtttctggggtggctctagaccctaagaataacctggtgattttccacagaggtgaccatgtctgggatggaaactcgtttgacagcaagtttgtttaccagcaaataggactcggaccaattgaagaagacactattcttgtcatagatccaaataatgctgcagtactccagtccagtggaaaaaatctgttttacttgccacatggcttgagtatagataaagatgggaattattgggtcacagacgtggctctccatcaggtgttcaaactggatccaaacaataaagaaggccctgtattaatcctgggaaggagcatgcaaccaggcagtgaccagaatcacttctgtcaacccactgatgtggctgtggatccaggcactggagccatttatgtatcagatggttactgcaacagcaggattgtgcagttttcaccaagtggaaagttcatcacacagtggggagaagagtcttcagggagcagtcctctgccaggccagttcactgttcctcacagcttggctcttgtgcctcttttgggccaattatgtgtggcagaccgggaaaatggtcggatccagtgttttaaaactgacaccaaagaatttgtgagagagattaagcattcatcatttggaagaaatgtatttgcaatttcatatataccaggcttgctctttgcagtgaatgggaagcctcattttggggaccaagaacctgtacaaggatttgtgatgaacttttccaatggggaaattatagacatcttcaagccagtgcgcaagcactttgatatgcctcatgatattgttgcatctgaagatgggactgtgtacattggagatgctcataccaacaccgtgtggaagttcaccttgactgagaaattggaacatcgatcagttaaaaaggctggcattgaggtccaggaaatcaaagccgaggcagttgttgaaaccaaaatggagaacaaacccacctcctcagaattgcagaagatgcaagagaaacagaaactgatcaaagagccaggctcgggagtgcctgttgttctcattacaacccttctggttattccggtggttgtcctgctggccattgccatatttattcggtggaaaaaatcaagggcctttggagattctgaacacaaactcgagacgagttcaggaagagtactgggaagatttagaggaaagggaagtggaggcttaaaccttggtaatttctttgcaagccgtaagggctacagtcgaaaagggtttgaccggcttagcactgagggcagtgaccaagagaaagaggatgatggaagtgaatcagaagaggagtattcagcacctctgcctgcgctcgcaccttcctcctcctgaaaaccaagctttgatttagattgagtaagatttacccagaatgtcagattcctttccctttagcacgtttaaagttctgtgtatttaattgtaaactgtactagtctgtgtgggactgtacacactttatttacttcgttttggttaagttggcttctgtttctagttgaggagtttcctaaaagttcataacagtgccattgtctttatatgaacatagactagagaaaccgtcctctttttccatcataattctaatctaacaatggaagatttgcccatttacacttttgagactttttggtggatgtaaataaccccattctttgcttgaacacagtattttcccaatagcactttcattgccagtgtctttctttggtgcctttcctgttcagcattcttagcctgtggcagtaaagagaaactttgtgctacatgacgac

SEQ ID NO: 21836 - DNA, 3156 bp, Homo sapiens
  source 1..3156: mol_type = unassigned DNA
gaccgagacgcctcgccgcggccagctcgctgctctcgctggcggatggtgtgtggccgccgcaggacgcccgccgtgcccgggccatgaagtagcggctgctggcggcgccgctgcccaaccgccagccccagccccgcgctgcgctgcccggtcctctcccggcggggtcgtatcggcgtggacatggctggccgcgtccctagcctgctagttctccttgtttttccaagcagctgtttggctttccgaagcccactttctgtctttaagaggtttaaagaaactaccagaccattttccaatgaatgtcttggtaccaccagacccgtagttcctattgattcatcagattttgcattggatattcgcatgcctggggttacacctaaacagtccgatacatacttctgcatgtctatgcgaataccagtggatgaggaagccttcgtgattgacttcaagcctcgagccagcatggatactgtccatcacatgttactttttggatgcaatatgccttcatccactggaagttactggttttgtgatgaaggaacctgtacagataaagccaatattctgtatgcctgggcgagaaatgctccccctacccggctccccaaaggtgttggattcagagttggaggagagactggaagtaaatactttgtactacaggtacactatggggatattagtgcttttagagataataacaaggactgttctggtgtgtccttacacctcacacgtctgccacagcctttaattgctggcatgtaccttatgatgtctgttgacactgttatcccagcaggagaaaaagtggtgaattctgacatttcatgccattataaaaattatccaatgcatgtctttgcctatagagttcacactcaccatttaggtaaggtagtaagtggatacagagtaagaaatggacagtggacactgattggacggcagagccctcagctgccacaggctttctaccctgtggggcatccagttgatgtaagttttggtgacctactggctgcaagatgtgtattcactggtgaaggaaggacagaagccacacacattggtggcacgtctagtgatgaaatgtgcaacttatacattatgtattacatggaagccaagcatgcagtttctttcatgacctgtacccagaatgtagctccagatatgttcagaaccataccaccagaggccaacattccaattcccgtgaagtctgatatggttatgatgcatgaacatcataaagaaacagaatataaagataagattcctttactacagcagccaaaacgagaagaagaagaagtgttagaccagggtgatttctattcactactttccaagctgctaggagaaagggaagatgttgttcatgtgcacaaatataatcctacagaaaaggcagaatcagagtcagacctggtagctgagattgcaaatgtagtccaaaaaaaggatcttggtcgatctgatgccagagagggtgcagaacatgagaggggtaatgctattcttgtcagagacagaattcacaaattccacagactagtatctaccttgaggccaccagagagcagagttttctcattacagcagcccccacctggtgaaggcacctgggaaccagaacacacaggagatttccacatggaagaggcactggattggcctggagtatacttgttaccaggccaggtttctggggtggctctagaccctaagaataacctggtgattttccacagaggtgaccatgtctgggatggaaactcgtttgacagcaagtttgtttaccagcaaataggactcggaccaattgaagaagacactattcttgtcatagatccaaataatgctgcagtactccagtccagtggaaaaaatctgttttacttgccacatggcttgagtatagataaagatgggaattattgggtcacagacgtggctctccatcaggtgttcaaactggatccaaacaataaagaaggccctgtattaatcctgggaaggagcatgcaaccaggcagtgaccagaatcacttctgtcaacccactgatgtggctgtggatccaggcactggagccatttatgtatcagatggttactgcaacagcaggattgtgcagttttcaccaagtggaaagttcatcacacagtggggagaagagtcttcagggagcagtcctctgccaggccagttcactgttcctcacagcttggctcttgtgcctcttttgggccaattatgtgtggcagaccgggaaaatggtcggatccagtgttttaaaactgacaccaaagaatttgtgagagagattaagcattcatcatttggaagaaatgtatttgcaatttcatatataccaggcttgctctttgcagtgaatgggaagcctcattttggggaccaagaacctgtacaaggatttgtgatgaacttttccaatggggaaattatagacatcttcaagccagtgcgcaagcactttgatatgcctcatgatattgttgcatctgaagatgggactgtgtacattggagatgctcataccaacaccgtgtggaagttcaccttgactgagaaattggaacatcgatcagttaaaaaggctggcattgaggtccaggaaatcaaagaagccgaggcagttgttgaaaccaaaatggagaacaaacccacctcctcagaattgcagaagatgcaagagaaacagaaactgatcaaagagccaggctcgggagtgcctgttgttctcattacaacccttctggttattccggtggttgtcctgctggccattgccatatttattcggtggaaaaaatcaagggcctttggagcagattctgaacacaaactcgagacgagttcaggaagagtactgggaagatttagaggaaagggaagtggaggcttaaaccttggtaatttctttgcaagccgtaagggctacagtcgaaaagggtttgaccggcttagcactgagggcagtgaccaagagaaagaggatgatggaagtgaatcagaagaggagtattcagcacctctgcctgcgctcgcaccttcctcctcctgaaaaccaagctttgatttagattgagtaagatttacccagaatgtc

SEQ ID NO: 21837 - DNA, 3302 bp, Homo sapiens
  source 1..3302: mol_type = unassigned DNA
aatgtattaaagaacctcagctgggatttgctgaggacaaatgctgtaacgtgttagtcatccattatctgcttctatttttgcaggttctgaatgatgactgacgcgggtttgggtgatacccctcacagcccctgtcattccggagtcataaggcacccgcgcgtctagccccagcgccagggcacgcgagcggcgctggagggaggaaagcttccgcctgcgggccggacaaaagtcccgcctgcccacggctttttgcccgccgctcgtgaccgagacgcctcgccgcggccagctcgctgctctcgctggcggatggtgtgtggccgccgcaggacgcccgccgtgcccgggccatgaagtagcggctgctggcggcgccgctgcccaaccgccagccccagccccgcgctgcgctgcccggtcctctcccggcggggtcgtatcggcgtggacatggctggccgcgtccctagcctgctagttctccttgtttttccaagcagctgtttggctttccgaagcccactttctgtctttaagaggtttaaagaaactaccagaccattttccaatgaatgtcttggtaccaccagacccgtagttcctattgattcatcagattttgcattggatattcgcatgcctggggttacacctaaacagtccgatacatacttctgcatgtctatgcgaataccagtggatgaggaagccttcgtgattgacttcaagcctcgagccagcatggatactgtccatcacatgttactttttggatgcaatatgccttcatccactggaagttactggttttgtgatgaaggaacctgtacagataaagccaatattctgtatgcctgggcgagaaatgctccccctacccggctccccaaaggtgttggattcagagttggaggagagactggaagtaaatactttgtactacaggtacactatggggatattagtgcttttagagataataacaaggactgttctggtgtgtccttacacctcacacgtctgccacagcctttaattgctggcatgtaccttatgatgtctgttgacactgttatcccagcaggagaaaaagtggtgaattctgacatttcatgccattataaaaattatccaatgcatgtctttgcctatagagttcacactcaccatttaggtaaggtagtaagtggatacagagtaagaaatggacagtggacactgattggacggcagagccctcagctgccacaggctttctaccctgtggggcatccagttgatgtaagttttggtgacctactggctgcaagatgtgtattcactggtgaaggaaggacagaagccacacacattggtggcacgtctagtgatgaaatgtgcaacttatacattatgtattacatggaagccaagcatgcagtttctttcatgacctgtacccagaatgtagctccagatatgttcagaaccataccaccagaggccaacattccaattcccgtgaagtctgatatggttatgatgcatgaacatcataaagaaacagaatataaagataagattcctttactacagcagccaaaacgagaagaagaagaagtgttagaccagggtgatttctattcactactttccaagctgctaggagaaagggaagatgttgttcatgtgcacaaatataatcctacagaaaaggcagaatcagagtcagacctggtagctgagattgcaaatgtagtccaaaaaaaggatcttggtcgatctgatgccagagagggtgcagaacatgagaggggtaatgctattcttgtcagagacagaattcacaaattccacagactagtatctaccttgaggccaccagagagcagagttttctcattacagcagcccccacctggtgaaggcacctgggaaccagaacacacaggagatttccacatggaagaggcactggattggcctggagtatacttgttaccaggccaggtttctggggtggctctagaccctaagaataacctggtgattttccacagaggtgaccatgtctgggatggaaactcgtttgacagcaagtttgtttaccagcaaataggactcggaccaattgaagaagacactattcttgtcatagatccaaataatgctgcagtactccagtccagtggaaaaaatctgttttacttgccacatggcttgagtatagataaagatgggaattattgggtcacagacgtggctctccatcaggtgttcaaactggatccaaacaataaagaaggccctgtattaatcctgggaaggagcatgcaaccaggcagtgaccagaatcacttctgtcaacccactgatgtggctgtggatccaggcactggagccatttatgtatcagatggttactgcaacagcaggattgtgcagttttcaccaagtggaaagttcatcacacagtggggagaagagtcttcagggagcagtcctctgccaggccagttcactgttcctcacagcttggctcttgtgcctcttttgggccaattatgtgtggcagaccgggaaaatggtcggatccagtgttttaaaactgacaccaaagaatttgtgagagagattaagcattcatcatttggaagaaatgtatttgcaatttcatatataccaggcttgctctttgcagtgaatgggaagcctcattttggggaccaagaacctgtacaaggatttgtgatgaacttttccaatggggaaattatagacatcttcaagccagtgcgcaagcactttgatatgcctcatgatattgttgcatctgaagatgggactgtgtacattggagatgctcataccaacaccgtgtggaagttcaccttgactgagaaattggaacatcgatcagttaaaaaggctggcattgaggtccaggaaatcaaaggaaagggaagtggaggcttaaaccttggtaatttctttgcaagccgtaagggctacagtcgaaaagggtttgaccggcttagcactgagggcagtgaccaagagaaagaggatgatggaagtgaatcagaagaggagtattcagcacctctgcctgcgctcgcaccttcctcctcctgaaaaccaagctttgatttagattgagtaagatttacccagaatgtcagattcctttccctttagcacgtttaaagttctgtgtatttaattgtaaactgtactagtctgtgtgggactgtacacactttatttacttcgttttggttaagttggcttctgtttctagttgaggagtttcc

SEQ ID NO: 21838 - DNA, 3622 bp, Homo sapiens
  source 1..3622: mol_type = unassigned DNA
gttctgaatgatgactgacgcgggtttgggtgatacccctcacagcccctgtcattccggagtcataaggcacccgcgcgtctagccccagcgccagggcacgcgagcggcgctggagggaggaaagcttccgcctgcgggccggacaaaagtcccgcctgcccacggctttttgcccgccgctcgtgaccgagacgcctcgccgcggccagctcgctgctctcgctggcggatggtgtgtggccgccgcaggacgcccgccgtgcccgggccatgaagtagcggctgctggcggcgccgctgcccaaccgccagccccagccccgcgctgcgctgcccggtcctctcccggcggggtcgtatcggcgtggacatggctggccgcgtccctagcctgctagttctccttgtttttccaagcagctgtttggctttccgaagcccactttctgtctttaagaggtttaaagaaactaccagaccattttccaatgaatgtcttggtaccaccagacccgtagttcctattgattcatcagattttgcattggatattcgcatgcctggggttacacctaaacagtccgatacatacttctgcatgtctatgcgaataccagtggatgaggaagccttcgtgattgacttcaagcctcgagccagcatggatactgtccatcacatgttactttttggatgcaatatgccttcatccactggaagttactggttttgtgatgaaggaacctgtacagataaagccaatattctgtatgcctgggcgagaaatgctccccctacccggctccccaaaggtgttggattcagagttggaggagagactggaagtaaatactttgtactacaggtacactatggggatattagtgcttttagagataataacaaggactgttctggtgtgtccttacacctcacacgtctgccacagcctttaattgctggcatgtaccttatgatgtctgttgacactgttatcccagcaggagaaaaagtggtgaattctgacatttcatgccattataaaaattatccaatgcatgtctttgcctatagagttcacactcaccatttaggtaaggtagtaagtggatacagagtaagaaatggacagtggacactgattggacggcagagccctcagctgccacaggctttctaccctgtggggcatccagttgatgtaagttttggtgacctactggctgcaagatgtgtattcactggtgaaggaaggacagaagccacacacattggtggcacgtctagtgatgaaatgtgcaacttatacattatgtattacatggaagccaagcatgcagtttctttcatgacctgtacccagaatgtagctccagatatgttcagaaccataccaccagaggccaacattccaattcccgtgaagtctgatatggttatgatgcatgaacatcataaagaaacagaatataaagataagattcctttactacagcagccaaaacgagaagaagaagaagtgttagaccaggatttccacatggaagaggcactggattggcctggagtatacttgttaccaggccaggtttctggggtggctctagaccctaagaataacctggtgattttccacagaggtgaccatgtctgggatggaaactcgtttgacagcaagtttgtttaccagcaaataggactcggaccaattgaagaagacactattcttgtcatagatccaaataatgctgcagtactccagtccagtggaaaaaatctgttttacttgccacatggcttgagtatagataaagatgggaattattgggtcacagacgtggctctccatcaggtgttcaaactggatccaaacaataaagaaggccctgtattaatcctgggaaggagcatgcaaccaggcagtgaccagaatcacttctgtcaacccactgatgtggctgtggatccaggcactggagccatttatgtatcagatggttactgcaacagcaggattgtgcagttttcaccaagtggaaagttcatcacacagtggggagaagagtcttcagggagcagtcctctgccaggccagttcactgttcctcacagcttggctcttgtgcctcttttgggccaattatgtgtggcagaccgggaaaatggtcggatccagtgttttaaaactgacaccaaagaatttgtgagagagattaagcattcatcatttggaagaaatgtatttgcaatttcatatataccaggcttgctctttgcagtgaatgggaagcctcattttggggaccaagaacctgtacaaggatttgtgatgaacttttccaatggggaaattatagacatcttcaagccagtgcgcaagcactttgatatgcctcatgatattgttgcatctgaagatgggactgtgtacattggagatgctcataccaacaccgtgtggaagttcaccttgactgagaaattggaacatcgatcagttaaaaaggctggcattgaggtccaggaaatcaaagaagccgaggcagttgttgaaaccaaaatggagaacaaacccacctcctcagaattgcagaagatgcaagagaaacagaaactgatcaaagagccaggctcgggagtgcctgttgttctcattacaacccttctggttattccggtggttgtcctgctggccattgccatatttattcggtggaaaaaatcaagggcctttggagattctgaacacaaactcgagacgagttcaggaagagtactgggaagatttagaggaaagggaagtggaggcttaaaccttggtaatttctttgcaagccgtaagggctacagtcgaaaagggtttgaccggcttagcactgagggcagtgaccaagagaaagaggatgatggaagtgaatcagaagaggagtattcagcacctctgcctgcgctcgcaccttcctcctcctgaaaaccaagctttgatttagattgagtaagatttacccagaatgtcagattcctttccctttagcacgtttaaagttctgtgtatttaattgtaaactgtactagtctgtgtgggactgtacacactttatttacttcgttttggttaagttggcttctgtttctagttgaggagtttcctaaaagttcataacagtgccattgtctttatatgaacatagactagagaaaccgtcctctttttccatcataattctaatctaacaatggaagatttgcccatttacacttttgagactttttggtggatgtaaataaccccattctttgcttgaacacagtattttcccaatagcactttcattgccagtgtctttctttggtgcctttcctgttcagcattcttagcctgtggcagtaaagagaaactttgtgctacatgacgacaaagctgctaaatctcctatttttttaaaatcactaacattatattgcaatgaaggaaataaaaaagtctctatttaaattcttttttaaattttcttcagttggtgtgtttttgggatgtcttatttttagatggttacactgttagaacactattttcagaatctgaatgtaatttgtgtaataaagtgttttcagagca

SEQ ID NO: 21839 - DNA, 3241 bp, Homo sapiens
  source 1..3241: mol_type = unassigned DNA
gttctgaatgatgactgacgcgggtttgggtgatacccctcacagcccctgtcattccggagtcataaggcacccgcgcgtctagccccagcgccagggcacgcgagcggcgctggagggaggaaagcttccgcctgcgggccggacaaaagtcccgcctgcccacggctttttgcccgccgctcgtgaccgagacgcctcgccgcggccagctcgctgctctcgctggcggatggtgtgtggccgccgcaggacgcccgccgtgcccgggccatgaagtagcggctgctggcggcgccgctgcccaaccgccagccccagccccgcgctgcgctgcccggtcctctcccggcggggtcgtatcggcgtggacatggctggccgcgtccctagcctgctagttctccttgtttttccaagcagctgtttggctttccgaagcccactttctgtctttaagaggtttaaagaaactaccagaccattttccaatgaatgtcttggtaccaccagacccgtagttcctattgattcatcagattttgcattggatattcgcatgcctggggttacacctaaacagtccgatacatacttctgcatgtctatgcgaataccagtggatgaggaagccttcgtgattgacttcaagcctcgagccagcatggatactgtccatcacatgttactttttggatgcaatatgccttcatccactggaagttactggttttgtgatgaaggaacctgtacagataaagccaatattctgtatgcctgggcgagaaatgctccccctacccggctccccaaaggtgttggattcagagttggaggagagactggaagtaaatactttgtactacaggtacactatggggatattagtgcttttagagataataacaaggactgttctggtgtgtccttacacctcacacgtctgccacagcctttaattgctggcatgtaccttatgatgtctgttgacactgttatcccagcaggagaaaaagtggtgaattctgacatttcatgccattataaaaattatccaatgcatgtctttgcctatagagttcacactcaccatttaggtaaggtagtaagtggatacagagtaagaaatggacagtggacactgattggacggcagagccctcagctgccacaggctttctaccctgtggggcatccagttgatgtaagttttggtgacctactggctgcaagatgtgtattcactggtgaaggaaggacagaagccacacacattggtggcacgtctagtgatgaaatgtgcaacttatacattatgtattacatggaagccaagcatgcagtttctttcatgacctgtacccagaatgtagctccagatatgttcagaaccataccaccagaggccaacattccaattcccgtgaagtctgatatggttatgatgcatgaacatcataaagaaacagaatataaagataagattcctttactacagcagccaaaacgagaagaagaagaagtgttagaccagggtgatttctattcactactttccaagctgctaggagaaagggaagatgttgttcatgtgcacaaatataatcctacagaaaaggcagaatcagagtcagacctggtagctgagattgcaaatgtagtccaaaaaaaggatcttggtcgatctgatgccagagagggtgcagaacatgagaggggtaatgctattcttgtcagagacagaattcacaaattccacagactagtatctaccttgaggccaccagagagcagagttttctcattacagcagcccccacctggtgaaggcacctgggaaccagaacacacaggagatttccacatggaagaggcactggattggcctggagtatacttgttaccaggccaggtttctggggtggctctagaccctaagaataacctggtgattttccacagaggtgaccatgtctgggatggaaactcgtttgacagcaagtttgtttaccagcaaataggactcggaccaattgaagaagacactattcttgtcatagatccaaataatgctgcagtactccagtccagtggaaaaaatctgttttacttgccacatggcttgagtatagataaagatgggaattattgggtcacagacgtggctctccatcaggtgttcaaactggatccaaacaataaagaaggccctgtattaatcctgggaaggagcatgcaaccaggcagtgaccagaatcacttctgtcaacccactgatgtggctgtggatccaggcactggagccatttatgtatcagatggttactgcaacagcaggattgtgcagttttcaccaagtggaaagttcatcacacagtggggagaagagtcttcagggagcagtcctctgccaggccagttcactgttcctcacagcttggctcttgtgcctcttttgggccaattatgtgtggcagaccgggaaaatggtcggatccagtgttttaaaactgacaccaaagaatttgtgagagagattaagcattcatcatttggaagaaatgtatttgcaatttcatatataccaggcttgctctttgcagtgaatgggaagcctcattttggggaccaagaacctgtacaaggatttgtgatgaacttttccaatggggaaattatagacatcttcaagccagtgcgcaagcactttgatatgcctcatgatattgttgcatctgaagatgggactgtgtacattggagatgctcataccaacaccgtgtggaagttcaccttgactgagaaattggaacatcgatcagttaaaaaggctggcattgaggtccaggaaatcaaagaagccgaggcagttgttgaaaccaaaatggagaacaaacccacctcctcagaattgcagaagatgcaagagaaacagaaactgatcaaagagccaggctcgggagtgcctgttgttctcattacaacccttctggttattccggtggttgtcctgctggccattgccatatttattcggtggaaaaaatcaagggcctttggaggcaaaggaagtggaggcttaaaccttggtaatttctttgcaagccgtaagggctacagtcgaaaagggtttgaccggcttagcactgagggcagtgaccaagagaaagaggatgatggaagtgaatcagaagaggagtattcagcacctctgcctgcgctcgcaccttcctcctcctga

SEQ ID NO: 21840 - DNA, 1449 bp, Homo sapiens
  source 1..1449: mol_type = unassigned DNA
aggtttaaagaaactaccagaccattttccaatgaatgtcttggtaccaccagacccgtagttcctattgattcatcagattttgcattggatattcgcatgcctggggttacacctaaacagtccgatacatacttctgcatgtctatgcgaataccagtggatgaggaagccttcgtgattgacttcaagcctcgagccagcatggatactgtccatcacatgttactttttggatgcaatatgccttcatccactggaagttactggttttgtgatgaaggaacctgtacagataaagccaatattctgtatgcctgggcgagaaatgctccccctacccggctccccaaaggtgttggattcagagttggaggagagactggaagtaaatactttgtactacaggtacactatggggatattagtgcttttagagataataacaaggactgttctggtgtgtccttacacctcacacgtctgccacagcctttaattgctggcatgtaccttatgatgtctgttgacactgttatcccagcaggagaaaaagtggtgaattctgacatttcatgccattataaaaattatccaatgcatgtctttgcctatagagttcacactcaccatttaggtaaggtagtaagtggatacagagtaagaaatggacagtggacactgattggacggcagagccctcagctgccacaggctttctaccctgtggggcatccagttgatgtaagttttggtgacctactggctgcaagatgtgtattcactggtgaaggaaggacagaagccacacacattggtggcacgtctagtgatgaaatgtgcaacttatacattatgtattacatggaagccaagcatgcagtttctttcatgacctgtacccagaatgtagctccagatatgttcagaaccataccaccagaggccaacattccaattcccgtgaagtctgatatggttatgatgcatgaacatcataaagaaacagaatataaagataagattcctttactacagcagccaaaacgagaagaagaagaagtgttagaccagggtgatttctattcactactttccaagctgctaggagaaagggaagatgttgttcatgtgcacaaatataatcctacagaaaaggcagaatcagagtcagacctggtagctgagattgcaaatgtagtccaaaaaaaggatcttggtcgatctgatgccagagagggtgcagaacatgagaggggtaatgctattcttgtcagagacagaattcacaaattccacagactagtatctaccttgaggccaccagagagcagagttttctcattacagcagcccccacctggtgaaggcacctgggaaccagaacacacaggagctagaagagaagatatgaaatgtttccagtgcaaagaaatgataagtgttcaa

SEQ ID NO: 21841 - DNA, 5432 bp, Homo sapiens
  source 1..5432: mol_type = unassigned DNA
gtgaaactactaatgtattaaagaacctcagctgggatttgctgaggacaaatgctgtaacgtgttagtcatccattatctgcttctatttttgcaggttctgaatgatgactgacgcgggtttgggtgatacccctcacagcccctgtcattccggagtcataaggcacccgcgcgtctagccccagcgccagggcacgcgagcggcgctggagggaggaaagcttccgcctgcgggccggacaaaagtcccgcctgcccacggctttttgcccgccgctcgtgaccgagacgcctcgccgcggccagctcgctgctctcgctggcggatggtgtgtggccgccgcaggacgcccgccgtgcccgggccatgaagtagcggctgctggcggcgccgctgcccaaccgccagccccagccccgcgctgcgctgcccggtcctctcccggcggggtcgtatcggcgtggacatggctggccgcgtccctagcctgctagttctccttgtttttccaagcagctgtttggctttccgaagcccactttctgtctttaagaggtttaaagaaactaccagaccattttccaatgaatgtcttggtaccaccagacccgtagttcctattgattcatcagattttgcattggatattcgcatgcctggggttacacctaaacagtccgatacatacttctgcatgtctatgcgaataccagtggatgaggaagccttcgtgattgacttcaagcctcgagccagcatggatactgtccatcacatgttactttttggatgcaatatgccttcatccactggaagttactggttttgtgatgaaggaacctgtacagataaagccaatattctgtatgcctgggcgagaaatgctccccctacccggctccccaaaggtgttggattcagagttggaggagagactggaagtaaatactttgtactacaggtacactatggggatattagtgcttttagagataataacaaggactgttctggtgtgtccttacacctcacacgtctgccacagcctttaattgctggcatgtaccttatgatgtctgttgacactgttatcccagcaggagaaaaagtggtgaattctgacatttcatgccattataaaaattatccaatgcatgtctttgcctatagagttcacactcaccatttaggtaaggtagtaagtggatacagagtaagaaatggacagtggacactgattggacggcagagccctcagctgccacaggctttctaccctgtggggcatccagttgatgtaagttttggtgacctactggctgcaagatgtgtattcactggtgaaggaaggacagaagccacacacattggtggcacgtctagtgatgaaatgtgcaacttatacattatgtattacatggaagccaagcatgcagtttctttcatgacctgtacccagaatgtagctccagatatgttcagaaccataccaccagaggccaacattccaattcccgtgaagtctgatatggttatgatgcatgaacatcataaagaaacagaatataaagataagattcctttactacagcagccaaaacgagaagaagaagaagtgttagaccagggtgatttctattcactactttccaagctgctaggagaaagggaagatgttgttcatgtgcacaaatataatcctacagaaaaggcagaatcagagtcagacctggtagctgagattgcaaatgtagtccaaaaaaaggatcttggtcgatctgatgccagagagggtgcagaacatgagaggggtaatgctattcttgtcagagacagaattcacaaattccacagactagtatctaccttgaggccaccagagagcagagttttctcattacagcagcccccacctggtgaaggcacctgggaaccagaacacacaggagatttccacatggaagaggcactggattggcctggagtatacttgttaccaggccaggtttctggggtggctctagaccctaagaataacctggtgattttccacagaggtgaccatgtctgggatggaaactcgtttgacagcaagtttgtttaccagcaaataggactcggaccaattgaagaagacactattcttgtcatagatccaaataatgctgcagtactccagtccagtggaaaaaatctgttttacttgccacatggcttgagtatagataaagatgggaattattgggtcacagacgtggctctccatcaggtgttcaaactggatccaaacaataaagaaggccctgtattaatcctgggaaggagcatgcaaccaggcagtgaccagaatcacttctgtcaacccactgatgtggctgtggatccaggcactggagccatttatgtatcagatggttactgcaacagcaggattgtgcagttttcaccaagtggaaagttcatcacacagtggggagaagagtcttcagggagcagtcctctgccaggccagttcactgttcctcacagcttggctcttgtgcctcttttgggccaattatgtgtggcagaccgggaaaatggtcggatccagtgttttaaaactgacaccaaagaatttgtgagagagattaagcattcatcatttggaagaaatgtatttgcaatttcatatataccaggcttgctctttgcagtgaatgggaagcctcattttggggaccaagaacctgtacaaggatttgtgatgaacttttccaatggggaaattatagacatcttcaagccagtgcgcaagcactttgatatgcctcatgatattgttgcatctgaagatgggactgtgtacattggagatgctcataccaacaccgtgtggaagttcaccttgactgagaaattggaacatcgatcagttaaaaaggctggcattgaggtccaggaaatcaaagaagccgaggcagttgttgaaaccaaaatggagaacaaacccacctcctcagaattgcagaagatgcaagagaaacagaaactgatcaaagagccaggctcgggagtgcctgttgttctcattacaacccttctggttattccggtggttgtcctgctggccattgccatatttattcggtggaaaaaatcaagggcctttggagattctgaacacaaactcgagacgagttcaggaagagtactgggaagatttagaggaaagggaagtggaggcttaaaccttggtaatttctttgcaagccgtaagggctacagtcgaaaagggtttgaccggcttagcactgagggcagtgaccaagagaaagaggatgatggaagtgaatcagaagaggagtattcagcacctctgcctgcgctcgcaccttcctcctcctgaaaaccaagctttgatttagattgagtaagatttacccagaatgtcagattcctttccctttagcacgtttaaagttctgtgtatttaattgtaaactgtactagtctgtgtgggactgtacacactttatttacttcgttttggttaagttggcttctgtttctagttgaggagtttcctaaaagttcataacagtgccattgtctttatatgaacatagactagagaaaccgtcctctttttccatcataattctaatctaacaatggaagatttgcccatttacacttttgagactttttggtggatgtaaataaccccattctttgcttgaacacagtattttcccaatagcactttcattgccagtgtctttctttggtgcctttcctgttcagcattcttagcctgtggcagtaaagagaaactttgtgctacatgacgacaaagctgctaaatctcctatttttttaaaatcactaacattatattgcaatgaaggaaataaaaaagtctctatttaaattcttttttaaattttcttcagttggtgtgtttttgggatgtcttatttttagatggttacactgttagaacactattttcagaatctgaatgtaatttgtgtaataaagtgttttcagagcattagctgtcagtgtattttccagtttttgcgtatttgcagattttacatacaacttttataataattacacaaacccacaaatattagtgaaacttactcgatgtcttcaactaaaagaaatgtgtgtattgtacaaaatttagaagatactttagccaatataaattaaaaaccagcctgagtttacataaatttgtaaagtcaggctcttctaaaatccaaagagggtttttgcctatatatcaatcagaggataaatactttaataaaaggtaatcacagctaagtggatacctgtgtctcaaattacatatgcaaatgatccatcagtagggatcactaataatagttttccttttaaaaaataatttcagggcaggtacagtggctcaagcctatacttccaggactttgggaggccaagcagaaggattgtgggaggccaagcagaaggattgtttgagcccagaaattcaaggctgcagtgagctatgatcaatccactgtactccagcctaggctacagagtgagatcctttctctaaaataaaatacaatttccatgtatccataggaatatattcatcttttacagtgattgcagattagttttaaaacgtctttttcgtaattcgtcaatgcaagttagtaagaaccagataattttccattttaaaatgataggaatctaaaactctttttcaaaaatgccaacctgtttttccggcatcatagtagttggaataatacagatataattgactaatcataaagtacatgagagtacagaagggaaatttggaaacggtaagtctgctagggcattacaatcctgtcctagcactccacctttattctgccaacctgggttaattaaagatggtagcctggaaagtaatgaatgacattgacttcaggcaatctttccactgattattcttggctgaacttcatttatcgagtcagagaatgcactgcctgagaaatgtcccagaggagtgaatcctaggcctggccacagtagaatcgcctggagaatttaagaaaaaaattgttgggcactcactctttccagtgatctttatttagttggcttacaatggaatacaggtatggttcatgtttttaaatttgtccaggtgtttctattgtgcagtcacagttgaaaaccattgtcttcgagaatagctattctatcttgccagttacaataagtggatagctatattttcacataaattatagtttacagatgtttggagggggaagacaggatctgaggtgttttgatatgactgttagcaccaaaatctgaatgccttaattgttgaatgtgttaaattggataattaaaatgggcataaatgacttattaaaaaagcaaagggaaa

SEQ ID NO: 21842 - DNA, 2898 bp, Homo sapiens
  source 1..2898: mol_type = unassigned DNA
ggcgccgctgcccaaccgccagccccagccccgcgctgcgctgcccggtcctctcccggcggggtcgtatcggcgtggacatggctggccgcgtccctagcctgctagttctccttgtttttccaagcagctgtttggctttccgaagcccactttctgtctttaagaggtttaaagaaactaccagaccattttccaatgaatgtcttggtaccaccagacccgtagttcctattgattcatcagattttgcattggatattcgcatgcctggggttacacctaaacagtccgatacatacttctgcatgtctatgcgaataccagtggatgaggaagccttcgtgattgacttcaagcctcgagccagcatggatactgtccatcacatgttactttttggatgcaatatgccttcatccactggaagttactggttttgtgatgaaggaacctgtacagataaagccaatattctgtatgcctgggcgagaaatgctccccctacccggctccccaaaggtgttggattcagagttggaggagagactggaagtaaatactttgtactacaggtacactatggggatattagtgcttttagagataataacaaggactgttctggtgtgtccttacacctcacacgtctgccacagcctttaattgctggcatgtaccttatgatgtctgttgacactgttatcccagcaggagaaaaagtggtgaattctgacatttcatgccattataaaaattatccaatgcatgtctttgcctatagagttcacactcaccatttaggtaaggtagtaagtggatacagagtaagaaatggacagtggacactgattggacggcagagccctcagctgccacaggctttctaccctgtggggcatccagttgatgtaagttttggtgacctactggctgcaagatgtgtattcactggtgaaggaaggacagaagccacacacattggtggcacgtctagtgatgaaatgtgcaacttatacattatgtattacatggaagccaagcatgcagtttctttcatgacctgtacccagaatgtagctccagatatgttcagaaccataccaccagaggccaacattccaattcccgtgaagtctgatatggttatgatgcatgaacatcataaagaaacagaatataaagataagattcctttactacagcagccaaaacgagaagaagaagaagtgttagaccagggtgatttctattcactactttccaagctgctaggagaaagggaagatgttgttcatgtgcacaaatataatcctacagaaaaggcagaatcagagtcagacctggtagctgagattgcaaatgtagtccaaaaaaaggatcttggtcgatctgatgccagagagggtgcagaacatgagaggggtaatgctattcttgtcagagacagaattcacaaattccacagactagtatctaccttgaggccaccagagagcagagttttctcattacagcagcccccacctggtgaaggcacctgggaaccagaacacacaggagatttccacatggaagaggcactggattggcctggagtatacttgttaccaggccaggtttctggggtggctctagaccctaagaataacctggtgattttccacagaggtgaccatgtctgggatggaaactcgtttgacagcaagtttgtttaccagcaaataggactcggaccaattgaagaagacactattcttgtcatagatccaaataatgctgcagtactccagtccagtggaaaaaatctgttttacttgccacatggcttgagtatagataaagatgggaattattgggtcacagacgtggctctccatcaggtgttcaaactggatccaaacaataaagaaggccctgtattaatcctgggaaggagcatgcaaccaggcagtgaccagaatcacttctgtcaacccactgatgtggctgtggatccaggcactggagccatttatgtatcagatggttactgcaacagcaggattgtgcagttttcaccaagtggaaagttcatcacacagtggggagaagagtcttcagggagcagtcctctgccaggccagttcactgttcctcacagcttggctcttgtgcctcttttgggccaattatgtgtggcagaccgggaaaatggtcggatccagtgttttaaaactgacaccaaagaatttgtgagagagattaagcattcatcatttggaagaaatgtatttgcaatttcatatataccaggcttgctctttgcagtgaatgggaagcctcattttggggaccaagaacctgtacaaggatttgtgatgaacttttccaatggggaaattatagacatcttcaagccagtgcgcaagcactttgatatgcctcatgatattgttgcatctgaagatgggactgtgtacattggagatgctcataccaacaccgtgtggaagttcaccttgactgagaaattggaacatcgatcagttaaaaaggctggcattgaggtccaggaaatcaaagattctgaacacaaactcgagacgagttcaggaagagtactgggaagatttagaggaaagggaagtggaggcttaaaccttggtaatttctttgcaagccgtaagggctacagtcgaaaagggtttgaccggcttagcactgagggcagtgaccaagagaaagaggatgatggaagtgaatcagaagaggagtattcagcacctctgcctgcgctcgcaccttcctcctcctgaaaaccaagctttgatttagattgagtaagatttacccagaatgtcagattcctttccctttagcacgtttaaagttctgtgtatttaattgtaaactgta

SEQ ID NO: 21843 - DNA, 570 bp, Homo sapiens
  source 1..570: mol_type = unassigned DNA
gctaccacaccagattctgaaggggaggagttgtctggaaagaccagagctgggtgctggggatctggagcagctcgggacccgcgctgcagggagctgggatgggagaggttctgaatgatgactgacgcgggtttgggtgatacccctcacagcccctgtcattccggagtcataaggcacccgcgcgtctagccccagcgccagggcacgcgagcggcgctggagggaggaaagcttccgcctgcgggccggacaaaagtcccgcctgcccacggctttttgcccgccgctcgtgaccgagacgcctcgccgcggccagctcgctgctctcgctggcggatggtgtgtggccgccgcaggacgcccgccgtgcccgggccatgaagtagcggctgctggcggcgccgctgcccaaccgccagccccagccccgcgctgcgctgcccggtcctctcccggcggggtcgtatcggcgtggacatggctggccgcgtccctagcctgctagttctccttgtttttccaagcagctgtttggctttccgaagcccactttctgtctttaag

SEQ ID NO: 21844 - DNA, 616 bp, Homo sapiens
  source 1..616: mol_type = unassigned DNA
gatgcatgtatataagcatgcctttgttctcaaaagtctttttctatctgattactgtggtatccagtgctttgtctttgcctctcttcgttttttgttttgtttttttccttgcgccttagccggtcatttgtgtgatgtttacattcagcagagaggttctgaatgatgactgacgcgggtttgggtgatacccctcacagcccctgtcattccggagtcataaggcacccgcgcgtctagccccagcgccagggcacgcgagcggcgctggagggaggaaagcttccgcctgcgggccggacaaaagtcccgcctgcccacggctttttgcccgccgctcgtgaccgagacgcctcgccgcggccagctcgctgctctcgctggcggatggtgtgtggccgccgcaggacgcccgccgtgcccgggccatgaagtagcggctgctggcggcgccgctgcccaaccgccagccccagccccgcgctgcgctgcccggtcctctcccggcggggtcgtatcggcgtggacatggctggccgcgtccctagcctgctagttctccttgtttttccaagcagctgtttggctttccgaagcccactttctgtcttta

SEQ ID NO: 21845 - DNA, 564 bp, Homo sapiens
  source 1..564: mol_type = unassigned DNA
atttttggtgagagaaaggagtgatagaggaagttctgaatgatgactgacgcgggtttgggtgatacccctcacagcccctgtcattccggagtcataaggcacccgcgcgtctagccccagcgccagggcacgcgagcggcgctggagggaggaaagcttccgcctgcgggccggacaaaagtcccgcctgcccacggctttttgcccgccgctcgtgaccgagacgcctcgccgcggccagctcgctgctctcgctggcggatggtgtgtggccgccgcaggacgcccgccgtgcccgggccatgaagtagcggctgctggcggcgccgctgcccaaccgccagccccagccccgcgctgcgctgcccggtcctctcccggcggggtcgtatcggcgtggacatggctggccgcgtccctagcctgctagttctccttgtttttccaagcagctgtttggctttccgaagcccactttctgtctttaagaggtttaaagaaactaccagaccattttccaatgaatgtcttggtaccaccagacccgtagttcctattgat

SEQ ID NO: 21846 - DNA, 528 bp, Homo sapiens
  source 1..528: mol_type = unassigned DNA
aattctgtgatgatccttgggagctcttggttctgaatgatgactgacgcgggtttgggtgatacccctcacagcccctgtcattccggagtcataaggcacccgcgcgtctagccccagcgccagggcacgcgagcggcgctggagggaggaaagcttccgcctgcgggccggacaaaagtcccgcctgcccacggctttttgcccgccgctcgtgaccgagacgcctcgccgcggccagctcgctgctctcgctggcggatggtgtgtggccgccgcaggacgcccgccgtgcccgggccatgaagtagcggctgctggcggcgccgctgcccaaccgccagccccagccccgcgctgcgctgcccggtcctctcccggcggggtcgtatcggcgtggacatggctggccgcgtccctagcctgctagttctccttgtttttccaagcagctgtttggctttccgaagcccactttctgtctttaagaggtttaaagaaactaccagaccattttccaatgaatgt

SEQ ID NO: 21847 - DNA, 609 bp, Homo sapiens
  source 1..609: mol_type = unassigned DNA
acttatcatgaagaatctcacttcatttaaggttctgaatgatgactgacgcgggtttgggtgatacccctcacagcccctgtcattccggagtcataaggcacccgcgcgtctagccccagcgccagggcacgcgagcggcgctggagggaggaaagcttccgcctgcgggccggacaaaagtcccgcctgcccacggctttttgcccgccgctcgtgaccgagacgcctcgccgcggccagctcgctgctctcgctggcggatggtgtgtggccgccgcaggacgcccgccgtgcccgggccatgaagtagcggctgctggcggcgccgctgcccaaccgccagccccagccccgcgctgcgctgcccggtcctctcccggcggggtcgtatcggcgtggacatggctggccgcgtccctagcctgctagttctccttgtttttccaagcagctgtttggctttccgaagcccactttctgtctttaagaggtttaaagaaactaccagaccattttccaatgaatgtcttggtaccaccagacccgtagttcctattgattcatcagattttgcattggatattcgcatgcctggggttacaccta

SEQ ID NO: 21848 - DNA, 575 bp, Homo sapiens
  source 1..575: mol_type = unassigned DNA
gcgcaggttggtgttgttgccgctgctgccgccactgcgaggcggtcagggcaagggtgagggtgggggcgcggaagggggcctgggctcgggatcctgctgccaccaattcctggtgccccaggaggttctgaatgatgactgacgcgggtttgggtgatacccctcacagcccctgtcattccggagtcataaggcacccgcgcgtctagccccagcgccagggcacgcgagcggcgctggagggaggaaagcttccgcctgcgggccggacaaaagtcccgcctgcccacggctttttgcccgccgctcgtgaccgagacgcctcgccgcggccagctcgctgctctcgctggcggatggtgtgtggccgccgcaggacgcccgccgtgcccgggccatgaagtagcggctgctggcggcgccgctgcccaaccgccagccccagccccgcgctgcgctgcccggtcctctcccggcggggtcgtatcggcgtggacatggctggccgcgtccctagcctgctagttctccttgtttttccaagcagctgtttggctttccgaagcccactt

SEQ ID NO: 21849 - DNA, 1739 bp, Homo sapiens
  source 1..1739: mol_type = unassigned DNA
cggtatcgccacttggagaccaccgcgaatgaagtttgcattttcctctgttcttgagcccagcttcttctcgtctcccaccccagcttcccggcattggaagaagggaccgtcctcttccttgtcttggccacccaaatcctggtatcgaaagggttgaacggaccggaagtgtgcagcagcgacgggtccccagctaatcgacgccggaagtagcaattactagacaagcattccgccgccggcttcgctatggcggcaattcccccagattcctggcagccacccaacgtttacttggagaccagcatgggaatcattgtgctggagctgtactggaagcatgctccaaagacctgtaagaactttgctgagttggctcgtcgaggttactacaatggcacaaaattccacagaattatcaaagacttcatgatccaaggaggtgacccaacagggacaggtcgaggtggtgcatctatctatggcaaacagtttgaagatgaacttcatccagacttgaaattcacgggggctggaattctcgcaatggccaatgcggggccagataccaatggcagccagttctttgtgaccctcgcccccacccagtggcttgacggcaaacacaccatttttggccgagtgtgtcagggcataggaatggtgaatcgcgtgggaatggtagaaacaaactcccaggaccgccctgtggacgacgtgaagatcattaaggcatacccttctgggtagacttgctaccctcttgagcagctcttctgagatggccccagtgaaccagcttctagatgacatagaatgacatgtaatgctaaattcattttggctttgcaagtcatgaagcttaggaggcctggcatcttgggtgagttagagatggaagtacattttaataggatgcttcttttctcttcccccagtgcctaggttgccagagcatttgcacaaatgcccctgtttatcaataggtgactacttactacacatgaaccataatgctgcttcttgtgcatgtctgctctgatatacgtcgaacaatgtagcagccactgtcatttctcagtggttttgcctaaccaaacttcttcctaaggagatttatattctggcctacacagcagtccttgatggctgacagccacagaattccaaaccaagtagtgtctgtcagccctcttaactctgtgcacgccctatttcagtcttttacatttgttcttctagggaatgtatgcatctctatatatattttccctctcaaaaccagaacatcaacagtgctgtttctgacacttcagacatcccacgcaaagccacattgaatttttgccaaatgaaaaacacatccaacaatcaagtttctaagaaggtgtcaagtggggaataataataatgtataataatcaagaaattagtttattaaaaggaagcagaagcattgaccattttttcccagagaagaggagaaatctgtagtgagcaaaggacagaccatgaatcctccttgagaagtagtactctcagaaaggagaagcgccactcaagttcttttaacccaagactttagagaaattaggtccaagatttttatatgttcagttgtttatgtataaaaataactttctggattttgtggggaggagcaggagaggaaggaagttaatacctatgtaatacatagaaacttccacaataaaatgccattgatggttgaaatt

SEQ ID NO: 21850 - DNA, 2817 bp, Homo sapiens
  source 1..2817: mol_type = unassigned DNA
ggaagtggtcacggaactcggctgcggctccatggtctgagttgtcagccgttgttttttcgtgctcgctagtcgccgccgccgctccgccatggggaagcgacagcaccaaaaggacaaaatgtacattacctgtgctgaatacactcacttttatggtggcaagaagccagatctcccacaaacaaattttcgtcgtttaccttttgaccactgcagtctctctctgcagccctttgtctacccagtctgcactcccgatggcatcgtctttgacttactgaacattgttccatggcttaagaagtacgggaccaaccccagcaatggagagaagctggacgggaggtccctgatcaagctgaacttttccaagaacagtgaggggaagtaccactgcccagtgctgtttaccgtgttcaccaacaacacccacatcgtggctgtgaggacgaccggcaacgtctacgcctatgaggcagtggaacagctaaatatcaaggccaagaacttccgggacctgctgaccgacgagcccttctcccggcaggacatcatcaccctccaggaccccaccaatttggacaagttcaatgtctctaacttctatcatgtgaagaataacatgaaaataatagacccagatgaagagaaggccaaacaggacccgtcttattatctgaaaaatacaaatgccgagacccgagagaccctgcaggagctctacaaggagttcaaaggggacgagattctggcagccaccatgaaggccccggagaagaagaaagtggacaagctgaacgctgcccactattccacagggaaggtcagcgcttccttcacctccaccgcgatggtcccggagaccacacatgaagcagctgccatcgacgaggatgtgctgcgctaccagtttgtgaagaagaagggctacgtgcggctgcacaccaacaagggcgacctcaacctggagctgcactgcgacctgacaccaaaaacctgcgaaaacttcatcaggctttgcaagaagcattattacgatggcaccatcttccacagatccatccggaactttgtgatccaagggggcgaccccacaggcacaggcacgggtggggagtcatactgggggaagcccttcaaagacgagttccggcccaacctctcgcacacgggccgcggcatcctcagcatggccaactccgggcccaacagcaacaggtctcaattcttcatcacgtttcgctcctgtgcctacctggacaagaagcataccatctttggacgggttgttgggggctttgacgtactgacagccatggagaatgtggagagtgaccccaaaactgaccgccctaaggaggagatccgcattgatgccactacagtgttcgtggacccctatgaggaggccgatgcccagattgcgcaggagcggaagacacagctcaaggtagccccggagaccaaagtgaagagcagccagccccaggcagggagccagggcccccagaccttccgccagggcgtgggcaagtacatcaacccagcagccacgaagcgagcagcagaggaagagccctcaaccagtgccactgtccccatgtccaagaagaagcccagtcggggttttggggacttcagctcctggtagcagcagcaacttgcaggctgtacctctgcccttccttttctcatcaatcactgatgctgaagctgcaggcctgagccctttgtctccctggatgctgggtggcgcctcatctgcatctctgcctcaccccatccactgccacaggctgcctgatgaccactagaggtatgtctgcccctcgtcaccctgctgcacaccaatctgtggcccttcatcatgctaagaacaagaactgcgccatggctggctccttctcttctccagcccatccctctgcagcctgtcatccctgtctgtgaccattggtcgggcccctgggctctagagtgacttttgacgccctccatccctcccgccaggcactgtcctccgcaaggcctggtgcagccctggcagtaactggcttgtaagaggctcagacaccaagctgggcctgcagaggaggggcacagtaggacacagtgactgcccaggtgtccacacacctgtaggcctctgagccagcgtccagggtacaggtgcgggtggtggggatgaaggcctgaccagggagggagaagcaggtttggagaggaccctgtgcccaccctgacagacaccctggctggccctgactgactgtattctctggccacattcaagtcccccattggtgggggcagagaagtaggaccaggccatccttggctccagagctcgaagaccccaagacagccctctgctctcagcggcgccacagagagcctgggctcagccttctgcatcaggacatggcctcgtccactgagggcacgatttaaacatttgacatcagaagctttatttgtaaacctcacacagataaggaccaagggctggcggtgtggccagaggacaggggaagctgaaggccccgtgcttgagctcggcagtcctgctccttgcagtgaagccaccatgggtgaccgtccagcctcacccggtggcctgcacagtgagggaagggcttcagggccatctgctcccagggcaggggacaggccaccaaggacctttggcaaatgaaggtttacatttctgtagtttgtttgttttagagcttaatttgtagttttttagctattaaaaccatttgaatttttaacgacctgatgagggcatcaggtaaattaaaggattttggg

SEQ ID NO: 21851 - DNA, 2574 bp, Homo sapiens
  source 1..2574: mol_type = unassigned DNA
gaactcggctgcggctccatggtctgagttgtcagccgttgttttttcgtgctcgctagtcgccgccgccgctccgccatggggaagcgacagcaccaaaaggacaaaatgtacattacctgtgctgaatacactcacttttatggtggcaagaagccagatctcccacaaacaaattttcgtcgtttaccttttgaccactgcagtctctctctgcagccctttgtctacccagtctgcactcccgatggcatcgtctttgacttactgaacattgttccatggcttaagaagtacgggaccaaccccagcaatggagagaagctggacgggaggtccctgatcaagctgaacttttccaagaacagtgaggggaagtaccactgcccagtgctgtttaccgtgttcaccaacaacacccacatcgtggctgtgaggacgaccggcaacgtctacgcctatgaggcagtggaacagctaaatatcaaggccaagaacttccgggacctgctgaccgacgagcccttctcccggcaggacatcatcaccctccaggaccccaccaatttggacaagttcaatgtctctaacttctatcatgtgaagaataacatgaaaataatagacccagatgaagagaaggccaaacaggacccgtcttattatctgaaaaatacaaatgccgagacccgagagaccctgcaggagctctacaaggagttcaaaggggacgagattctggcagccaccatgaaggccccggagaagaagaaagtggacaagctgaacgctgcccactattccacagggaaggtcagcgcttccttcacctccaccgcgatggtcccggagaccacacatgaagcagctgccatcgacgaggatgtgctgcgctaccagtttgtgaagaagaagggctacgtgcggctgcacaccaacaagggcgacctcaacctggagctgcactgcgacctgacaccaaaaacctgcgaaaacttcatcaggctttgcaagaagcattattacgatggcaccatcttccacagatccatccggaactttgtgatccaagggggcgaccccacaggcacaggcacgggtggggagtcatactgggggaagcccttcaaagacgagttccggcccaacctctcgcacacgggccgcggcatcctcagcatggccaactccgggcccaacagcaacaggtctcaattcttcatcacgtttcgctcctgtgcctacctggacaagaagcataccatctttggacgggttgttgggggctttgacgtactgacagccatggagaatgtggagagtgaccccaaaactgaccgccctaaggaggagatccgcattgatgccactacagtgttcgtggacccctatgaggaggccgatgcccagattgcgcaggagcggaagacacagctcaaggtagccccggagaccaaagtgaagagcagccagccccaggcagggagccagggcccccagaccttccgccagggcgtgggcaagtacatcaacccagcagccacgaagcgagcagcagaggaagagccctcaaccagtgccactgtccccatgtccaagaagaagcccagtcggggttttggggacttcagctcctggtagcagcaggttggccgctgtggaccttggtggggttgcagggctgggggcccatgtccacatctccatttccagcctttctagcctgccctctgctgccagccaataaattgcttgcctgctgcctgcatcccctttcctggcccctgggagcccacagccttcccatcccttaacctgttgccaagggccttggccctgtttccaggacctggcccagccagagcccactgctgggaccttcaagcacaaggcctgccctacacccaggctggtgcctcaggcctcccctctagtaggcaggccaggttagtgaggaaggactgtgtctccagattgtggtttcctctttaagacagggtcttgctctgttgcccaggctccagtgcagtggtgtgatcatggctcactgcagcctcgacctcctgggctcaagcaatcctcctgcctcagcctcgcaagtagctgggactacagccgtgcaccactacatccagctgtatatgtctggttttcttacccctacttctgtcatcttctcagggacagcctatttatacaaccagtgtggtcccctgaccaacgccattacctgggacaagttttcagaccccagacttactgagcctaagcctctgcagggtgggcttctcggtctgttttgacaaaacttcaggggcttctgaaggctggtgttggacggcagcattgagtttcctgccgtgccctgcctgagctctcagggccctgctcacctgctctggctgtgaaccacctgggcttcatctcaagcctgcctggcgtctctgtgcccctgtgagaatcttgaggggacccacactgggttgaggccagtgtctcctgctgtgagaacaagtggatgtccctctccccgccctcctgctgaagtggccttgctgctctcaggcccggcca

SEQ ID NO: 21852 - DNA, 3875 bp, Homo sapiens
  source 1..3875: mol_type = unassigned DNA
atggtctgagttgtcagccgttgttttttcgtgctcgctagtcgccgccgccgctccgccatggggaagcgacagcaccaaaaggacaaaatgtacattacctgtgctgaatacactcacttttatggtggcaagaagccagatctcccacaaacaaattttcgtcgtttaccttttgaccactgcagtctctctctgcagccctttgtctacccagtctgcactcccgatggcatcgtctttgacttactgaacattgttccatggcttaagaagtacgggaccaaccccagcaatggagagaagctggacgggaggtccctgatcaagctgaacttttccaagaacagtgaggggaagtaccactgcccagtgctgtttaccgtgttcaccaacaacacccacatcgtggctgtgaggacgaccggcaacgtctacgcctatgaggcagtggaacagctaaatatcaaggccaagaacttccgggacctgctgaccgacgagcccttctcccggcaggacatcatcaccctccaggaccccaccaatttggacaagttcaatgtctctaacttctatcatgtgaagaataacatgaaaataatagacccagatgaagagaaggccaaacaggacccgtcttattatctgaaaaatacaaatgccgagacccgagagaccctgcaggagctctacaaggagttcaaaggggacgagattctggcagccaccatgaaggccccggagaagaagaaagtggacaagctgaacgctgcccactattccacagggaaggtcagcgcttccttcacctccaccgcgatggtcccggagaccacacatgaagcagctgccatcgacgaggatgtgctgcgctaccagtttgtgaagaagaagggctacgtgcggctgcacaccaacaagggcgacctcaacctggagctgcactgcgacctgacaccaaaaacctgcgaaaacttcatcaggctttgcaagaagcattattacgatggcaccatcttccacagatccatccggaactttgtgatccaagggggcgaccccacaggcacaggcacgggtggggagtcatactgggggaagcccttcaaagacgagttccggcccaacctctcgcacacgggccgcggcatcctcagcatggccaactccgggcccaacagcaacaggtctcaattcttcatcacgtttcgctcctgtgcctacctggacaagaagcataccatctttggacgggttgttgggggctttgacgtactgacagccatggagaatgtggagagtgaccccaaaactgaccgccctaaggaggagatccgcattgatgccactacagtgttcgtggacccctatgaggaggccgatgcccagattgcgcaggagcggaagacacagctcaaggtagccccggagaccaaagtgaagagcagccagccccaggcagggagccagggcccccagaccttccgccagggcgtgggcaagtacatcaacccagcagccacgaagcgagcagcagaggaagagccctcaaccagtgccactgtccccatgtccaagaagaagcccagtcggggttttggggacttcagctcctggtagcagcagggacagcctatttatacaaccagtgtggtcccctgaccaacgccattacctgggacaagttttcagaccccagacttactgagcctaagcctctgcagggtgggcttctcggtctgttttgacaaaacttcaggggcttctgaaggctggtgttggacggcagcattgagtttcctgccgtgccctgcctgagctctcagggccctgctcacctgctctggctgtgaaccacctgggcttcatctcaagcctgcctggcgtctctgtgcccctgtgagaatcttgaggggacccacactgggttgaggccagtgtctcctgctgtgagaacaagtggatgtccctctccccgccctcctgctgaagtggccttgctgctctcaggcccggccactgggctccaagactctgctcctcctgtcagtcactgactctgatggccttgggccagctgcatcagcagcccttaaagaaagacccctccctcaacccccatttttctgttaaatgtgcccctggctggctttttcttcgtcttcagcccaggccagtggtcagtgttctcatgtcatggactctccttgcctgacacttgcctcttgggctccctgttgccctcaggccaccccccacttctagttcttcacactaagccctaacttaggccttgttcttggttttctcatttttgttgccccaaatcttgaacctgtcagcaacttgcaggctgtacctctgcccttccttttctcatcaatcactgatgctgaagctgcaggcctgagccctttgtctccctggatgctgggtggcgcctcatctgcatctctgcctcaccccatccactgccacaggctgcctgatgaccactagaggtatgtctgcccctcgtcaccctgctgcacaccaatctgtggcccttcatcatgctaagaacaagaactgcgccatggctggctccttctcttctccagcccatccctctgcagcctgtcatccctgtctgtgaccattggtcgggcccctgggctctagagtgacttttgacgccctccatccctcccgccaggcactgtcctccgcaaggcctggtgcagccctggcagtaactggcttgtaagaggctcagacaccaagctgggcctgcagaggaggggcacagtaggacacagtgactgcccaggtgtccacacacctgtaggcctctgagccagcgtccagggtacaggtgcgggtggtggggatgaaggcctgaccagggagggagaagcaggtttggagaggaccctgtgcccaccctgacagacaccctggctggccctgactgactgtattctctggccacattcaagtcccccattggtgggggcagagaagtaggaccaggccatccttggctccagagctcgaagaccccaagacagccctctgctctcagcggcgccacagagagcctgggctcagccttctgcatcaggacatggcctcgtccactgagggcacgatttaaacatttgacatcagaagctttatttgtaaacctcacacagataaggaccaagggctggcggtgtggccagaggacaggggaagctgaaggccccgtgcttgagctcggcagtcctgctccttgcagtgaagccaccatgggtgaccgtccagcctcacccggtggcctgcacagtgagggaagggcttcagggccatctgctcccagggcaggggacaggccaccaaggacctttggcaaatgaaggtttacatttctgtagtttgtttgttttagagcttaatttgtagttttttagctattaaaaccatttgaatttttaacgacctgatgagggcatcaggtaaattaaaggattttgggaagattcttattttcaattctaatatctgacagatgccatcaagaataagcattaaggtataaaaaatactgtgtgtataaaacaatgccaaaccacattcctacagcaaatgcactgtgccatttataaccctgacatcacctcccaaggctctcaaggaagatttattttaaataacttaaatagaagtcctagatgatattgtttaggaatttaagagggtggtggatatggtcctgtgaatagcacttcccctgaagccagctcatggtctgttcatttggtttaaaaatgagcttgtattttgcagaagcccaacaaaaaaaaagtgataaaagtgttgttggtataaattacaaaaaaaaaaaaaaa

SEQ ID NO: 21853 - DNA, 2709 bp, Homo sapiens
  source 1..2709: mol_type = unassigned DNA
gtttccggggcgcgccgcggaacccggaagtggtcacggaactcggctgcggctccatggtctgagttgtcagccgttgttttttcgtgctcgctagtcgccgccgccgctccgccatggggaagcgacagcaccaaaaggacaaaatgtacattacctgtgctgaatacactcacttttatggtggcaagaagccagatctcccacaaacaaattttcgtcgtttaccttttgaccactgcagtctctctctgcagccctttgtctacccagtctgcactcccgatggcatcgtctttgacttactgaacattgttccatggcttaagaagtacgggaccaaccccagcaatggagagaagctggacgggaggtccctgatcaagctgaacttttccaagaacagtgaggggaagtaccactgcccagtgctgtttaccgtgttcaccaacaacacccacatcgtggctgtgaggacgaccggcaacgtctacgcctatgaggcagtggaacagctaaatatcaaggccaagaacttccgggacctgctgaccgacgagcccttctcccggcaggacatcatcaccctccaggaccccaccaatttggacaagttcaatgtctctaacttctatcatgtgaagaataacatgaaaataatagacccagatgaagagaaggccaaacaggacccgtcttattatctgaaaaatacaaatgccgagacccgagagaccctgcaggagctctacaaggagttcaaaggggacgagattctggcagccaccatgaaggccccggagaagaagaaagtggacaagctgaacgctgcccactattccacagggaaggtcagcgcttccttcacctccaccgcgatggtcccggagaccacacatgaagcagctgccatcgacgaggatgtgctgcgctaccagtttgtgaagaagaagggctacgtgcggctgcacaccaacaagggcgacctcaacctggagctgcactgcgacctgacaccaaaaacctgcgaaaacttcatcaggctttgcaagaagcattattacgatggcaccatcttccacagatccatccggaactttgtgatccaagggggcgaccccacaggcacaggcacgggtggggagtcatactgggggaagcccttcaaagacgagttccggcccaacctctcgcacacgggccgcggcatcctcagcatggccaactccgggcccaacagcaacaggtctcaattcttcatcacgtttcgctcctgtgcctacctggacaagaagcataccatctttggacgggttgttgggggctttgacgtactgacagccatggagaatgtggagagtgaccccaaaactgaccgccctaaggaggagatccgcattgatgccactacagtgttcgtggacccctatgaggaggccgatgcccagattgcgcaggagcggaagacacagctcaaggtagccccggagaccaaagtgaagagcagccagccccaggcagggagccagggcccccagaccttccgccagggcgtgggcaagtacatcaacccagcagccaccgagcagcagaggaagagccctcaaccagtgccactgtccccatgtccaagaagaagcccagtcggggttttggggacttcagctcctggtagcagcaggctgcctgatgaccactagaggtatgtctgcccctcgtcaccctgctgcacaccaatctgtggcccttcatcatgctaagaacaagaactgcgccatggctggctccttctcttctccagcccatccctctgcagcctgtcatccctgtctgtgaccattggtcgggcccctgggctctagagtgacttttgacgccctccatccctcccgccaggcactgtcctccgcaaggcctggtgcagccctggcagtaactggcttgtaagaggctcagacaccaagctgggcctgcagaggaggggcacagtaggacacagtgactgcccaggtgtccacacacctgtaggcctctgagccagcgtccagggtacaggtgcgggtggtggggatgaaggcctgaccagggagggagaagcaggtttggagaggaccctgtgcccaccctgacagacaccctggctggccctgactgactgtattctctggccacattcaagtcccccattggtgggggcagagaagtaggaccaggccatccttggctccagagctcgaagaccccaagacagccctctgctctcagcggcgccacagagagcctgggctcagccttctgcatcaggacatggcctcgtccactgagggcacgatttaaacatttgacatcagaagctttatttgtaaacctcacacagataaggaccaagggctggcggtgtggccagaggacaggggaagctgaaggccccgtgcttgagctcggcagtcctgctccttgcagtgaagccaccatgggtgaccgtccagcctcacccggtggcctgcacagtgagggaagggcttcagggccatctgctcccagggcaggggacaggccaccaaggacctttggcaaatgaaggtttacatttctgtagtttgtttgttttagagcttaatttgtagttttttagctattaaaaccatttgaatttttaacgacctgatgagggcatcaggtaaattaaaggattttgggaagattctt

SEQ ID NO: 21854 - DNA, 1870 bp, Homo sapiens
  source 1..1870: mol_type = unassigned DNA
cgtgctcgctagtcgccgccgccgctccgccatggggaagcgacagcaccaaaaggacaaaatgtacattacctgtgctgaatacactcacttttatggtggcaagaagccagatctcccacaaacaaattttcgtcgtttaccttttgaccactgcaggaacattgttccatggcttaagaagtacgggaccaaccccagcaatggagagaagctggacgggaggtccctgatcaagctgaacttttccaagaacagtgaggggaagtaccactgcccagtgctgtttaccgtgttcaccaacaacacccacatcgtggctgtgaggacgaccggcaacgtctacgcctatgaggcagtggaacagctaaatatcaaggccaagaacttccgggacctgctgaccgacgagcccttctcccggcaggacatcatcaccctccaggaccccaccaatttggacaagttcaatgtctctaacttctatcatgtgaagaataacatgaaaataatagacccagatgaagagaaggccaaacaggacccgtcttattatctgaaaaatacaaatgccgagacccgagagaccctgcaggagctctacaaggagttcaaaggggacgagattctggcagccaccatgaaggccccggagaagaagaaagtggacaagctgaacgctgcccactattccacagggaaggtcagcgcttccttcacctccaccgcgatggtcccggagaccacacatgaagcagctgccatcgacgaggatgtgctgcgctaccagtttgtgaagaagaagggctacgtgcggctgcacaccaacaagggcgacctcaacctggagctgcactgcgacctgacaccaaaaacctgcgaaaacttcatcaggctttgcaagaagcattattacgatggcaccatcttccacagatccatccggaactttgtgatccaagggggcgaccccacaggcacaggcacgggtggggagtcatactgggggaagcccttcaaagacgagttccggcccaacctctcgcacacgggccgcggcatcctcagcatggccaactccgggcccaacagcaacaggtctcaattcttcatcacgtttcgctcctgtgcctacctggacaagaagcataccatctttggacgggttgttgggggctttgacgtactgacagccatggagaatgtggagagtgaccccaaaactgaccgccctaaggaggagatccgcattgatgccactacagtgttcgtggacccctatgaggaggccgatgcccagattgcgcaggagcggaagacacagctcaaggaagcgagcagcagaggaagagccctcaaccagtgccactgtccccatgtccaagaagaagcccagtcggggttttggggacttcagctcctggtagcagcagcaacttgcaggctgtacctctgcccttccttttctcatcaatcactgatgctgaagctgcaggcctgagccctttgtctccctggatgctgggtggcgcctcatctgcatctctgcctcaccccatccactgccacaggctgcctgatgaccactagaggtatgtctgcccctcgtcaccctgctgcacaccaatctgtggcccttcatcatgctaagaacaagaactgcgccatggctggctccttctcttctccagcccatccctctgcagcctgtcatccctgtctgtgaccattggtcgggcccctgggctctagagtgacttttgacgccctccatccctcccgccaggcactgtcctccgcaaggcctggtgcagccctggcagtaactggcttgtaagaggctcagacaccaagctgggcctgcagagga

SEQ ID NO: 21855 - DNA, 1841 bp, Homo sapiens
  source 1..1841: mol_type = unassigned DNA
gaactcggctgcggctccatggtctgagttgtcagccgttgttttttcgtgctcgctagtcgccgccgccgctccgccatggggaagcgacagcaccaaaaggacaaaatgtacattacctgtgctgaatacactcacttttatggtggcaagaagccagatctcccacaaacaaattttcgtcgtttaccttttgaccactgcagtctctctctgcagccctttgtctacccagtctgcactcccgatggcatcgtctttgacttactgaacattgttccatggcttaagaagtacgggaccaaccccagcaatggagagaagctggacgggaggtccctgatcaagctgaacttttccaagaacagtgaggggaagtaccactgcccagtgctgtttaccgtgttcaccaacaacacccacatcgtggctgtgaggacgaccggcaacgtctacgcctatgaggcagtggaacagctaaatatcaaggccaagaacttccgggacctgctgaccgacgagcccttctcccggcaggacatcatcaccctccaggaccccaccaatttggacaagttcaatgtctctaacttctatcatgtgaagaataacatgaaaataatagacccagatgaagagaaggccaaacaggacccgtcttattatctgaaaaatacaaatgccgagacccgagagaccctgcaggagctctacaaggagttcaaaggggacgagattctggcagccaccatgaaggccccggagaagaagaaagtggacaagctgaacgctgcccactattccacagggaaggtcagcgcttccttcacctccaccgcgatggtcccggagaccacacatgaagcagctgccatcgacgaggatgtgctgcgctaccagtttgtgaagaagaagggctacgtgcggctgcacaccaacaagggcgacctcaacctggagctgcactgcgacctgacaccaaaaacctgcgaaaacttcatcaggctttgcaagaagcattattacgatggcaccatcttccacagatccatccggaactttgtgatccaagggggcgaccccacaggcacaggcacgggtggggagtcatactgggggaagcccttcaaagacgagttccggcccaacctctcgcacacgggccgcggcatcctcagcatggccaactccgggcccaacagcaacaggtctcaattcttcatcacgtttcgctcctgtgcctacctggacaagaagcataccatctttggacgggttgttgggggctttgacgtactgacagccatggagaatgtggagagtgaccccaaaactgaccgccctaaggaggagatccgcattgatgccactacagtgttcgtggacccctatgaggaggccgatgcccagattgcgcaggagcggaagacacagctcaaggtagccccggagaccaaagtgaagagcagccagccccaggcagggagccagggcccccagaccttccgccagggcgtgggcaagtacatcaacccagcagccacgaagcgagcagcagaggaagagccctcaaccagtgccactgtccccatgtccaagaagaagcccagtcggggttttggggacttcagctcctggtagcagcaggctccagtgcagtggtgtgatcatggctcactgcagcctcgacctcctgggctcaagcaatcctcctgcctcagcctcgcaagtagctgggactacagccgtgcaccactacatccagctgtatatgtctggttttcttacccctacttctgtcatcttctcagggacagcctatttatacaaccagtgtggtc

SEQ ID NO: 21856 - DNA, 2232 bp, Homo sapiens
  source 1..2232: mol_type = unassigned DNA
cccggggtttgtagcggaggaggagcgggcgccatggcggttctactggagaccactttaggcgacgtcgtcatcgacttgtacaccgaagaacggccgcgtgcctgcttgaatttcttgaaactgtgcaaaataaaatattacaattattgccttattcacaatgtacagagggattttatcatacaaactggcgatcctacagggactggccgtggaggagagtctatctttggccaactgtatggtgatcaagcaagcttttttgaggcagaaaaagtcccaagaattaagcacaagaagaaaggcacagtgtccatggtgaataatggcagtgatcaacatggatctcagtttcttatcaccacaggagaaaatctagattatcttgatggtgtccatacggtgtttggtgaggtgacagaaggcatggacataattaagaaaattaatgagacctttgttgacaaggactttgtaccatatcaggatatcaggataaatcatacggtgattttagatgatccatttgatgaccctcctgatttattaatccctgatcgatcaccagaacctacaagggaacaattagatagtggtcgaataggagcagatgaagaaattgatgatttcaaaggaagatcagctgaggaagtagaagaaataaaggcagaaaaagaggctaaaactcaggctatacttttggagatggtgggagacctacctgatgcagatattaaacctccagaaaatgtactgtttgtgtgtaaattgaacccagtgaccacagatgaggatctggaaataatattctctagatttgggccaataagaagttgtgaagttatccgagactggaagacaggagagtccctctgttacgcttttattgaatttgaaaaggaagaagattgtgagaaagcattcttcaaaatggacaatgtgcttatagatgacagaagaatacatgtggattttagccagtcggttgcaaaggttaaatggaaaggaaaaggtgggaaatacaccaagagtgatttcaaggagtatgaaaaagaacaggataaaccacctaatttggttctgaaagataaagtaaagcccaaacaggatacaaaatacgatcttatattagatgagcaggccgaagactcaaaatcaagtcactcacacacaagtaaaaaacacaagaagaaaacccatcactgttctgaagagaaagaagatgaggactacatgccaatcaaaaatactaatcaggatatctatagagaaatggggtttggtcactatgaagaagaagaaagctgttgggagaaacaaaagagtgaaaagagagaccgaactcagaaccgaagtcgtagccgatctcgagagagggatggccattatagtaatagtcataaatcaaaataccaaacagatctttatgaaagagaaaggagtaaaaagagagaccgaagcagaagtccaaagaagtccaaagataaagaaaaatctaagtatagatgaaagatgaagaggcagaattgagaggctaacatatttactcttgtctaacttaagagtgccaggaaagcagatgcttagattttgtgtcaaagcttgttatttttttcatactaggattatggtctttagattaatactgattatatagagcacggaaagataaagaattgaacattttctttgtatacttttttacactaattttattgttatacataaatggtagtcttcatttttgaagtcttacattttcactctttttttaatgaagtatttcatactacaaaaatacataaacgtatatataaagggataataaatgtaaatatctgtgtactcatcagccagcttaagatacagatgttgtcgacattttagaagttccctaaggccctctccctctcaaataattatttggaattttgtgtttgtcatttgtctattatagttttacaacatacgtatgtatctgtaagtgaaatgttaattttgtatgtttctgaattttatataaatggcaaaatgtttacttctgtgactttctttcatttttattgctatatagtattatataaatatactacaacttattcattcttgatggacatttgagttttgtttatttgtttttgctgttgaaacaatgctgctgtgaacattgtatctagcagttatattgcttgatatattgataaaataatgccaaatttgtgttctgaa

SEQ ID NO: 21857 - DNA, 1089 bp, Homo sapiens
  source 1..1089: mol_type = unassigned DNA
acacactatctcgttagatctttaaaaggtctcttaaagtctcacttctctcaaacttaggtctttcagatcttaaactcaggtcccaaatcctcagttttccactggacttaatgttctcatgggctcaatggctctacttgaacacggcatttgtgtgtaatttatttgaaagtttgatgttgtaatattcacatatatcgttaggtggcagcatgtggctacctagcaaaaatggatgtctgatttcaaattagtaatggagatggaattactatgattcttttgttccctttctctgtctctcgatatatgccatttataaaatagctcttatgctttttataaaataattattgttcttggttaggtggtttttttactaagctctttttttcttttcttaataaataggtgggaaatacaccaagagtgatttcaaggagtatgaaaaagaacaggataaaccacctaatttggttctgaaagataaagtaaagcccaaacaggatacaaaatacgatcttatattagatgagcaggccgaagactcaaaatcaagtcactcacacacaagtaaaaaacacaagaagaaaacccatcactgttctgaagagaaagaagatgaggactacatgccaatcaaaaatactaatcaggatatctatagagaaatggggtttggtcactatgaagaagaagaaagctgttgggagaaacaaaagagtgaaaagagagaccgaactcagaaccgaagtcgtagccgatctcgagagagggatggccattatagtaatagtcataaatcaaaataccaaacagatctttatgaaagagaaaggagtaaaaagagagaccgaagcagaagtccaaagaagtccaaagataaagaaaaatctaagtatagatgaaagatgaagaggcagaattgagaggctaacatatttactcttgtctaacttaagagtgccaggaaagcagatgcttagattttgtgtcaaagcttgttatttttttcatactaggattatggtctttagattaatactgattatatagagcacggaaagataaagaattgaacatttt

SEQ ID NO: 21858 - DNA, 827 bp, Homo sapiens
  source 1..827: mol_type = unassigned DNA
gttttgcagacgccaccgccgaggaaaaccgtgtactattagccatggtcaaccccaccgtgttcttcgacattgccgtcgacggcgagcccttgggccgcgtctcctttgaggtaaggggcctggataccaagaagtgactgctcatctaatccataaagctatgttaacagattggaggtagtagcattttcattacaagtgactaaaagaacagcagaaaattttcgtgctctgagcactggagagaaaggatttggttataagggttcctgctttcacagaattattccagggtttatgtgtcagggtggtgacttcacacgccataatggcactggtggcaagtccatctatggggagaaatttgaagatgagaacttcatcctaaagcatacgggtcctggcatcttgtccatggcaaatgctggacccaacacaaatggttcccagtttttcatctgcactgccaagactgagtggttggatggcaagcatgtggtgtttggcaaagtgaaagaaggcatgaatattgtggaggccatggagcgctttgggtccaggaatggcaagaccagcaagaagatcaccattgctgactgtggacaactcgaataagtttgacttgtgttttatcttaaccaccagatcattccttctgtagctcaggagagcacccctccaccccatttgctcgcagtatcctagaatctttgtgctctcgctgcagttccctttgggttccatgttttccttgttccctcccatgcctagctggattgcagagttaagtttatgattatgaaataaaaactaaataacaattg

SEQ ID NO: 21859 - DNA, 1412 bp, Homo sapiens
  source 1..1412: mol_type = unassigned DNA
gttttgcagacgccaccgccgaggaaaaccgtgtactattagccatggtcaaccccaccgtgttcttcgacattgccgtcgacggcgagcccttgggccgcgtctcctttgagctgtttgcagacaaggtcccaaagacagcagaaaattttcgtgctctgagcactggagagaaaggatttggttataagggttcctgctttcacagaattattccagggtttatgtgtcagggtggtgacttcacacgccataatggcactggtggcaagtccatctgcactgccaagactgagtggttggatggcaagcatgtggtgtttggcaaagtgaaagaaggcatgaatattgtggaggccatggagcgctttgggtccaggaatggcaagaccagcaagaagatcaccattgctgactgtggacaactcgaataagtttgacttgtgttttatcttaaccaccagatcattccttctgtagctcaggagagcacccctccaccccatttgctcgcagtatcctagaatctttgtgctctcgctgcagttccctttgggttccatgttttccttgttccctcccatgcctagctggattgcagagttaagtttatgattatgaaataaaaactaaataacaattgtcctcgtttgagttaagagtgttgatgtaggctttattttaagcagtaatgggttacttctgaaacatcacttgtttgcttaattctacacagtacttagattttttttactttccagtcccaggaagtgtcaatgtttgttgagtggaatattgaaaatgtaggcagcaactgggcatggtggctcactgtctgtaatgtattacctgaggcagaagaccacctgagggtaggagtcaagatcagcctgggcaacatagtgagacgctgtctctacaaaaaataattagcctggcctggtggtgcatgcctagtcctagctgatctggaggctgacgtgggaggattgcttgagcctagagtgagctattatcatgccactgtacagcctgggtgttcacagatcttgtgtctcaaaggtaggcagaggcaggaaaagcaaggagccagaattaagaggttgggtcagtctgcagtgagttcatgcatttagaggtgttcttcaagatgactaatgtcaaaaattgagacatctgttgcggttttttttttttttttttcccctggaatgcagtggcgtgatctcagctcactgcagcctccgcctcctgggttcaagtgattctagtgcctcagcctcctgagtagctgggataatgggcgtgtgccaccatgcccagctaatttttgtatttttagtatagatggggtttcatcattttgaccaggctggtctcaaactcttgacctcagctgatgcgcctgcctt

SEQ ID NO: 21860 - DNA, 2238 bp, Homo sapiens
  source 1..2238: mol_type = unassigned DNA
cgttttgcagacgccaccgccgaggaaaaccgtgtactattagccatggtcaaccccaccgtgttcttcgacattgccgtcgacggcgagcccttgggccgcgtctcctttgagctgtttgcagacaaggtcccaaagacagcagaaaattttcgtgctctgagcactggagagaaaggatttggttataagggttcctgctttcacagaattattccagggtttatgtgtcagggtggtgacttcacacgccataatggcactggtggcaagtccatctatggggagaaatttgaagatgagaacttcatcctaaagcatacgggtcctggcatcttgtccatggcaaatgctggacccaacacaaatggttcccagtttttcatctgcactgccaagactgagtggttggatggcaagcatgtggtgtttggcaaagtgaaagaaggcatgaatattgtggaggccatggagcgctttgggtccaggaatggcaagaccagcaagaagatcaccattgctgactgtggacaactcgaataagtttgacttgtgttttatcttaaccaccagatcattccttctgtagctcaggagagcacccctccaccccatttgctcgcagtatcctagaatctttgtgctctcgctgcagttccctttgggttccatgttttccttgttccctcccatgcctagctggattgcagagttaagtttatgattatgaaataaaaactaaataacaattgtcctcgtttgagttaagagtgttgatgtaggctttattttaagcagtaatgggttacttctgaaacatcacttgtttgcttaattctacacagtacttagattttttttactttccagtcccaggaagtgtcaatgtttgttgagtggaatattgaaaatgtaggcagcaactgggcatggtggctcactgtctgtaatgtattacctgaggcagaagaccacctgagggtaggagtcaagatcagcctgggcaacatagtgagacgctgtctctacaaaaaataattagcctggcctggtggtgcatgcctagtcctagctgatctggaggctgacgtgggaggattgcttgagcctagagtgagctattatcatgccactgtacagcctgggtgttcacagatcttgtgtctcaaaggtaggcagaggcaggaaaagcaaggagccagaattaagaggttgggtcagtctgcagtgagttcatgcatttagaggtgttcttcaagatgactaatgtcaaaaattgagacatctgttgcggttttttttttttttttttcccctggaatgcagtggcgtgatctcagctcactgcagcctccgcctcctgggttcaagtgattctagtgcctcagcctcctgagtagctgggataatgggcgtgtgccaccatgcccagctaatttttgtatttttagtatagatggggtttcatcattttgaccaggctggtctcaaactcttgacctcagctgatgcgcctgccttggcctcccaaactgctgagattacagatgtgagccaccgcaccctacctcattttctgtaacaaagctaagcttgaacactgttgatgttcttgagggaagcatattgggctttaggctgtaggtcaagtttatacatcttaattatggtggaattcctatgtagagtctaaaaagccaggtacttggtgctacagtcagtctccctgcagagggttaaggcgcagactacctgcagtgaggaggtactgcttgtagcatatagagcctctccctagctttggttatggaggctttgaggttttgcaaacctgaccaatttaagccataagatctggtcaaagggatacccttcccactaaggacttggtttctcaggaaattatatgtacagtgcttgctggcagttagatgtcaggacaatctaagctgagaaaaccccttctctgcccaccttaacagacctctagggttcttaacccagcaatcaagtttgcctatcctagaggtggcggatttgatcatttggtgtgttgggcaatttttgttttactgtctggttccttctgcgtgaattaccaccaccaccacttgtgcatctcagtcttgtgtgttgtctggttacgtattccctgggtgataccattcaatgtcttaatgtacttgtggctcagacctgagtgcaaggtggaaataaacatcaaacatcttttcatta

SEQ ID NO: 21861 - DNA, 785 bp, Homo sapiens
  source 1..785: mol_type = unassigned DNA
actataaagacagtaaaaagatcagtggttatctttgcagatgccaccatcactgtgagccctgtactatcagccatggtcaactccgtcgtcttttttgacatcaccgtcgacggcaagcccttgggccgcatctccatcaaactgtttgcagacaagattctaaagacagcggaaaactttcgtgctctgagcactggagagaaaggatttcgttataagggttcctgctttcacagaattattccagggtttatgtgtcagggtggtgacttcacacgccataatggcactggtgacaagtccatctatggggagaaatttgatgatgagaacctcatccgaaagcatacaggttctggcatcttgtccatggcaaatgctggacccaacacaaatggttcccagtttttcatctgtgctgccaagactgagtggttggatggcaagcatgtggcctttggcaaggtgaaagaacgtgtgaatattgtggaagccatggagcactttgggtacaggaatagcaagaccagcaagaagatcaccattgctgactgtggacaattctaatgagtttgacttgtgttttattttcaccaccagacccattccttctgtagctcaggagagcacccctccaccacatttgcttgcaatatcctagaatctttgtgctcttgctgcagttccctttgggttccatgttttccttgttcccttccatgcctagctggattgcagagttgagttaagtttatgattatgaaataaaaactaagtaacaa

SEQ ID NO: 21862 - DNA, 1081 bp, Homo sapiens
  source 1..1081: mol_type = unassigned DNA
gtggcaaccacccacgagcccgcgtcggtgcccgccccgcagggggacctactatccggcgccgagccggaggggggaaacggcgcccgccgcccgcccggagcccgcgagcaaccccagtcccccccacccgcgcgtggcggcgccggctccctagccaccgcggccccaccctcttccggcctcagctgtccgggctgctttcgcctccgcctgtggatgctgcgcctctccgaacgcaacatgaaggtgctccttgccgccgccctcatcgcggggtccgtcttcttcctgctgctgccgggaccttctgcggccgatgagaagaagaaggggcccaaagtcaccgtcaaggtgtattttgacctacgaattggagatgaagatgtaggccgggtgatctttggtctcttcggaaagactgttccaaaaacagtggataattttgtggccttagctacaggagagaaaggatttggctacaaaaacagcaaattccatcgtgtaatcaaggacttcatgatccagggcggagacttcaccaggggagatggcacaggaggaaagagcatctacggtgagcgcttccccgatgagaacttcaaactgaagcactacgggcctggctgggtgagcatggccaacgcaggcaaagacaccaacggctcccagttcttcatcacgacagtcaagacagcctggctagatggcaagcatgtggtgtttggcaaagttctagagggcatggaggtggtgcggaaggtggagagcaccaagacagacagccgggataaacccctgaaggatgtgatcatcgcagactgcggcaagatcgaggtggagaagccctttgccatcgccaaggagtagggcacagggacatctttctttgagtgaccgtctgtgcaggccctgtagtccgccacagggctctgagctgcactggccccggtgctggcatctggtggagcggacccactcccctcacattccacaggcccatggactcacttttgtaacaaactcctaccaacactgaccaataaaaaaaaatgtgggtttttttttttttaatatataa

SEQ ID NO: 21863 - DNA, 1380 bp, Homo sapiens
  source 1..1380: mol_type = unassigned DNA
ccgcaaccgggagcgcgcaggcgcagccggccggcagtcccgtcagctgtcccagagcctgtgtcgcgcccgtgccggtagcgcccgtgccggtagcgccgctgccaccgctcaccatgggcccgggtcctcggctgctgctacctctcgtgctttgcgtggggctcggcgcacttgtgttttcttcgggggccgagggcttccgcaagcgaggcccctcggtgacggccaaggtcttctttgatgtgaggattggagacaaagatgttggcagaattgtgattggcctctttggaaaagttgtgcccaagacagtggaaaattttgttgctctagcaacaggagagaaaggatatggatataaaggaagcaagtttcatcgtgtcatcaaggatttcatgattcaaggaggtgacatcaccactggagatggcactgggggtgtgagcatctatggtgagacatttccagatgagaacttcaagctgaagcactatggcattgggtgggtcagcatggccaacgctgggcctgacaccaatggctctcagttctttatcaccttgaccaagcccacctggttggacggcaaacatgtggtgtttggaaaagtcattgatgggatgacagtggtgcactccatagagctccaagcaactgatgggcatgaccgtccactcaccaactgctcgatcatcaacagtggcaagatagacgtgaaaacgccttttgtggttgagatcgctgattggtgacacaactggcagaaaacaaggatatgctttggcaggggtgtgtgtgtgtgtgtgtgtgtgtgtgtgttgtgttgtctttcaattatttgcttttttttttttactttctttttgtattctatcccagatcacaggaaagttataaaaatcaaaccgtcaccctttagtttgcttgaactttagtaaaccacctgcttagggactttgaacttaaatatatccccttcctcaagtggtgctattttaaaactaaaaaaaactttgaattggctatttttttaatgcaatattttttttctgaattcattatgatccccatattgggtaatgctgaacatttatctgaaacagatgaggatattattattttgtatccaaacagaaattcagataaagggaaatttgactagtgtaatctgagatatgtcatagggatttctttctgacaaaagggtgctttgctgttctttatattaaatacttttagatcaactctttttgcaagactttttaaaaatgtaaagttctttaagaaatatacaaaaatacacacactctagcattaacagtgaacagattagaaagattttataaatcaaactacaaacataattagataactcag

SEQ ID NO: 21864 - DNA, 1823 bp, Homo sapiens
  source 1..1823: mol_type = unassigned DNA
ggtcagcgtcgctgccggtctccggcggagacggactctggagtttgggcggcccgggcggccactaggtactctgatattccgtactaaacacgtctgcaagtcaagatgtcgcacccgtccccccaagccaagccctccaaccccagtaaccctcgagtcttctttgacgtggacatcggaggggagcgagttggtcgaattgtcttagaattgtttgcagatatcgtacccaaaactgcggaaaattttcgtgcactgtgtacaggagaaaaaggcattggacacacgactgggaaacctctccatttcaaaggatgcccttttcatcgaattattaagaaatttatgattcagggtggagacttctcaaatcagaatgggacaggtggagaaagtatttatggtgaaaaatttgaagatgaaaatttccattacaagcatgatcgggagggtttactgagcatggcaaatgcaggccgcaacacaaacggttctcagttttttatcacaacagttccaactcctcatttggatgggaaacatgtggtgtttggccaagtaattaaaggaataggagtggcaaggatattggaaaatgtggaagtgaaaggtgaaaaacctgctaaattgtgcgttattgcagaatgtggagaattgaaggaaggagatgacgggggaatattcccaaaagatggctctggcgacagtcatccagatttccctgaggatgcggatatagatttaaaagatgtagataaaattttattaataacagaagacttaaaaaacattggaaatacttttttcaaatcccagaactgggagatggctattaaaaaatatgcagaagttttaagatacgtggacagttcaaaggctgttattgagacagcagatagagccaagctgcaacctatagctttaagctgtgtactgaatattggtgcttgtaaactgaagatgtcaaattggcagggagcaattgacagttgtttagaggctcttgaactagacccatcaaataccaaagcattgtaccgcagagctcaaggatggcaaggattaaaagaatatgatcaagcattggctgatcttaagaaagctcaggggatagcaccagaagataaagctatccaggcagaattgctgaaagtcaaacaaaagataaaggcacagaaagataaagagaaggcagtatatgcaaaaatgtttgcttagaaaggattcagttttgcttattgtgtgttgattgtataaatgcaataagaaaatgtaaaggtttttgtctatgaatatgatccctaatgtgtttcttttgacaccttagttccttactgtttacagtttaggagtactgataggggttcatgcttaataaacatgtcacaatacagtaagtaaagtggttttgtttgtttctttgagatggagtcttgctctgtcacccaggctggagtgcggtggcgcaatctcggctcactgcatcctctgcctcccgggttcaagcaattctcctgcctcagcttcccaagtagctgggattacaggcacgtgccaccacgcccagctaatttttgtatttttagtagagatggggtttcaccatattggtcacgtcacgttggtcttgaactcctgaccttgtgatccaccccgccttggcctcccaaagtgctgggattacaggtgtgagccaccgtgcccggccaagtaaaatgttttttaaaatggttatgtgcattattcataaaaaataatggtgtccagtctttttaaacttgtaaagacacatcttattgaataaagagatgagagcttaa

SEQ ID NO: 21865 - DNA, 2190 bp, Homo sapiens
  source 1..2190: mol_type = unassigned DNA
tctgggcgcgcgcgacgtcagtttgagttctgtgttctccccgcccgtgtcccgcccgacccgcgcccgcgatgctggcgctgcgctgcggctcccgctggctcggcctgctctccgtcccgcgctccgtgccgctgcgcctccccgcggcccgcgcctgcagcaagggctccggcgacccgtcctcttcctcctcctccgggaacccgctcgtgtacctggacgtggacgccaacgggaagccgctcggccgcgtggtgctggagctgaaggcagatgtcgtcccaaagacagctgagaacttcagagccctgtgcactggtgagaagggcttcggctacaaaggctccaccttccacagggtgatcccttccttcatgtgccaggcgggcgacttcaccaaccacaatggcacaggcgggaagtccatctacggaagccgctttcctgacgagaactttacactgaagcacgtggggccaggtgtcctgtccatggctaatgctggtcctaacaccaacggctcccagttcttcatctgcaccataaagacagactggttggatggcaagcatgttgtgttcggtcacgtcaaagagggcatggacgtcgtgaagaaaatagaatctttcggctctaagagtgggaggacatccaagaagattgtcatcacagactgtggccagttgagctaatctgtggccagggtgctggcatggtggcagctgcaaatgtccatgcacccaggtggccgcgttgggctgtcagccaaggtgcctgaaacgatacgtgtgcccactccactgtcacagtgtgcctgaggaaggctgctagggatgttagacctcggccaggacccaccacattgcttcctaatacccacccttcctcacgacctcatttctgggcatctttgtggacatgatgtcacccaccccttgtcaagcattgcctgtgattgcccagcccagattcatctgtgccttggacatggtgatggtgatgggttgccatccaagtgaaagtcttttccttgaccaagggggacagtcagttttgcaaaaggactctaatacctgtttaatattgtcttcctaattgggataatttaattaacaagattgactagaagtgaaactgcaacactaacttccccgtgctgtggtgtgacctgagttggtgacacaggccacagaccccagagcttggcttttgaaacacaactcagggcttttgtgaaggttcccccgctgagatctttcctcctggttactgtgaagcctgttggtttgctgctgtcgtttttgaggagggcccatgggggtaggagcagttgaacctgggaacaaacctcacttgagctgtgcctagacaatgtgaattcctgtgttgctaacagaagtggcctgtaagctcctgtgctccggagggaagcatttcctggtaggctttgatttttctgtgtgttaaagaaattcaatctactcatgatgtgttatgcataaaacatttctggaacatggatttgtgttcaccttaaatgtgaaaataaatcctattttctatggaagactggtacctggtttctggaagaggggtctgtgacttggagctgatctttactgagctcgccgtggcagatgccatgctcaggacgttcatgtggatggtttcatgtcatcgtgctggcaacttgtcctccctgccttagagatgaggctcagacaaacgaccttagcacccatagcctatgccatgagcactggctccaccctgaatcccagctcctccccttagtgaccccaagtctgtttccctcagctgcataaggaggcgatatagtttgaatatttgtccccagccaaatctcatgttgaactgtaatccccagtgctggaggtggggcctgctacgaggtgtttggatcatggggacgggtatttcatggcttggtgctgttttcttgatggtgaattattgcaagatacggtcatttaaaattgtgtggcacctccccctgcccccttcttgctcctgctttcaccatgtgacatgcctgatcccccttcaccttttgccatggtcataagcttcctgaggcctccctggaagctgagcagatgccagcaccatgcttcctgtacatcctgcagaaccataagccaattaaacctttttaataataaatta

SEQ ID NO: 21866 - DNA, 1258 bp, Homo sapiens
  source 1..1258: mol_type = unassigned DNA
tcggccttctgggcgcgcgcgacgtcagtttgagttctgtgttctccccgcccgtgtcccgcccgacccgcgcccgcgatgctggcgctgcgctgcggctcccgctggctcggcctgctctccgtcccgcgctccgtgccgctgcgcctccccgcggcccgcgcctgcagcaagggctccggcgacccgtcctcttcctcctcctccgggaacccgctcgtgtacctggacgtggacgccaacgggaagccgctcggccgcgtggtgctggagctgaaggcagatgtcgtcccaaagacagctgagaacttcagagccctgtgcactggtgagaagggcttcggctacaaaggctccaccttccacagggtgatcccttccttcatgtgccaggcgggcgacttcaccaaccacaatggcacaggcgggaagtccatctacggaagccgctttcctgacgagaactttacactgaagcacgtggggccaggttggatggcaagcatgttgtgttcggtcacgtcaaagagggcatggacgtcgtgaagaaaatagaatctttcggctctaagagtgggaggacatccaagaagattgtcatcacagactgtggccagttgagctaatctgtggccagggtgctggcatggtggcagctgcaaatgtccatgcacccaggtggccgcgttgggctgtcagccaaggtgcctgaaacgatacgtgtgcccactccactgtcacagtgtgcctgaggaaggctgctagggatgttagacctcggccaggacccaccacattgcttcctaatacccacccttcctcacgacctcatttctgggcatctttgtggacatgatgtcacccaccccttgtcaagcattgcctgtgattgcccagcccagattcatctgtgccttggacatggtgatggtgatgggttgccatccaagtgaaagtcttttccttgaccaagggggacagtcagttttgcaaaaggactctaatacctgtttaatattgtcttcctaattgggataatttaattaacaagattgactagaagtgaaactgcaacactaacttccccgtgctgtggtgtgacctgagttggtgacacaggccacagaccccagagcttggcttttgaaacacaactcagggcttttgtgaaggttcccccgctgagatctttcctcctggttactgtgaagcctgttggtttgctgctgtcgtttttgaggagggcccatgggggtag

SEQ ID NO: 21867 - DNA, 821 bp, Homo sapiens
  source 1..821: mol_type = unassigned DNA
cgtcctcttcctcctcctccgggaacccgctcgtgtacctggacgtggacgccaacgggaagccgctcggccgcgtggtgctggagctgaaggcagatgtcgtcccaaagacagctgagaacttcagagccctgtgcactggtgagaagggcttcggctacaaaggctccaccttccacagggtgatcccttccttcatgtgccaggcgggcgacttcaccaaccacaatggcacaggcgggaagtccatctacggaagccgctttcctgacgagaactttacactgaagcacgtggggccaggtgtcctgtccatggctaatgctggtcctaacaccaacggctcccagttcttcatctgcaccataaagacagactggtccatggcattggatgacattgcgctacactgttgctcacccgggtcacccgtcctcacaggttggatggcaagcatgttgtgttcggtcacgtcaaagagggcatggacgtcgtgaagaaaatagaatctttcggctctaagagtgggaggacatccaagaagattgtcatcacagactgtggccagttgagctaatctgtggccagggtgctggcatggtggcagctgcaaatgtccatgcacccaggtggccgcgttgggctgtcagccaaggtgcctgaaacgatacgtgtgcccactccactgtcacagtgtgcctgaggaaggctgctagggatgttagacctcggccaggacccaccacattgcttcctaatacccacccttcctcacgacctcatttctgggcatctttgtggacatgatgtcacccacccct

SEQ ID NO: 21868 - DNA, 6368 bp, Homo sapiens
  source 1..6368: mol_type = unassigned DNA
gcgcttccggtgcgacgctgtctctccatgccaggactgagttgtgggggagggaggcggttagcgggctttagcgccttttctggcggcggtagatttgaagcgcttcaaaggaccggacccagagaagaggaaaactctaccggtgcaggagcacagggatcagttgtccttgtttttttttggtcttttcttcatttgaagattaagtattggagccatgggaataaaggttcaacgtcctcgatgtttttttgacattgccattaacaatcaacctgctggaagagttgtctttgaattattttctgatgtgtgccccaaaacatgcgagaactttcgttgtctttgtacaggtgaaaaggggaccgggaaatcaactcagaaaccattacattataagagttgtctctttcacagagttgtcaaggattttatggttcaaggtggtgacttcagtgaaggaaatggacgaggaggggaatctatctatggaggattttttgaagacgagagtttcgctgttaaacacaacaaagaatttctcttgtcaatggccaacagagggaaggatacaaatggttcacagttcttcataacaacgaaaccaactcctcatttagatgggcatcatgttgtttttggacaagtaatctctggtcaagaagttgtaagagagattgaaaaccagaaaacagatgcagctagcaaaccgtttgcggaggtacggatactcagttgtggagagctgattcccaaatctaaagttaagaaagaagaaaagaaaaggcataaatcatcatcatcttcctcctcctcatctagtgactcagatagctcaagtgattctcagtcctcttctgattcctctgattccgaaagtgctactgaagagaaatcaaagaaaagaaaaaagaaacatcggaaaaattcccgaaaacacaagaaagaaaagaaaaagcgaaagaaaagcaagaagagtgcatctagtgagagtgaagctgaaaatcttgaagcacaaccccagtctactgtccgtccagaagagatccctcctatacctgaaaatagattcctaatgagaaaaagtcctcctaaagctgatgagaaggaaaggaaaaacagagagagagaaagggaaagagagtgtaatccacctaactcccagcctgcttcataccagagacgacttttagttactagatctggcaggaaaattaaaggaagaggaccaaggcgttatcgaactccttccagatccagatcaagggatcgtttcagacgtagtgagactcctccacattggaggcaagagatgcagagagctcaaagaatgagggtatcaagtggtgaaagatggatcaagggggataagagtgagttgaatgaaataaaagaaaatcagagaagtccagttagagtaaaagagagaaaaataacagatcacaggaatgtatctgagagtccaaacagaaaaaatgaaaaggagaagaaagttaaagaccataaatctaacagcaaagagagagacatcagaagaaattcagaaaaagatgacaagtataaaaacaaagtgaagaaaagggccaaatctaaaagtaggagtaagagcaaagagaaatcaaagagtaaagaaagagattcaaaacataatagaaatgaagaaaagaggatgaggtcaaggagtaaaggaagggatcatgaaaatgttaaagaaaaagaaaagcagtctgattctaaaggaaaagatcaggaaaggagtagaagtaaagagaagtctaaacagttagaatcaaagagtaatgagcatgatcacagtaaaagtaaggaaaaggatagacgcgcacaatccaggagtagagaatgtgatataactaaaggtaaacacagttataatagcagaacaagagaacgaagcagaagtagggacagaagcagaagagtgcgatcaagaacccatgacagagatcgcagcagaagcaaggagtaccatagatacagagaacaggaatacaggagaagaggacggtcacgaagccgagagagaagaacaccaccaggaagatcaagaagtaaagataggaggagaaggaggagagactcacggagctcagagagagaagaaagtcaaagcagaaacaaagacaaatacagaaaccaagagagtaagagctcacacagaaaagaaaattctgagagtgagaaaagaatgtactctaaaagtcgtgatcataatagctcaaataacagcagggaaaaaaaggctgatagagatcaaagtcccttctcaaaaataaaacaaagcagtcaggacaatgaattaaagtcctccatgttgaaaaataaggaggatgagaagatcagatcctcagtggaaaaagaaaaccaaaaatcaaaaggtcaagaaaatgaccatgtacatgaaaaaaataaaaaatttgatcatgaatcaagccctggaacagatgaagacaaaagcggatgagtgagttatataaacttacttccattctgtttcggattttaagtttgagagacttgctaatgaatctcctttatgttgttttccttttcattgtttttggattgttttatgtttgtccttttttttcttaatgtggatttcattgagttgattttttgataatctgcaatctggataatttgtactgctaaagttttaataaactcgacatgagaaaaacactttggtgtagtactgtgtgctgtgtttaactattttatgtatgcattactgtgttgcaacaattagccaatagcatcctaatttgtttagtcagccatttggaatggttgcaatgcattgttgcaaaagcttgtgtttctcatgattaaagtaactttagaagccactagaagacatcttgtatagattttctgattgcgttataaatagaggtttgcagcggtttcttttaattacacagaagcagggtcctaataacctgagatcttaaatcatcacttttgattttatagtaatttgtgctttaaaatagatgtatttatattgcacttcatactctattctttatagttcgagccatagcttgtttcctattaatgcttttcctgtctagttgtgttttacttaactgcctataaaaatcgtaagagtaatttttttcagttgatgtactgattgagcttgagttgctgttatacagcatttgacaggaactataccttggaaaatcagattgtgattctcagttctgtgttgcttttggtttgaagagttttgggaacgttttaattattaattacccttctctaaactttaaaaaaaaaaaagcttttctcattaaaacataccatttgtgcaggtccttaagctatacagattctaaaaattgttagtattgagacattaacttctaagatttctcttttttggcctccaacctatatagaattgagtgttaactctgcatggattttgtttgttttaattgaactgacttctctaactctcatagctgtgagttccaaatggcaagaaaatgcatcttttctatatatgtatcacgataggctatagcatgtttatgactctggtttctttctcttcaggtggttttataccattactgttaatgttattttaacttggcatgtataacattgccatatagagtagagtagaaagttgcaaattttgatagtttacagagttaaacactaaacatatccaaagtccatttagagttttgggtgttgtattttgccatttttgtgatgtgtggccttttattctgtaatctcttctaaataaaacattgaacatccagcaaacataaaacctgcctcatttgaaaaggaatttcaaaattccaattaataggattctctagagagttttgtactttaatatttgtcagtgtagtgtcaactctgttaccaaggtagcttcttggtaaatccagtagctactcaatgctatttgtactgaataaagcaattattaacatgatacttcccactattgattaatgcaatattgatatatttggcgttgtggtagctgttgcagaatgaatagtgtaatgaccataagattgcttggaaaattgtaatacagatatccacaatgaattctttccaaaatttttttttccgatgataaaagtagtagatgtttattataaaatccaaggtgattgattccttagagactgaccacaaacccacattagggataattgagtctgagtgcccaagctatataacgttatgtagtttaagcaagttattgtttgtcttaatttcagttaactgcattttaaaattgttgttataaactatttgagctttaagaaaggtgctatttaagaaaggatttctaataacagttaaatattttttttaagtccatgctaagtaaaaattcttacatgttgtctgatcccagagctttatctactaaaaattatacataaggatttccaaatcttagagtttcaaaaagtaaccatagggaaaaaaattgtagtaatttctataggcaatattctgtttgggttatcaaaagagcaactccatgctccgcattatttatagtccttattttaaagttttattagctctctttacagaacagatgtgaaggagttgagaggacaatcaactagattttatttttagaatataaagaacatttttaaaatgattaaacagcattaactgtacctcaggatctgcgcatgcatctgaatagcacacggctcaaatggtcctttccttttgttacatttagtagttgtgccatctttagtttttgctttgaacattgttttcctaaaagtcaactattactttcccatcaagttggttttatagttatgtctaaatttatggttcatgtcaaagtatttttgacttaatatccttttaaaaatatttaaactgatttattgctcaattggtgatagctgagaaaattttttcaatatgtagaattttcatggttattttgtatgaattatttttctgggtaagccatctgccacagaaattgacactatggtgagattaatgttaatgaaatgagcagtagagaagctactggattgctttaaaacattctttgattaaattactacatagttggtaagttcatagttttaagttacttaattgaagccctcagaagttgcaaagaatttatctgataaatctgcctttgcacaaatgtgatactgatgcatggacggctttgcggaatgacctttgatatttgtgcctagtggaaggtatggagctaaacaattaaagaactcttcattatggataggcacatattggatctctggtattttgggtagtggtattaacttgacaattctaatttattttagttagtatatgtagcaagttagtatgtttgttagtagtttattgtacttcattccagttggtaatatagttttcatcacactaaactttttatactaaatttctgtagaagcttgttgggtttgccttcaccagaaggtactttaaatacctaccatagctgatttgttataaagaaacaaaatgggtgttcttctgtttccttttgattatgtttactgtaattatttcattttggatttatacatttacaattgaataaggattataggttgataagctgtttattgtgaaaagatgtgttttgttacaaatacttgttttaaaaattaataagcccccaggaagtacagcattgactggcacaactgcccatagtgagcttcccaactaactgccttcagtggattcgggcaagtgcaaagtctttggcctattgtgtgacaaagaggtatatattaaaggaaaagaaaaatgacatgaataagaaaattccgtcaacaaggttggagtagggagttgttgaggggtttagtttgttttaaaaggtatgtgagggagtggtggggtggatttgtgtttctgactttttttctttaagcaaattccatatgttaccaaaagcacatgctgtatattttcttccccttttgtgtgtatatagtattttgaaagataaatgaattgggtatttgtatgtgggatgtacaaaattgtggccgctctctttgtggaaggaaaaaacataaatgaagttaatgcacttcttttcctagcccaaaagtcactgtgattatatttttttaatgaagtttagaaaaaaagctgttgtcttctcaattgtaaaattagtttcaaaatgctgcttctcttatcattagtctagtaattgttgaacttttctgcaaactgcattttacaaaattgaaacttggaagctgtattaacttttatagttaaacattgtattaaataaactatactataataaa

SEQ ID NO: 21869 - DNA, 1062 bp, Homo sapiens
  source 1..1062: mol_type = unassigned DNA
gaggaagtccctgaggaccgcagcagtgcctttgccgctgttgcagaaggagaaggcttgcagtcgagccccggggcctggggacggtccttcctctgccagcccccgccctccccactcaggcgcacacctccctcactgacgcattttgccgcacaagctgtaacatggcggcagcgactgcggcctgaactctagggagccgggttgatttttaaagcttcaaaatcctaagactcagcactgttgcggggagcacagggatcagttgtccttgtttttttttggtcttttcttcatttgaagattaagtattggagccatgggaataaaggttcaacgtcctcgatgtttttttgacattgccattaacaatcaacctgctggaagagttgtctttgaattattttctgatgtgtgccccaaaacatgcgagaactttcgttgtctttgtacaggtgaaaaggggaccgggaaatcaactcagaaaccattacattataagagttgtctctttcacagagttgtcaaggattttatggttcaaggtggtgacttcagtgaaggaaatggacgaggaggggaatctatctatggaggattttttgaagacgagagtttcgctgttaaacacaacaaagaatttctcttgtcaatggccaacagagggaaggatacaaatggttcacagttcttcataacaacgaaaccaactcctcatttagatgggcatcatgttgtttttggacaagtaatctctggtcaagaagttgtaagagagattgaaaaccagaaaacagatgcagctagcaaaccgtttgcggaggtacggatactcagttgtggagagctgattcccaaatctaaagttaagaaagaagaaaagaaaaggcataaatcatcatcatcttcctcctcctcatctagtgactcagatagctcaagtgattctcagtcctcttctgattcctctgattccgaaagtgctactgaagagaaatcaaagaaaagaaaaaagaaacatcggaaaaattcccgaaaacacaagaaagaaaagaaaaa

SEQ ID NO: 21870 - DNA, 525 bp, Homo sapiens
  source 1..525: mol_type = unassigned DNA
gaagaggggcggagccggcgcggctgaccgggttgggtttaccgtctttccctcgaggtatcggggctgcttgggcccagaggaagtccctgaggaccgcagcagtgcctttgccgctgttgcagaaggagaaggcttgcagtcgagccccggggcctggggacggtccttcctctgccagcccccgccctccccactcaggcgcacacctccctcactgacgcattttgccgcacaagctgtaacatggcggcagcgactgcggcctgaactctagggagccgggttgatttttaaagcttcaaaatcctaagactcagcactgttgcgggattaagtattggagccatgggaataaaggttcaacgtcctcgatgtttttttgacattgccattaacaatcaacctgctggaagagttgtctttgaattattttctgatgtgtgccccaaaacatgcgagaactttcgttgtctttgtacaggtgaaaaggggaccgggaaatcaactcagaaaccattacat

SEQ ID NO: 21871 - DNA, 2498 bp, Homo sapiens
  source 1..2498: mol_type = unassigned DNA
tagatttgaagcgcttcaaaggaccggacccagagaagaggaaaactctaccggtgcaggtaagtggagcacagggatcagttgtccttgtttttttttggtcttttcttcatttgaagattaagtattggagccatgggaataaaggttcaacgtcctcgatgtttttttgacattgccattaacaatcaacctgctggaagagttgtctttgaattattttctgatgtgtgccccaaaacatgcgagaactttcgttgtctttgtacaggtgaaaaggggaccgggaaatcaactcagaaaccattacattataagagttgtctctttcacagagttgtcaaggattttatggttcaaggtggtgacttcagtgaaggaaatggacgaggaggggaatctatctatggaggattttttgaagacgagagtttcgctgttaaacacaacaaagaatttctcttgtcaatggccaacagagggaaggatacaaatggttcacagttcttcataacaacgaaaccaactcctcatttagatgggcatcatgttgtttttggacaagtaatctctggtcaagaagttgtaagagagattgaaaaccagaaaacagatgcagctagcaaaccgtttgcggaggtacggatactcagttgtggagagctgattcccaaatctaaagttaagaaagaagaaaagaaaaggcataaatcatcatcatcttcctcctcctcatctagtgactcagatagctcaagtgattctcagtcctcttctgattcctctgattccgaaagtgctactgaagagaaatcaaagaaaagaaaaaagaaacatcggaaaaattcccgaaaacacaagaaagaaaagaaaaagcgaaagaaaagcaagaagagtgcatctagtgagagtgaagctgaaaatcttgaagcacaaccccagtctactgtccgtccagaagagatccctcctatacctgaaaatagattcctaatgagaaaaagtcctcctaaagctgatgagaaggaaaggaaaaacagagagagagaaagggaaagagagtgtaatccacctaactcccagcctgcttcataccagagacgacttttagttactagatctggcaggaaaattaaaggaagaggaccaaggcgttatcgaactccttccagatccagatcaagggatcgtttcagacgtagtgagactcctccacattggaggcaagagatgcagagagctcaaagaatgagggtatcaagtggtgaaagatggatcaagggggataagagtgagttgaatgaaataaaagaaaatcagagaagtccagttagagtaaaagagagaaaaataacagatcacaggaatgtatctgagagtccaaacagaaaaaatgaaaaggagaagaaagttaaagaccataaatctaacagcaaagagagagacatcagaagaaattcagaaaaagatgacaagtataaaaacaaagtgaagaaaagggccaaatctaaaagtaggagtaagagcaaagagaaatcaaagagtaaagaaagagattcaaaacataatagaaatgaagaaaagaggatgaggtcaaggagtaaaggaagggatcatgaaaatgttaaagaaaaagaaaagcagtctgattctaaaggaaaagatcaggaaaggagtagaagtaaagagaagtctaaacagttagaatcaaagagtaatgagcatgatcacagtaaaagtaaggaaaaggatagacgcgcacaatccaggagtagagaatgtgatataactaaaggtaaacacagttataatagcagaacaagagaacgaagcagaagtagggacagaagcagaagagtgcgatcaagaacccatgacagagatcgcagcagaagcaaggagtaccatagatacagagaacaggaatacaggagaagaggacggtcacgaagccgagagagaagaacaccaccaggaagatcaagaagtaaagataggaggagaaggaggagagactcacggagctcagagagagaagaaagtcaaagcagaaacaaagacaaatacagaaaccaagagagtaagagctcacacagaaaagaaaattctgagagtgagaaaagaatgtactctaaaagtcgtgatcataatagctcaaataacagcagggaaaaaaaggctgatagagatcaaagtcccttctcaaaaataaaacaaagcagtcaggacaatgaattaaagtcctccatgttgaaaaataaggaggatgagaagatcagatcctcagtggaaaaagaaaaccaaaaatcaaaaggtcaagaaaatgaccatgtacatgaaaaaaataaaaaatttgatcatgaatcaagccctggaacagatgaagacaaaagcggatgagtgagttatataaacttacttccattctgtttcggattttaagtttgagagacttgctaatgaatctcctttatgttgttttccttttcattgttttt

SEQ ID NO: 21872 - DNA, 1564 bp, Homo sapiens
  source 1..1564: mol_type = unassigned DNA
gcgcttccggtgcgacgctgtctctccatgccaggactgagttgtgggggagggaggcggttagcgggctttagcgccttttctggcggcggtagatttgaagcgcttcaaaggaccggacccagagaagaggaaaactctaccggtgcaggagcacagggatcagttgtccttgtttttttttggtcttttcttcatttgaagattaagtattggagccatgggaataaaggttcaacgtcctcgatgtttttttgacattgccattaacaatcaacctgctggaagagttgtctttgaattattttctgatgtgtgccccaaaacatgcgagaactttcgttgtctttgtacaggtgaaaaggggaccgggaaatcaactcagaaaccattacattataagagttgtctctttcacagagttgtcaaggattttatggttcaaggtggtgacttcagtgaaggaaatggacgaggaggggaatctatctatggaggattttttgaagacgagagtttcgctgttaaacacaacaaagaatttctcttgtcaatggccaacagagggaaggatacaaatggttcacagttcttcataacaacgaaaccaactcctcatttagatgggcatcatgttgtttttggacaagtaatctctggtcaagaagttgtaagagagattgaaaaccagaaaacagatgcagctagcaaaccgtttgcggaggtacggatactcagttgtggagagctgattcccaaatctaaagttaagaaagaagaaaagaaaaggcataaatcatcatcatcttcctcctcctcatctagtgactcagatagctcaagtgattctcagtcctcttctgattcctctgattccgaaagtgctactgaagagaaatcaaagaaaagaaaaaagaaacatcggaaaaattcccgaaaacacaagaaagaaaagaaaaagcgaaagaaaagcaagaagagtgcatctagtgagagtgaagctgaaaatcttgaagcacaaccccagtctactgtccgtccagaagagatccctcctatacctgaaaatagattcctaatgagaaaaagtcctcctaaagctgatgagaaggaaaggaaaaacagagagagagaaagggaaagagagtgtaatccacctaactcccagcctgcttcataccagagacgacttttagttactagatctggcaggaaaattaaaggaagaggaccaaggcgttatcgaactccttccagatccagatcaagggatcgtttcagacgtagtgagactcctccacattggaggcaagagatgcagagagctcaaagaatgagggtatcaagtggtgaaagatggatcaagggggataagagtgagttgaatgaaataaaagaaaatcagagaagtccagttagagtaaaagagagaaaaataacagatcacaggaatgtatctgagagtccaaacagaaaaaatgaaaaggagaagaaagttaaagaccataaatctaacagcaaagagagagacatcagaagaaaaaaaaaaaaaaaaaaaaaaaaa

SEQ ID NO: 21873 - DNA, 752 bp, Homo sapiens
  source 1..752: mol_type = unassigned DNA
cttctgcttccgggtcggagccatggcggtggcaaattcaagtcctgttaaccccgtggtgttctttgatgtcagtattggcggtcaggaagttggccgcatgaagatcgagctctttgcagacgttgtgcctaagacggccgagaactttaggcagttctgcaccggagaattcaggaaagatggggttccaataggatacaaaggaagcaccttccacagggtcataaaggatttcatgattcagggtggagattttgttaatggagatggtactggagtcgccagtatttaccgggggccatttgcagatgaaaattttaaacttagacactcagctccaggcctgctttccatggcgaacagtggtccaagtacaaatggctgtcagttctttatcacctgctctaagtgcgattggctggatgggaagcatgtggtgtttggaaaaatcatcgatggacttctagtgatgagaaagattgagaatgttcccacaggccccaacaataagcccaagctacctgtggtgatctcgcagtgtggggagatgtagtccagacaaagactgaatcaggccttcccttcttcttggtggtgttcttgagtaagataatctggactggcccccgtctttgcttccctgcctgctgctgccccatttgatcaagagaccatggaagtgtcagagattcagaatccaagattgtctttaagttttcaactgtaaataaagtttttttgtatgcgta

SEQ ID NO: 21874 - DNA, 327 bp, Homo sapiens
  source 1..327: mol_type = unassigned DNA
actagggaggcggaggtgggagataccgagcggcagggtggtgggtcagcccatcatgccccctgctccgtgaagccctcatggtcttggactgggccttctgacactctcccgctgattgcaggaagttggccgcatgaagatcgagctctttgcagacgttgtgcctaagacggccgagaactttaggcagttctgcaccggagaattcaggtcagtttcagatgtgtttgacttctttgcctgctccagaggggtgttctggggctgcagtgagggtatcggtgaaccacctgctggccttgaatgattgctggtgacagtgat

SEQ ID NO: 21875 - DNA, 665 bp, Homo sapiens
  source 1..665: mol_type = unassigned DNA
gcaaattcaagtcctgttaaccccgtggtgttctttgatgtcagtattggcggtcaggaagttggccgcatgaagatcgagctctttgcagacgttgtgcctaagacggccgagaactttaggcagttctgcaccggagaattcaggtcagtttcagatgtgtttgacttctttgcctgctccagaggggtgttctggggctgcagtgagggtatcggtgaaccacctgctggccttgaatgattgctggtgacagtgatagaaggaaagatggggttccaataggatacaaaggaagcaccttccacagggtcataaaggatttcatgattcagggtggagattttgttaatggagatggtactggagtcgccagtatttaccgggggccatttgcagatgaaaattttaaacttagacactcagctccaggcctgctttccatggcgaacagtggtccaagtacaaatggctgtcagttctttatcacctgctctaagtgcgattggctggatgggaagcatgtggtgtttggaaaaatcatcgatggacttctagtgatgagaaagattgagaatgttcccacaggccccaacaataagcccaagctacctgtggtgatctcgcagtgtggggagatgtagtccagacaaagactgaatcag

SEQ ID NO: 21876 - DNA, 416 bp, Homo sapiens
  source 1..416: mol_type = unassigned DNA
aattcaggtcagtttcagatgtgtttgacttctttgcctgctccagaggggtgttctggggctgcagtgagggtatcggtgaaccacctgctggccttgaatgattgctggtgacagtgatagaaggtaatgccccaagggtctgtccctagtttatttgccttctttatgtctgtcaaccatctttaggagagtccttttggctccagtgcatggtaaactggaaaggccttgtgctacctgctgtcactccaagtctctttcttttcggttataggaaagatggggttccaataggatacaaaggaagcaccttccacagggtcataaaggatttcatgattcagggtggagattttgttaatgtaagtactattcctttcctatcaaagacccgtagttttagtttttgttgt

SEQ ID NO: 21877 - DNA, 669 bp, Homo sapiens
  source 1..669: mol_type = unassigned DNA
ggtgagatccaggaggctgcccacacctgcgccgaagggaaactgctcggggctaggcaggcagaactcacccagagagagcggactcgggaagccagccagaaagtgaaattgcacccgaacctaccgacctgccgggcggggggaaaggaggaggaggagtctccccaatcctagcgccccgcttctggaggaactgggcggttagactagggaggcggaggaagttggccgcatgaagatcgagctctttgcagacgttgtgcctaagacggccgagaactttaggcagttctgcaccggagaattcaggaaagatggggttccaataggatacaaaggaagcaccttccacagggtcataaaggatttcatgattcagggtggagattttgttaatggagatggtactggagtcgccagtatttaccgggggccatttgcagatgaaaattttaaacttagacactcagctccaggcctgctttccatggcgaacagtggtccaagtacaaatggctgtcagttctttatcacctgctctaagtgcgattggctggatgggaagcatgtggtgtttggaaaaatcatcgatggacttctagtgatgagaaagattgagaatgttcccacaggccccaacaataagcccaagctacctgtggtgat

SEQ ID NO: 21878 - DNA, 1311 bp, Homo sapiens
  source 1..1311: mol_type = unassigned DNA
gtgctccagctccgctggattagctgaggcagaagtcgggctccagtcagccgcctgaaatagcctgtctacctctgtccgtccgctcactgctcttgagacctgattcctccatgcattgctctgtctggttgccgtttggattgttcccgtgttaatttacgttgttagtctgtgtgactgcgtgtctggacgtctggctggccgattggtggacttgctggctccagtgtttattctttcccgtatttagaggcgctcacgactgtgacatcatagtgattgaatcattcattttttgtccctttcaggcagttctgcaccggagaattcaggtcagtttcagatgtgtttgacttctttgcctgctccagaggggtgttctggggctgcagtgagggtatcggtgaaccacctgctggccttgaatgattgctggtgacagtgatagaaggaaagatggggttccaataggatacaaaggaagcaccttccacagggtcataaaggatttcatgattcagggtggagattttgttaatggagatggtactggagtcgccagtatttaccgggggccatttgcagatgaaaattttaaacttagacactcagctccaggcctgctttccatggcgaacagtggtccaagtacaaatggctgtcagttctttatcacctgctctaagtgcgattggctggatgggaagcatgtggtgtttggaaaaatcatcgatggacttctagtgatgagaaagattgagaatgttcccacaggccccaacaataagcccaagctacctgtggtgatctcgcagtgtggggagatgtagtccagacaaagactgaatcaggtaagtgtgtctttctcctattaggttaggaatcagacctcagagaaggcagcatggtctagtggaaagaactttagtcttgaagacatgagattgagcccagttcctccgtgtatggccttggagtagtcactttccttctctgagcacatttcctcatctgtcaaatggaaatactgtaatacctatctctcagagtcactgtaaaaataaaaagagaaagggttgtaggagcactttacttttctatcactttgtaatgtacaaagtatcaatgtgaaaactactcaggcagtttgtaacagcactctcagactacagttccattcagtagtccccctagaaagacctggctccaggcctgagtaactctctgctgggaccaggccaggcagccaggagacacacctgtcatgcctctcatcagaactgatactgcaattccaggcctcgactt

SEQ ID NO: 21879 - DNA, 901 bp, Homo sapiens
  source 1..901: mol_type = unassigned DNA
atacgttcctccctcctttcggcgagctcggttgatcctcgcgggatttcagttaggctcttagtgcgggccctgtgggtgtggcaagaggaagaatgactgctcgctttgtgattcttgatccggaacttgtcacccaggaaccccggaagaggtagctcacgcgatagaaacgtgttcgctgcccagaagaagggaaggcgcgagtgaggaaaggaggtactgtagatgccctccaaatccttggttatggaatatttggctcatcccagtacactcggcttggctgttggagttgcttgtggcatgtgcctgggctggagccttcgagtatgctttgggatgctccccaaaagcaagacgagcaagacacacacagatactgaaagtgaagcaagcatcttgggagacagcggggagtacaagatgattcttgtggttcgaaatgacttaaagatgggaaaagggaaagtggctgcccagtgctctcatgctgctgtttcagcctacaagcagattcaaagaagaaatcctgaaatgctcaaacaatgggaatactgtggccagcccaaggtggtggtcaaagctcctgatgaagaaaccctgattgcattattggcccatgcaaaaatgctgggactgactgtaagtttaattcaagatgctggacgtactcagattgcaccaggctctcaaactgtcctagggattgggccaggaccagcagacctaattgacaaagtcactggtcacctaaaactttactaggtggactttgatatgacaacaacccctccatcacaagtgtttgaagcctgtcagattctaacaacaaaagctgaatttcttcacccaacttaaatgttcttgagatgaaaataaaacctattcccatgttcta

SEQ ID NO: 21880 - DNA, 1993 bp, Homo sapiens
  source 1..1993: mol_type = unassigned DNA
tagctacacttctggaaaattcagtatggacagtctccgacttaggatttttcaactttaggatggtgtgaaagagacacccattcagtagaaactgtacttcgagttttgcattttgatcttttcctggcctagtgataatgtggtacagtacactcttgtgatgctgggcagcggcagcgagccacagctcccagtcacccatgtgatcacgggaatcaacaacccatcctctaccgtgtactgtgttgtcagcttttttggatattgtgttttgtgttttcacattccatcatgtctacaaaatgtccatcagtgtctcctgtttctggtgagatgaagaagaggaaggcaattactcttgaaatgaaactcaagataattgcccagcatgaaggtggcaagccagtaatggccattgcacgtgagttaggactttggcaatccacgatttcaaccatcttaagggataagaagcaaatcagtgatgcagcgaaatcgtcagcatcagttaaatccactgtcatcacaaagaaaagggctggaccaattgatgatatggaaaaattacttgttatgtggatggaagaccagatacagaagcgtataccacttagcctactgatgatccaggctaaggcaagaagtctttttaatatgctaaaagaccgtgccagtgatcctacatatacacaaatgtttaaagcaagtcatggatggttccagcgcttcaaaaggcgtcataattttcacaatgtaaagatcactggtgaggcagcacgtgctggtaatgaaggtgccatagcttttaaggaacagctgcataggataattatggctaaagatctttgcaataaggagctgattgcactggaggaagaaagaggtaaaggcgttgaggcagtggaagaagttacacccacggcacctagaaagttcacagcaaagaaactggcagaggcatttgctgctatcagcagtggcctacacgttagaagaaatggacgtcaattacgagagattcgccacagttgacaggcgcagatacaggatgctcttgcttgctacagagaaatatatagtgaaaagaagaaacaagctgtacggtcaaaacttggtatcttcctgaagaacaacactatgcttgctaaaccatcaactagtgttgatgtcccaatgccttctaccacctattctcgatgttcatcagaagagagagaaattgaggaccctgttgcatccccatcatccagcaattaattctatttcagtgcttcaaacatttttcaggaccactgtgctttcagctgtgtaaattaatgatgccctccaaatccttggttatggaatatttggctcatcccagtacactcggcttggctgttggagttgcttgtggcatgtgcctgggctggagccttcgagtatgctttgggatgctccccaaaagcaagacgagcaagacacacacagatactgaaagtgaagcaagcatcttgggagacagcggggagtacaagatgattcttgtggttcgaaatgacttaaagatgggaaaagggaaagtggctgcccagtgctctcatgctgctgtttcagcctacaagcagattcaaagaagaaatcctgaaatgctcaaacaatgggaatactgtggccagcccaaggtggtggtcaaagctcctgatgaagaaaccctgattgcattattggcccatgcaaaaatgctgggactgactgtaagtttaattcaagatgctggacgtactcagattgcaccaggctctcaaactgtcctagggattgggccaggaccagcagacctaattgacaaagtcactggtcacctaaaactttactaggtggactttgatatgacaacaacccctccatcacaagtgtttgaagcctgtcagattctaacaacaaaagctgaatttcttcacccaacttaaatgttcttgagatgaaaataaaacctattcccatgttc

SEQ ID NO: 21881 - DNA, 2049 bp, Homo sapiens
  source 1..2049: mol_type = unassigned DNA
gaaacgtgttcgctgcccagaagaagggaaggcgcgagtgaggaaaggaggtactgtagctacacttctggaaaattcagtatggacagtctccgacttaggatttttcaactttaggatggtgtgaaagagacacccattcagtagaaactgtacttcgagttttgcattttgatcttttcctggcctagtgataatgtggtacagtacactcttgtgatgctgggcagcggcagcgagccacagctcccagtcacccatgtgatcacgggaatcaacaacccatcctctaccgtgtactgtgttgtcagcttttttggatattgtgttttgtgttttcacattccatcatgtctacaaaatgtccatcagtgtctcctgtttctggtgagatgaagaagaggaaggcaattactcttgaaatgaaactcaagataattgcccagcatgaaggtggcaagccagtaatggccattgcacgtgagttaggactttggcaatccacgatttcaaccatcttaagggataagaagcaaatcagtgatgcagcgaaatcgtcagcatcagttaaatccactgtcatcacaaagaaaagggctggaccaattgatgatatggaaaaattacttgttatgtggatggaagaccagatacagaagcgtataccacttagcctactgatgatccaggctaaggcaagaagtctttttaatatgctaaaagaccgtgccagtgatcctacatatacacaaatgtttaaagcaagtcatggatggttccagcgcttcaaaaggcgtcataattttcacaatgtaaagatcactggtgaggcagcacgtgctggtaatgaaggtgccatagcttttaaggaacagctgcataggataattatggctaaagatctttgcaataaggagctgattgcactggaggaagaaagaggtaaaggcgttgaggcagtggaagaagttacacccacggcacctagaaagttcacagcaaagaaactggcagaggcatttgctgctatcagcagtggcctacacgttagaagaaatggacgtcaattacgagagattcgccacagttgacaggcgcagatacaggatgctcttgcttgctacagagaaatatatagtgaaaagaagaaacaagctgtacggtcaaaacttggtatcttcctgaagaacaacactatgcttgctaaaccatcaactagtgttgatgtcccaatgccttctaccacctattctcgatgttcatcagaagagagagaaattgaggaccctgttgcatccccatcatccagcaattaattctatttcagtgcttcaaacatttttcaggaccactgtgctttcagctgtgtaaattaatgatgccctccaaatccttggttatggaatatttggctcatcccagtacactcggcttggctgttggagttgcttgtggcatgtgcctgggctggagccttcgagtatgctttgggatgctccccaaaagcaagacgagcaagacacacacagatactgaaagtgaagcaagcatcttgggagacagcggggagtacaagatgattcttgtggttcgaaatgacttaaagatgggaaaagggaaagtggctgcccagtgctctcatgctgctgtttcagcctacaagcagattcaaagaagaaatcctgaaatgctcaaacaatgggaatactgtggccagcccaaggtggtggtcaaagctcctgatgaagaaaccctgattgcattattggcccatgcaaaaatgctgggactgactgtaagtttaattcaagatgctggacgtactcagattgcaccaggctctcaaactgtcctagggattgggccaggaccagcagacctaattgacaaagtcactggtcacctaaaactttactaggtggactttgatatgacaacaacccctccatcacaagtgtttgaagcctgtcagattctaacaacaaaagctgaatttcttcacccaacttaaatgttcttgagatgaaaataaaacctattcccatgttc

SEQ ID NO: 21882 - DNA, 2507 bp, Homo sapiens
  source 1..2507: mol_type = unassigned DNA
gaagtgatgtgagtggtggctggtgcaaggagccacagtgggctgcctggggggctgatgccaccattccaggagcctcggtgaagagaggatatccatctgtgtagccgcttctctatacgggattccagctccatggcagcccgtctgctcctcctgggcatccttctcctgctgctgcccctgcccgtccctgccccgtgccacacagccgcacgctcagagtgcaagcgcagccacaagttcgtgcctggtgcatggctggccggggagggtgtggacgtgaccagcctccgccgctcgggctccttcccagtggacacacaaaggttcctgcggcccgacggcacctgcaccctctgtgaaaatgccctacaggagggcaccctccagcgcctgcctctggcgctcaccaactggcgggcccagggctctggctgccagcgccatgtaaccagggccaaagtcagctccactgaagctgtggcccgggatgcggctcgtagcatccgcaacgactggaaggtcgggctggacgtgactcctaagcccaccagcaatgtgcatgtgtctgtggccggctcacactcacaggcagccaactttgcagcccagaagacccaccaggaccagtacagcttcagcactgacacggtggagtgccgcttctacagtttccatgtggtacacactcccccgctgcaccctgacttcaagagggccctcggggacctgccccaccacttcaacgcctccacccagcccgcctacctcaggcttatctccaactacggcacccacttcatccgggctgtggagctgggtggccgcatatcggccctcactgccctgcgcacctgcgagctggccctggaagggctcacggacaacgaggtggaggactgcctgactgtcgaggcccaggtcaacataggcatccacggcagcatctctgccgaagccaaggcctgtgaggagaagaagaagaagcacaagatgacggcctccttccaccaaacctaccgggagcgccactcggaagtggttggcggccatcacacctccattaacgacctgctgttcgggatccaggccgggcccgagcagtactcagcctgggtaaactcgctgcccggcagccctggcctggtggactacaccctggaacccctgcacgtgctgctggacagccaggacccgcggcgggaggcactgaggagggccctgagtcagtacctgacggacagggctcgctggagggactgcagccggccgtgcccaccagggcggcagaagagcccccgagacccatgccagtgtgtgtgccatggctcagcggtcaccacccaggactgctgccctcggcagaggggcctggcccagctggaggtgaccttcatccaagcatggggcctgtggggggactggttcactgccacggatgcctatgtgaagctcttctttggtggccaggagctgaggacgagcaccgtgtgggacaataacaaccccatctggtcagtgcggctggattttggggatgtgctcctggccacaggggggcccctgaggttgcaggtctgggatcaggactctggcagggacgatgacctccttggcacctgtgatcaggctcccaagtctggttcccatgaggtgagatgcaacctgaatcatggccacctaaaattccgctatcatgccaggtgcttgccccacctgggaggaggcacctgcctggactatgtcccccaaatgcttctgggggagcctccaggaaaccggagtggggccgtgtggtgagaacagtgagcttggaaaggaccagtatgcttggactgaaggggttctcacagtgggagccagggctgtcttcgtattcccattagaccaagcttgtccaacccgaggcccgcatgcggcccaggatggctttgaatgcggcccaacgcaaattcgcaaactttcttaaaacattatgagtttctttttgctattttttttttttttttagctcatcggctatcgttagtgctagtggattttacatgtggcccaacacaattcttcttccaacgtggcccagagaagccaaaagattggatacgcatcagacagatggaaaagggagattcagactgtttttcagggaggtggctgggtttacacgctaatcccgattcaccctgtccaaactgcctaagccctccgccattctcaagccctgcagtcacagctacacagatcacagcttcagccaggagctgggcagaaggccaagaggctgttcccaccaggctgctcagggctggtcttttaggacccttcccttgagccctctatggtgtggcaaagccttcattgccttaactggagccccatcagctccagctgctctgtcttctttgcccacaatgctttgcccctgagacaaatggaggcctgtcctgacctgtctcaccatgtacatagcttgataaagggccaataaatatgatgttatggtg

SEQ ID NO: 21883 - DNA, 2488 bp, Homo sapiens
  source 1..2488: mol_type = unassigned DNA
tggctggtgcaaggagccacagtgggctgcctggggggctgatgccaccattccaggagcctcggtgaagagaggatatccatctgtgtagccgcttctctatacgggattccagatggcagcccgtctgctcctcctgggcatccttctcctgctgctgcccctgcccgtccctgccccgtgccacacagccgcacgctcagagtgcaagcgcagccacaagttcgtgcctggtgcatggctggccggggagggtgtggacgtgaccagcctccgccgctcgggctccttcccagtggacacacaaaggttcctgcggcccgacggcacctgcaccctctgtgaaaatgccctacaggagggcaccctccagcgcctgcctctggcgctcaccaactggcgggcccagggctctggctgccagcgccatgtaaccagggccaaagtcagctccactgaagctgtggcccgggatgcggctcgtagcatccgcaacgactggaaggtcgggctggacgtgactcctaagcccaccagcaatgtgcatgtgtctgtggccggctcacactcacaggcagccaactttgcagcccagaagacccaccaggaccagtacagcttcagcactgacacggtggagtgccgcttctacagtttccatgtggtacacactcccccgctgcaccctgacttcaagagggccctcggggacctgccccaccacttcaacgcctccacccagcccgcctacctcaggcttatctccaactacggcacccacttcatccgggctgtggagctgggtggccgcatatcggccctcactgccctgcgcacctgcgagctggccctggaagggctcacggacaacgaggtggaggactgcctgactgtcgaggcccaggtcaacataggcatccacggcagcatctctgccgaagccaaggcctgtgaggagaagaagaagaagcacaagatgacggcctccttccaccaaacctaccgggagcgccactcggaagtggttggcggccatcacacctccattaacgacctgctgttcgggatccaggccgggcccgagcagtactcagcctgggtaaactcgctgcccggcagccctggcctggtggactacaccctggaacccctgcacgtgctgctggacagccaggacccgcggcgggaggcactgaggagggccctgagtcagtacctgacggacagggctcgctggagggactgcagccggccgtgcccaccagggcggcagaagagcccccgagacccatgccagtgtgtgtgccatggctcagcggtcaccacccaggactgctgccctcggcagaggggcctggcccagctggaggtgaccttcatccaagcatggggcctgtggggggactggttcactgccacggatgcctatgtgaagctcttctttggtggccaggagctgaggacgagcaccgtgtgggacaataacaaccccatctggtcagtgcggctggattttggggatgtgctcctggccacaggggggcccctgaggttgcaggtctgggatcaggactctggcagggacgatgacctccttggcacctgtgatcaggctcccaagtctggttcccatgaggtgagatgcaacctgaatcatggccacctaaaattccgctatcatgccaggtgcttgccccacctgggaggaggcacctgcctggactatgtcccccaaatgcttctgggggagcctccaggaaaccggagtggggccgtgtggtgagaacagtgagcttggaaaggaccagtatgcttggactgaaggggttctcacagtgggagccagggctgtcttcgtattcccattagaccaagcttgtccaacccgaggcccgcatgcggcccaggatggctttgaatgcggcccaacgcaaattcgcaaactttcttaaaacattatgagtttctttttgctattttttttttttttttagctcatcggctatcgttagtgctagtggattttacatgtggcccaacacaattcttcttccaacgtggcccagagaagccaaaagattggatacgcatcagacagatggaaaagggagattcagactgtttttcagggaggtggctgggtttacacgctaatcccgattcaccctgtccaaactgcctaagccctccgccattctcaagccctgcagtcacagctacacagatcacagcttcagccaggagctgggcagaaggccaagaggctgttcccaccaggctgctcagggctggtcttttaggacccttcccttgagccctctatggtgtggcaaagccttcattgccttaactggagccccatcagctccagctgctctgtcttctttgcccacaatgctttgcccctgagacaaatggaggcctgtcctgacctgtctcaccatgtacatagcttgataaagggccaataaatatgatgttatggtga

SEQ ID NO: 21884 - DNA, 2533 bp, Homo sapiens
  source 1..2533: mol_type = unassigned DNA
gaagtgatgtgagtggtggctggtgcaaggagccacagtgggctgcctggggggctgatgccaccattccaggagcctcggtgaagagaggatatccatctgtgtagccgcttctctatacgggattccagagcccaagtgccccctgtctctgcagctccatggcagcccgtctgctcctcctgggcatccttctcctgctgctgcccctgcccgtccctgccccgtgccacacagccgcacgctcagagtgcaagcgcagccacaagttcgtgcctggtgcatggctggccggggagggtgtggacgtgaccagcctccgccgctcgggctccttcccagtggacacacaaaggttcctgcggcccgacggcacctgcaccctctgtgaaaatgccctacaggagggcaccctccagcgcctgcctctggcgctcaccaactggcgggcccagggctctggctgccagcgccatgtaaccagggccaaagtcagctccactgaagctgtggcccgggatgcggctcgtagcatccgcaacgactggaaggtcgggctggacgtgactcctaagcccaccagcaatgtgcatgtgtctgtggccggctcacactcacaggcagccaactttgcagcccagaagacccaccaggaccagtacagcttcagcactgacacggtggagtgccgcttctacagtttccatgtggtacacactcccccgctgcaccctgacttcaagagggccctcggggacctgccccaccacttcaacgcctccacccagcccgcctacctcaggcttatctccaactacggcacccacttcatccgggctgtggagctgggtggccgcatatcggccctcactgccctgcgcacctgcgagctggccctggaagggctcacggacaacgaggtggaggactgcctgactgtcgaggcccaggtcaacataggcatccacggcagcatctctgccgaagccaaggcctgtgaggagaagaagaagaagcacaagatgacggcctccttccaccaaacctaccgggagcgccactcggaagtggttggcggccatcacacctccattaacgacctgctgttcgggatccaggccgggcccgagcagtactcagcctgggtaaactcgctgcccggcagccctggcctggtggactacaccctggaacccctgcacgtgctgctggacagccaggacccgcggcgggaggcactgaggagggccctgagtcagtacctgacggacagggctcgctggagggactgcagccggccgtgcccaccagggcggcagaagagcccccgagacccatgccagtgtgtgtgccatggctcagcggtcaccacccaggactgctgccctcggcagaggggcctggcccagctggaggtgaccttcatccaagcatggggcctgtggggggactggttcactgccacggatgcctatgtgaagctcttctttggtggccaggagctgaggacgagcaccgtgtgggacaataacaaccccatctggtcagtgcggctggattttggggatgtgctcctggccacaggggggcccctgaggttgcaggtctgggatcaggactctggcagggacgatgacctccttggcacctgtgatcaggctcccaagtctggttcccatgaggtgagatgcaacctgaatcatggccacctaaaattccgctatcatgccaggtgcttgccccacctgggaggaggcacctgcctggactatgtcccccaaatgcttctgggggagcctccaggaaaccggagtggggccgtgtggtgagaacagtgagcttggaaaggaccagtatgcttggactgaaggggttctcacagtgggagccagggctgtcttcgtattcccattagaccaagcttgtccaacccgaggcccgcatgcggcccaggatggctttgaatgcggcccaacgcaaattcgcaaactttcttaaaacattatgagtttctttttgctattttttttttttttttagctcatcggctatcgttagtgctagtggattttacatgtggcccaacacaattcttcttccaacgtggcccagagaagccaaaagattggatacgcatcagacagatggaaaagggagattcagactgtttttcagggaggtggctgggtttacacgctaatcccgattcaccctgtccaaactgcctaagccctccgccattctcaagccctgcagtcacagctacacagatcacagcttcagccaggagctgggcagaaggccaagaggctgttcccaccaggctgctcagggctggtcttttaggacccttcccttgagccctctatggtgtggcaaagccttcattgccttaactggagccccatcagctccagctgctctgtcttctttgcccacaatgctttgcccctgagacaaatggaggcctgtcctgacctgtctcaccatgtacatagcttgataaagggccaataaatatgatgttatggtg

SEQ ID NO: 21885 - DNA, 5505 bp, Homo sapiens
  source 1..5505: mol_type = unassigned DNA
gctctcgaggtgtctggaggctcagcgagcgccggacccaggaggcccaaggagctggaggtgaccctcaggcagcaagaaccccacggaagggcgtgagccctgcagacagctgtgcggcacctcgggctgggctcctgttaggaggaagtgcctgcacccaggcagcggctcagaggcagctgctccatgcagaactgaagctggttctgcagcagaaaggggagaggacacaggagcctggggtgcaggtgcctcccagcaacgccatggaggccaggagccggagtgccgaggagctgaggcgggcggagttggtggaaattatcgtggagacggaggcgcagaccggggtcagcggcatcaacgtagcgggcggcggcaaagagggaatcttcgttcgggagctgcgcgaggactcacccgccgccaggagcctcagcctgcaggaaggggaccagctgctgagtgcccgagtgttcttcgagaacttcaagtacgaggacgcactacgcctgctgcaatgcgccgagccttacaaagtctccttctgcctgaagcgcactgtgcccaccggggacctggctctgcggcccgggaccgtgtctggctacgagatcaagggcccgcgggccaaggtggccaagctggtacgcgtgcttagcccggccccggccctggactgccccagcgatccggtctctgcgccgtgagccccattccccgccatcgtgggccagccttgccctctgtcttgtcactaacccaagctaattccaccctctgccccttcctctctgccccaaactcttccccgggaagggggacagacccaccccagcccagggccctcacccacctcggagaggcgtccccaccatcggatccaggcttgctaggggtcctgaaccaggctacttcgaaccaggaaagccagattccagcctgagtgctggcccaattactgctgagtggccctggacaaagttgtttctctccctgggcctcagtttccccatctctagaatgaggatgttggggaaaatcccggatcaggatctagaagtcttgggtccccgtccctacactcctgttgactcatttggagatcctagatggctgcctgctttcctgggcactcatggtgaaatgacaggcaagaagtggggatgatgtttggggaacaagatacttgacccagcacatcccccgcctggtccaataccaggtggggctcttcctgtccactcccagcctcccactgtcccaccgcctcctgcctctctcctctctccccagaacatccagagtctgtcccctgtgaagaagaagaagatggtgcctggggctctgggggtccccgctgacctggcccctgttgacgtcgagttctcctttcccaagttctcccgcctgcgtcggggcctcaaagccgaggctgtcaagggtcctgtcccggctgcccctgcccgccggcgcctccagctgcctcggctgcgtgtacgagaagtggccgaagaggctcaggcagcccggctggccgccgccgctcctccccccaggaaagccaaggtggaggctgaggtggctgcaggagctcgtttcacagcccctcaggtggagctggttgggccgcggctgccaggggcggaggtgggtgtcccccaggtctcagcccccaaggctgccccctcagcagaggcagctggtggctttgccctccacctgccaacccttgggctcggagccccggctccgcctgctgtggaggccccagccgtgggaatccaggtcccccaggtggagctgcctgccttgccctcactgcccactctgcccacacttccctgcctagagacccgggaaggggctgtgtcggtagtggtgcccaccctggatgtggcagcaccgactgtgggggtggacctggccttgccgggtgcagaggtggaggcccggggagaggcacctgaggtggccctgaagatgccccgccttagttttccccgatttggggctcgagcaaaggaagttgctgaggccaaggtagccaaggtcagccctgaggccagggtgaaaggtcccagacttcgaatgcccacctttgggctttccctcttggagccccggcccgctgctcctgaagttgtagagagcaagctgaagctgcccaccatcaagatgccctcccttggcatcggagtgtcagggcccgaggtcaaggtgcccaagggacctgaagtgaagctccccaaggctcctgaggtcaagcttccaaaagtgcccgaggcagcccttccagaggttcgactcccagaggtggagctccccaaggtgtcagagatgaaactcccaaaggtgccagagatggctgtgccggaggtgcggcttccagaggtagagctgcccaaagtgtcagagatgaaactcccaaaggtgccagagatggctgtgccggaggtgcggcttccagaggtacagctgctgaaagtgtcggagatgaaactcccaaaggtgccagagatggctgtgccggaggtgcggcttccagaggtacagctgccgaaagtgtcagagatgaaactcccagaggtgtcagaggtggctgtgccagaggtgcggcttccagaggtgcagctgccgaaagtgccagagatgaaagtccctgagatgaagcttccaaaggtgcctgagatgaaacttcctgagatgaaactccctgaagtgcaactcccgaaggtgcccgagatggccgtgcccgatgtgcacctcccagaagtgcagcttccaaaagtcccagagatgaagctccctgagatgaaactccctgaggtgaaactcccgaaggtgcccgagatggctgtgcccgatgtgcacctcccggaagtgcagctcccgaaagtcccagagatgaaactccctaaaatgcctgagatggctgtgccagaggttcgactccccgaggtgcagctgccaaaagtctcagagatgaaactccccaaggtgcctgaaatggccgtgcccgatgtgcacctcccagaggtgcagctgcccaaagtctgtgaaatgaaagtccctgacatgaagctcccagagataaaactccccaaggtgcctgagatggctgtgcccgatgtgcacctccccgaggtgcagctgccgaaagtgtcagagattcggctgccggaaatgcaagtgccgaaggttcccgacgtgcatcttccgaaggcaccagaggtgaagctgcccagggctccggaggtgcagctaaaggccaccaaggcagaacaggcagaagggatggaatttggcttcaagatgcccaagatgaccatgcccaagctagggagggcagagtccccatcacgtggcaagccaggcgaggcgggtgctgaggtctcagggaagctggtaacacttccctgtctgcagccagaggtggatggtgaggctcatgtgggtgtcccctctctcactctgccttcagtggagctagacctgccaggagcacttggcctgcaggggcaggtcccagccgctaaaatgggcaagggagagcgggtggagggccctgaggtggcagcaggggtcagggaagtgggcttccgagtgccctctgttgaaattgtcaccccacagctgcccgccgtggaaattgaggaagggcggctggagatgatagagacaaaagtcaagccctcttccaagttctccttacctaagtttggactctcggggccaaaggtggctaaggcagaggctgagggggctgggcgagctaccaagctgaaggtatccaaatttgccatctcactccccaaggctcgggtgggggctgaggctgaggccaaaggggctggggaggcaggcctgctgcctgccctcgatctgtccatcccacagctcagcctggatgcccacctgccctcaggcaaggtagaggtggcaggggccgacctcaagttcaaggggcccaggtttgctctccccaagtttggggtcagaggccgggacactgaggcagcagaactagtgccaggggtggctgagttggagggcaagggctggggctgggatgggagggtgaagatgcccaagctgaagatgccttcctttgggctggctcgagggaaggaagcagaagttcaaggtgatcgtgccagcccgggggaaaaggctgagtccaccgctgtgcagcttaagatccccgaggtggagctggtcacgctgggcgcccaggaggaagggagggcagagggggctgtggccgtcagtggaatgcagctgtcaggcctgaaggtgtccacagccgggcaggtggtcactgagggccatgacgcggggctgaggatgcctccgctgggcatctccctgccacaggtggagctgaccggctttggggaggcaggtaccccagggcagcaggctcagagtacagtcccttcagcagagggcacagcaggctacagggttcaggtgccccaggtgaccctgtctctgcctggagcccaggttgcaggtggtgagctgctggtgggtgagggtgtctttaagatgcccaccgtgacagtgccccagcttgagctggacgtggggctaagccgagaggcacaggcgggcgaggcggccacaggcgagggtgggctgaggctgaagttgcccacactgggggccagagctagggtggggggcgagggtgctgaggagcagcccccaggggccgagcgtaccttctgcctctcactgcccgacgtggagctctcgccatccgggggcaaccatgccgagtaccaggtggcagagggggagggagaggccggacacaagctcaaggtacggctgccccggtttggcctggtgcgggccaaggagggggccgaggagggtgagaaggccaagagccccaaactcaggctgccccgagtgggcttcagccaaagtgagatggtcactggggaagggtcccccagccccgaggaggaggaggaggaggaggaagagggcagtggggaaggggcctcgggtcgccggggccgggtccgggtccgcttgccacgtgtaggcctggcggccccttctaaagcctctcgggggcaggagggcgatgcagcccccaagtcccccgtcagagagaagtcacccaagttccgcttccccagggtgtccctaagccccaaggcccggagtgggagtggggaccaggaagagggtggattgcgggtgcggctgcccagcgtggggttttcagagacaggggctccaggcccggccaggatggagggggctcaggctgcggctgtctgaagcccctagtcagatggggatcccttcttgccttcctttctctaccccctcgctgttgtgtgtgtgataactagcactaaccctaagagggccgggaggtgggtgactgaccagggctggcagggaggcctgctcctgtctctctggcaggagtgcctgtaccccaccaagccatgtgaataaaataatctggaagtagcc

SEQ ID NO: 21886 - DNA, 4856 bp, Homo sapiens
  source 1..4856: mol_type = unassigned DNA
gctctcgaggtgtctggaggctcagcgagcgccggacccaggaggcccaaggagctggaggtgaccctcaggcagcaagaaccccacggaagggcgtgagccctgcagacagctgtgcggcacctcgggctgggctcctgttaggaggaagtgcctgcacccaggcagcggctcagaggcagctgctccatgcagaactgaagctggttctgcagcagaaaggggagaggacacaggagcctggggtgcaggtgcctcccagcaacgccatggaggccaggagccggagtgccgaggagctgaggcgggcggagttggtggaaattatcgtggagacggaggcgcagaccggggtcagcggcatcaacgtagcgggcggcggcaaagagggaatcttcgttcgggagctgcgcgaggactcacccgccgccaggagcctcagcctgcaggaaggggaccagctgctgagtgcccgagtgttcttcgagaacttcaagtacgaggacgcactacgcctgctgcaatgcgccgagccttacaaagtctccttctgcctgaagcgcactgtgcccaccggggacctggctctgcggcccgggaccgtgtctggctacgagatcaagggcccgcgggccaaggtggccaagctgaacatccagagtctgtcccctgtgaagaagaagaagatggtgcctggggctctgggggtccccgctgacctggcccctgttgacgtcgagttctcctttcccaagttctcccgcctgcgtcggggcctcaaagccgaggctgtcaagggtcctgtcccggctgcccctgcccgccggcgcctccagctgcctcggctgcgtgtacgagaagtggccgaagaggctcaggcagcccggctggccgccgccgctcctccccccaggaaagccaaggtggaggctgaggtggctgcaggagctcgtttcacagcccctcaggtggagctggttgggccgcggctgccaggggcggaggtgggtgtcccccaggtctcagcccccaaggctgccccctcagcagaggcagctggtggctttgccctccacctgccaacccttgggctcggagccccggctccgcctgctgtggaggccccagccgtgggaatccaggtcccccaggtggagctgcctgccttgccctcactgcccactctgcccacacttccctgcctagagacccgggaaggggctgtgtcggtagtggtgcccaccctggatgtggcagcaccgactgtgggggtggacctggccttgccgggtgcagaggtggaggcccggggagaggcacctgaggtggccctgaagatgccccgccttagttttccccgatttggggctcgagcaaaggaagttgctgaggccaaggtagccaaggtcagccctgaggccagggtgaaaggtcccagacttcgaatgcccacctttgggctttccctcttggagccccggcccgctgctcctgaagttgtagagagcaagctgaagctgcccaccatcaagatgccctcccttggcatcggagtgtcagggcccgaggtcaaggtgcccaagggacctgaagtgaagctccccaaggctcctgaggtcaagcttccaaaagtgcccgaggcagcccttccagaggttcgactcccagaggtggagctccccaaggtgtcagagatgaaactcccaaaggtgccagagatggctgtgccggaggtgcggcttccagaggtagagctgcccaaagtgtcagagatgaaactcccaaaggtgccagagatggctgtgccggaggtgcggcttccagaggtacagctgctgaaagtgtcggagatgaaactcccaaaggtgccagagatggctgtgccggaggtgcggcttccagaggtacagctgccgaaagtgtcagagatgaaactcccagaggtgtcagaggtggctgtgccagaggtgcggcttccagaggtgcagctgccgaaagtgccagagatgaaagtccctgagatgaagcttccaaaggtgcctgagatgaaacttcctgagatgaaactccctgaagtgcaactcccgaaggtgcccgagatggccgtgcccgatgtgcacctcccagaagtgcagcttccaaaagtcccagagatgaagctccctgagatgaaactccctgaggtgaaactcccgaaggtgcccgagatggctgtgcccgatgtgcacctcccggaagtgcagctcccgaaagtcccagagatgaaactccctaaaatgcctgagatggctgtgccagaggttcgactccccgaggtgcagctgccaaaagtctcagagatgaaactccccaaggtgcctgaaatggccgtgcccgatgtgcacctcccagaggtgcagctgcccaaagtctgtgaaatgaaagtccctgacatgaagctcccagagataaaactccccaaggtgcctgagatggctgtgcccgatgtgcacctccccgaggtgcagctgccgaaagtgtcagagattcggctgccggaaatgcaagtgccgaaggttcccgacgtgcatcttccgaaggcaccagaggtgaagctgcccagggctccggaggtgcagctaaaggccaccaaggcagaacaggcagaagggatggaatttggcttcaagatgcccaagatgaccatgcccaagctagggagggcagagtccccatcacgtggcaagccaggcgaggcgggtgctgaggtctcagggaagctggtaacacttccctgtctgcagccagaggtggatggtgaggctcatgtgggtgtcccctctctcactctgccttcagtggagctagacctgccaggagcacttggcctgcaggggcaggtcccagccgctaaaatgggcaagggagagcgggtggagggccctgaggtggcagcaggggtcagggaagtgggcttccgagtgccctctgttgaaattgtcaccccacagctgcccgccgtggaaattgaggaagggcggctggagatgatagagacaaaagtcaagccctcttccaagttctccttacctaagtttggactctcggggccaaaggtggctaaggcagaggctgagggggctgggcgagctaccaagctgaaggtatccaaatttgccatctcactccccaaggctcgggtgggggctgaggctgaggccaaaggggctggggaggcaggcctgctgcctgccctcgatctgtccatcccacagctcagcctggatgcccacctgccctcaggcaaggtagaggtggcaggggccgacctcaagttcaaggggcccaggtttgctctccccaagtttggggtcagaggccgggacactgaggcagcagaactagtgccaggggtggctgagttggagggcaagggctggggctgggatgggagggtgaagatgcccaagctgaagatgccttcctttgggctggctcgagggaaggaagcagaagttcaaggtgatcgtgccagcccgggggaaaaggctgagtccaccgctgtgcagcttaagatccccgaggtggagctggtcacgctgggcgcccaggaggaagggagggcagagggggctgtggccgtcagtggaatgcagctgtcaggcctgaaggtgtccacagccgggcaggtggtcactgagggccatgacgcggggctgaggatgcctccgctgggcatctccctgccacaggtggagctgaccggctttggggaggcaggtaccccagggcagcaggctcagagtacagtcccttcagcagagggcacagcaggctacagggttcaggtgccccaggtgaccctgtctctgcctggagcccaggttgcaggtggtgagctgctggtgggtgagggtgtctttaagatgcccaccgtgacagtgccccagcttgagctggacgtggggctaagccgagaggcacaggcgggcgaggcggccacaggcgagggtgggctgaggctgaagttgcccacactgggggccagagctagggtggggggcgagggtgctgaggagcagcccccaggggccgagcgtaccttctgcctctcactgcccgacgtggagctctcgccatccgggggcaaccatgccgagtaccaggtggcagagggggagggagaggccggacacaagctcaaggtacggctgccccggtttggcctggtgcgggccaaggagggggccgaggagggtgagaaggccaagagccccaaactcaggctgccccgagtgggcttcagccaaagtgagatggtcactggggaagggtcccccagccccgaggaggaggaggaggaggaggaagagggcagtggggaaggggcctcgggtcgccggggccgggtccgggtccgcttgccacgtgtaggcctggcggccccttctaaagcctctcgggggcaggagggcgatgcagcccccaagtcccccgtcagagagaagtcacccaagttccgcttccccagggtgtccctaagccccaaggcccggagtgggagtggggaccaggaagagggtggattgcgggtgcggctgcccagcgtggggttttcagagacaggggctccaggcccggccaggatggagggggctcaggctgcggctgtctgaagcccctagtcagatggggatcccttcttgccttcctttctctaccccctcgctgttgtgtgtgtgataactagcactaaccctaagagggccgggaggtgggtgactgaccagggctggcagggaggcctgctcctgtctctctggcaggagtgcctgtaccccaccaagccatgtgaataaaataatctggaagtagcc

SEQ ID NO: 21887 - DNA, 4462 bp, Homo sapiens
  source 1..4462: mol_type = unassigned DNA
gagctctcgaggtgtctggaggctcagcgagcgccggacccaggaggcccaaggagctggaggtgaccctcaggcagcaagaaccccacggaagggcgtgagccctgcagacagctgtgcggcacctcgggctgggctcctgttaggaggaagtgcctgcacccaggcagcggctcagaggcagctgctccatgcagaactgaagctggttctgcagcagaaaggggagaggacacaggagcctggggtgcaggtgcctcccagcaacgccatggaggccaggagccggagtgccgaggagctgaggcgggcggagttggtggaaattatcgtggagacggaggcgcagaccggggtcagcggcatcaacgtagcgggcggcggcaaagagggaatcttcgttcgggagctgcgcgaggactcacccgccgccaggagcctcagcctgcaggaaggggaccagctgctgagtgcccgagtgttcttcgagaacttcaagtacgaggacgcactacgcctgctgcaatgcgccgagccttacaaagtctccttctgcctgaagcgcactgtgcccaccggggacctggctctgcggcccgggaccgtgtctggctacgagatcaagggcccgcgggccaaggtggccaagctgaacatccagagtctgtcccctgtgaagaagaagaagatggtgcctggggctctgggggtccccgctgacctggcccctgttgacgtcgagttctcctttcccaagttctcccgcctgcgtcggggcctcaaagccgaggctgtcaagggtcctgtcccggctgcccctgcccgccggcgcctccagctgcctcggctgcgtgtacgagaagtggccgaagaggctcaggcagcccggctggccgccgccgctcctccccccaggaaagccaaggtggaggctgaggtggctgcaggagctcgtttcacagcccctcaggtggagctggttgggccgcggctgccaggggcggaggtgggtgtcccccaggtctcagcccccaaggctgccccctcagcagaggcagctggtggctttgccctccacctgccaacccttgggctcggagccccggctccgcctgctgtggaggccccagccgtgggaatccaggtcccccaggtggagctgcctgccttgccctcactgcccactctgcccacacttccctgcctagagacccgggaaggggctgtgtcggtagtggtgcccaccctggatgtggcagcaccgactgtgggggtggacctggccttgccgggtgcagaggtggaggcccggggagaggcacctgaggtggccctgaagatgccccgccttagttttccccgatttggggctcgagcaaaggaagttgctgaggccaaggtagccaaggtcagccctgaggccagggtgaaaggtcccagacttcgaatgcccacctttgggctttccctcttggagccccggcccgctgctcctgaagttgtagagagcaagctgaagctgcccaccatcaagatgccctcccttggcatcggagtgtcagggcccgaggtcaaggtgcccaagggacctgaagtgaagctccccaaggctcctgaggtcaagcttccaaaagtgcccgaggcagcccttccagaggttcgactcccagaggtggagctccccaaggtgtcagagatgaaactcccaaaggtgccagagatggctgtgccggaggtgcggcttccagaggtagagctgcccaaagtgtcagagatgaaactcccaaaggtgccagagatggctgtgccggaggtgcggcttccagaggtacagctgctgaaagtgtcggagatgaaactcccaaaggtgccagagatggctgtgccggaggtgcggcttccagaggtacagctgccgaaagtgtcagagatgaaactcccagaggtgtcagaggtggctgtgccagaggtgcggcttccagaggtgcagctgccgaaagtgccagagatgaaagtccctgagatgaagcttccaaaggtgcctgagatgaaacttcctgagatgaaactccctgaagtgcaactcccgaaggtgcccgagatggccgtgcccgatgtgcacctcccagaagtgcagcttccaaaagtcccagagatgaagctccctgagatgaaactccctgaggtgaaactcccgaaggtgcccgagatggctgtgcccgatgtgcacctcccggaagtgcagctcccgaaagtcccagagatgaaactccctaaaatgcctgagatggctgtgccagaggttcgactccccgaggtgcagctgccaaaagtctcagagatgaaactccccaaggtgcctgaaatggccgtgcccgatgtgcacctcccagaggtgcagctgcccaaagtctgtgaaatgaaagtccctgacatgaagctcccagagataaaactccccaaggtgcctgagatggctgtgcccgatgtgcacctccccgaggtgcagctgccgaaagtgtcagagattcggctgccggaaatgcaagtgccgaaggttcccgacgtgcatcttccgaaggcaccagaggtgaagctgcccagggctccggaggtgcagctaaaggccaccaaggcagaacaggcagaagggatggaatttggcttcaagatgcccaagatgaccatgcccaagctagggagggcagagtccccatcacgtggcaagccaggcgaggcgggtgctgaggtctcagggaagctggtaacacttccctgtctgcagccagaggtggatggtgaggctcatgtgggtgtcccctctctcactctgccttcagtggagctagacctgccaggagcacttggcctgcaggggcaggtcccagccgctaaaatgggcaagggagagcgggtggagggccctgaggtggcagcaggggtcagggaagtgggcttccgagtgccctctgttgaaattgtcaccccacagctgcccgccgtggaaattgaggaagggcggctggagatgatagagacaaaagtcaagccctcttccaagttctccttacctaagtttggactctcggggccaaaggtggctaaggcagaggctgagggggctgggcgagctaccaagctgaaggtatccaaatttgccatctcactccccaaggctcgggtgggggctgaggctgaggccaaaggggctggggaggcaggcctgctgcctgccctcgatctgtccatcccacagctcagcctggatgcccacctgccctcaggcaaggtagaggtggcaggggccgacctcaagttcaaggggcccaggtttgctctccccaagtttggggtcagaggccgggacactgaggcagcagaactagtgccaggggtggctgagttggagggcaagggctggggctgggatgggagggtgaagatgcccaagctgaaggtgtccacagccgggcaggtggtcactgagggccatgacgcggggctgaggatgcctccgctgggcatctccctgccacaggtggagctgaccggctttggggaggcaggtaccccagggcagcaggctcagagtacagtcccttcagcagagggcacagcaggctacagggttcaggtgccccaggtgaccctgtctctgcctggagcccaggttgcaggtggtgagctgctggtgggtgagggtgtctttaagatgcccaccgtgacagtgccccagcttgagctggacgtggggctaagccgagaggcacaggcgggcgaggcggccacaggcgagggtgggctgaggctgaagttgcccacactgggggccagagctagggtggggggcgagggtgctgaggagcagcccccaggggccgagcgtaccttctgcctctcactgcccgacgtggagctctcgccatccgggggcaaccatgccgagtaccaggtggcagagggggagggagaggccggacacaagctcaaggtacggctgccccggtttggcctggtgcgggccaaggagggggccgaggagggtgagaaggccaagagccccaaactcaggctgccccgagtgggcttcagccaaagtgagatggtcactggggaagggtcccccagccccgaggaggaggaggaggaggaggaagagggcagtggggaaggggcctcgggtcgccggggccgggtccgggtccgcttgccacgtgtaggcctggcggccccttctaaagcctctcgggggcaggagggcgatgcagcccccaagtcccccgtcagagagaagtcacccaagttccgcttccccagggtgtccctaagccccaaggcccggagtgggagtggggaccaggaagagggtggattgcgggtgcggctgcccagcgtggggttttcagagacaggggctccaggcccggccaggatggagggggctcaggctgcggctgtctga

SEQ ID NO: 21888 - DNA, 2296 bp, Homo sapiens
  source 1..2296: mol_type = unassigned DNA
cgcgggggagggagtgtaaatagagcgaaggctgctctgtgtcagccccgtcaccgccgggcggcccgcgcggagtctgagggagatggaagttgagcaagagcagcggcgcagaaaggtggaggccgggaggacgaagcttgctcacttccgacagagaaaaacaaaaggtgacagttcgcattcggagaaaaagacggcgaagaggaagggctcggctgtcgatgcgtctgtccaggaggagagtccggtaaccaaggaggacagcgcactctgtggaggaggggacatttgcaaaagcacatcatgtgacgacacccctgatggggcaggaggggcctttgcagctcagccggaggactgtgatggagagaagagagaggacttggaacagctgcagcagaagcaagtcaatgaccatcctccagagcagtgtgggatgttcacagtcagtgaccacccaccagaacagcatgggatgttcacagtcggtgaccacccaccagaacagcgtgggatgttcacagtcagtgaccacccaccagaacagcgtgggatgttcacaatcagtgaccaccaaccggaacagcgtgggatgttcacagtcagtgaccacacaccagaacagcgtgggatcttcacaatcagtgaccacccagcagaacagcgtgggatgttcacaaaggagtgtgaacaagaatgtgaacttgccattactgacctggagagcggccgtgaagatgaggctggcctgcatcagagtcaggccgtgcatggccttgagctggaggcgctgcgcctgagtctgagcaacatgcacacggcgcagctggagctgacacaggccaacctccagaaggagaaggagacggcattgacggagctgcgggagatgctcaacagccggcgtgcccaggagctggccctgctacagagcaggcagcagcacgagctggagctcctcagggagcagcacgcacgggagaaggaggaggtggtgctcaggtgtggacaggaagcagctgagctgaaggagaagttacaatcagaaatggagaaaaacgcccagatagtaaagaccctgaaggaagattgggaatctgaaaaagatttatgtttagaaaatctacgcaaagaactgtctgcaaagcatcaatcagaaatggaggatttacaaaaccagtttcagaaagaattggcagaacagagagctgagttggagaagatttttcaagacaaaaaccaggctgaacgggcccttaggaacctggagagtcatcatcaagcagccattgagaagttacgtgaagacctgcagtccgagcacggccggtgtttagaagacttggagttcaagttcaaagagagcgagaaagaaaaacagctggagttagagaatcttcaagcatcatatgaagacctgaaggcacaatcacaagaagagatcaggcgcttgtggtcccagcttgattctgccaggaccagtagacaggaattgagtgagctacatgagcaactcctggcgcgcacctctcgtgtggaagatttagaacagctgaagcagcgagaaaaaacccagcatgagtccgaactggagcaactgaggatttattttgaaaagaagttaagggatgctgagaaaacttaccaagaagacctaaccctgttacagcagaggctgcagggggcgagggaagatgctcttctggactctgtggaagttgggttgtcctgtgtgggtttagaagagaaacctgagaaaggaagaaaagatcacgttgatgaactcgagcctgagcgacataaggagagcctgccacgcttccaggcggagttagaagaaagccacaggcaccagctggaagcgctggagtctcccctctgcatccagcacgaggggcatgtctcagacagatgctgcgtagagacttcagcattgggacacgagtggcgtctggaaccctctgaagggcacagccaagagcttccctgggtgcatctccagggtgtgcaggacggggacttggaggccgacacagagcgggcagccagagtcttgggtctggaaactgagcacaaggtgcaactttcgcttcttcagactgagctcaaagaagaaattgaactcctaaaaatagaaaatagaaatttgtatgggaagttgcagcatgaaactcgtctgaaggacgatttggagaaggtaaaacacaatctaattgaagaccaccagaaggaactaaataatgctaagcaaaagactgagctgatgaaacaggaattccaaagaaaagaaacg

SEQ ID NO: 21889 - DNA, 10560 bp, Homo sapiens
  source 1..10560: mol_type = unassigned DNA
gcggggggagggcgagcccaagcgcgggggagggagtgtaaatagagcgaaggctgctctgtgtcagccccgtcaccgccgggcggcccgcgcggagtctgagggagatggaagttgagcaagagcagcggcgcagaaaggtggaggccgggaggacgaagcttgctcacttccgacagagaaaaacaaaaggtgacagttcgcattcggagaaaaagacggcgaagaggaagggctcggctgtcgatgcgtctgtccaggaggagagtccggtaaccaaggaggacagcgcactctgtggaggaggggacatttgcaaaagcacatcatgtgacgacacccctgatggggcaggaggggcctttgcagctcagccggaggactgtgatggagagaagagagaggacttggaacagctgcagcagaagcaagtcaatgaccatcctccagagcagtgtgggatgttcacagtcagtgaccacccaccagaacagcatgggatgttcacagtcggtgaccacccaccagaacagcgtgggatgttcacagtcagtgaccacccaccagaacagcatgggatgttcacagtcagtgaccacccaccagaacagcgtgggatgttcacaatcagtgaccaccaaccggaacagcgtgggatgttcacagtcagtgaccacacaccagaacagcgtgggatcttcacaatcagtgaccacccagcagaacagcgtgggatgttcacaaaggagtgtgaacaagaatgtgaacttgccattactgacctggagagcggccgtgaagatgaggctggcctgcatcagagtcaggccgtgcatggccttgagctggaggcgctgcgcctgagtctgagcaacatgcacacggcgcagctggagctgacacaggccaacctccagaaggagaaggagacggcattgacggagctgcgggagatgctcaacagccggcgtgcccaggagctggccctgctacagagcaggcagcagcacgagctggagctcctcagggagcagcacgcacgggagaaggaggaggtggtgctcaggtgtggacaggaagcagctgagctgaaggagaagttacaatcagaaatggagaaaaacgcccagatagtaaagaccctgaaggaagattgggaatctgaaaaagatttatgtttagaaaatctacgcaaagaactgtctgcaaagcatcaatcagaaatggaggatttacaaaaccagtttcagaaagaattggcagaacagagagctgagttggagaagatttttcaagacaaaaaccaggctgaacgggcccttaggaacctggagagtcatcatcaagcagccattgagaagttacgtgaagacctgcagtccgagcacggccggtgtttagaagacttggagttcaagttcaaagagagcgagaaagaaaaacagctggagttagagaatcttcaagcatcatatgaagacctgaaggcacaatcacaagaagagatcaggcgcttgtggtcccagcttgattctgccaggaccagtagacaggaattgagtgagctacatgagcaactcctggcgcgcacctctcgtgtggaagatttagaacagctgaagcagcgagaaaaaacccagcatgagtccgaactggagcaactgaggatttattttgaaaagaagttaagggatgctgagaaaacttaccaagaagacctaaccctgttacagcagaggctgcagggggcgagggaagatgctcttctggactctgtggaagttgggttgtcctgtgtgggtttagaagagaaacctgagaaaggaagaaaagatcacgttgatgaactcgagcctgagcgacataaggagagcctgccacgcttccaggcggagttagaagaaagccacaggcaccagctggaagcgctggagtctcccctctgcatccagcacgaggggcatgtctcagacagatgctgcgtagagacttcagcattgggacacgagtggcgtctggaaccctctgaagggcacagccaagagcttccctgggtgcatctccagggtgtgcaggacggggacttggaggccgacacagagcgggcagccagagtcttgggtctggaaactgagcacaaggtgcaactttcgcttcttcagactgagctcaaagaagaaattgaactcctaaaaatagaaaatagaaatttgtatgggaagttgcagcatgaaactcgtctgaaggacgatttggagaaggtaaaacacaatctaattgaagaccaccagaaggaactaaataatgctaagcaaaagactgagctgatgaaacaggaattccaaagaaaagaaacggactggaaagttatgaaggaggagctacagcgggaagctgaggagaagttaacattgatgctacttgaactgagagaaaaggctgaatccgagaaacagaccatcataaacaagtttgagcttcgagaagctgaaatgaggcagcttcaggaccaacaggcagcccagatcctggatctggagaggtccttgacggagcagcagggccgcctgcagcagctggaacaggacctcacttcagacgacgccctgcattgcagccagtgtgggcgggagccgcccacagcccaggacggggagcttgctgcgctccacgtgaaggaagactgcgccctgcagctgatgctggcccggagcaggtttttagaggaacgtaaagagatcaccgagaaattcagtgcggaacaagatgccttcctgcaggaggcccaggagcagcatgcccgtgagctgcagctcctccaggagagacaccagcagcagctcctgtcagtgacggcggagctcgaggccagacaccaggccgcgttgggcgagctgacagcctccttagagagcaagcagggggctctgctggctgcacgtgtggccgaactgcagacaaaacacgctgccgacctcggcgctctggagaccagacatctgtccagccttgattctttggaatcctgttacctctctgaatttcagaccatccgtgaggagcacaggcaggccctagagctcttacgagcagactttgaggaacaactgtggaaaaaggactctcttcaccaaacgattttgactcaagagttggagaaactgaagcggaaacacgaaggggagctacagtctgtgcgggaccacctgcgaaccgaagtgagcacagagctcgccggaaccgtggctcacgagctgcagggagtgcaccagggtgaatttggaagtgaaaagaaaactgctttgcatgaaaaagaggagacacttcggcttcagagtgcacaggcacagccttttcaccaagaggagaaagagtctttgtctctgcagcttcaaaagaagaatcaccaagtccagcagctgaaagaccaggttttatccttaagtcacgagatagaagagtgccgctccgagttggaggtgctgcagcagaggcgggagcgggagaaccgggaaggcgcaaacctcctctccatgctcaaggccgacgtcaacctgtcccacagcgaaagaggggccctccaggacgccctgcgcaggctgctgggtttgtttggagagacgctgagggcagccgtcaccctgaggagccggatcggggagcgcgtggggctctgcctggatgacgcgggcgcaggcctggccctgtcgacagctccggcgctggaggagacatggtctgatgtggccctcccggagttggacagaactttgtctgaatgtgcagagatgtcttccgtggctgaaattagcagccacatgcgtgaaagctttctcatgagcccagaaagtgtgcgggagtgtgagcagcccatccggagggtcttccagagcctcagcctggccgtggacggcctcatggagatggccctggactccagcaggcagctggaagaagcacgccaaattcattctcgttttgaaaaagaatttagttttaagaatgaggagacagcacaggttgtcaggaagcaccaggagctgctggagtgtttgaaggaggagagcgcagcaaaggcagagctggcgctggagctgcacaagactcagggtacccttgagggattcaaggtggagacagcagatctgaaggaggtgctggccgggaaggaggattccgagcaccgtctggtgctggagctggagagcctgagacggcagctgcagcaggcggcccaggagcaggcggcgctgagggaggagtgcacccgtctgtggagtcggggggaggccacagccacggacgccgaggccagagaagctgctctccggaaggaagtggaggatctgaccaaagaacagtcggagaccaggaagcaggctgagaaggaccgctcagccctgctctcccagatgaagattttggagtctgagttagaagaacagctgtctcagcatcgcgggtgtgccaagcaggcggaggccgtcactgccctggaacagcaggtggcatctctggacaagcatttgcgcaaccagcggcaattcatggatgagcaggcagccgagcgggagcacgagcgcgaggagttccagcaggagattcagaggctggaggggcagctccgccaggcggccaagccgcagccctggggccctcgcgacagccagcaggcgccgctggatggagaggttgagttgttacaacaaaagttgagagaaaagttggatgaatttaatgaattggctatacagaaagagtcggcagatagacaagtgttaatgcaggaagaagaaattaaacgtctggaggagatgaacatcaacatcaggaaaaaagtggcccagctccaggaagaagtggaaaaacagaaaaacatcgtgaaagggctggaacaggataaagaggtgttaaagaaacagcagatgagtagcttgcttctggcgtccacgttgcagtctacactagatgcaggcagatgtcccgagcctccttcgggcagccctcctgagggtccagaaatacagttagaggtgacacagagagcactcctgcggcgcgagagcgaggttttggacttaaaagaacagctagaaaagatgaaaggtgacttagaaagtaaaaatgaagaaatactacatctgaacttaaaattggacatgcagaacagccagactgctgtcagcctcagagaacttgaggaagagaacacgagcttgaaggtcatatataccagaagttctgagattgaagagctgaaagccactattgaaaatctgcaagagaatcagaaacgattacaaaaggagaaagcagaggaaattgaacaactccatgaagtcattgagaagctgcagcacgagctgtccctcatggggcctgtggtgcacgaagtcagcgacagtcaggctggcagtctgcagagcgagctgctctgctcccaggccgggggccctcgtgggcaggccctacagggcgagctcgaggctgcgctggaagccaaggaggccctgagccggctgctggctgaccaggagcgcaggcacagccaggccctggaggccctgcagcagcgcctccagggcgcagaggaggctgcggagctacagctggctgagctggagcgcaatgtagccctcagggaggctgaggtcgaagacatggcctcccggatccaggagttcgaagcggccctgaaagcaaaggaagcgacgattgccgagagaaatttagaaatcgacgctctgaaccagcggaaggcggcccactctgccgagctggaggccgtcctgttggccttggcccgcatccgccgcgccctggagcagcagcccctggcagccggggcggcgcctcccgagctgcagtggctccgagcgcagtgtgcccgcctcagccgccagctgcaggtgctgcaccagcggttcctgaggtgccaggtggagctggacaggcggcaggcccgcagagccacagctcacacacgggtgcccggggcccacccacagcctcgcatggatggtggcgccaaggcccaggtcaccggcgacgtggaggcctcccatgatgctgctttggagccggttgtccctgacccacagggtgatctgcagcctgtcctggtgacgttgaaggatgcacctctctgcaagcaagaaggcgtgatgtcagtgctcaccgtctgccagaggcagctgcagtcggagctgctcttggtgaaaaatgaaatgcgcctgagtctggaggacggcggcaagggtaaagaaaaagtactggaagattgtcagctgccgaaggtcgatctcgtagctcaggtgaaacagcttcaggaaaaactgaaccgtttgctgtattccatgaccttccagaatgtggatgctgccgacaccaaatctctgtggcccatggcctcagcacacctgttggagagcagctggagtgatgattcctgtgacggagaagagcctgacatatcaccccacatagacacatgtgatgccaatacagccacggggggtgtaactgatgttatcaaaaatcaggccatagacgcgtgtgatgccaatacaaccccagggggtgtaactgatgttatcaaaaattgggattccttgataccagatgaaatgccagattctcccattcaagaaaaatcagaatgtcaggacatgtctctttcttcaccgaccagcgtacttggtggctcccgccaccagagccacactgcagaggctgggccccggaagagcccggtcgggatgctggacctgtcttcctggagctcccctgaggtcctcaggaaggactggaccctggagccctggcccagcctccccgtgacaccccactcaggagccctgagcctgtgcagtgccgacacatccctgggggacagggcggacacctcgctgccacagacccaggggccggggctgctttgttccccaggcgtgtctgcagcagcgctggcactgcagtgggccgagtctccgccggctgacgaccaccatgtgcagaggacggctgtggagaaagatgtcgaagattttatcacaacatcctttgattctcaagaaacattaagttcacctcctcctggattagaaggaaaagctgatagaagtgagaaaagtgacggctcgggttttggagcaagactgagcccggggtcaggaggccctgaggctcaaactgctggtcctgtgacccctgcttccatctctggaaggtttcagccgctgccggaagccatgaaggagaaggaagtgcgtccgaagcacgtgaaggctttactgcagatggtgcgtgacgagagccaccagatcctggcgctgtcagaaggccttgcacccccaagcggcgagccacacccaccccggaaggaagacgagatacaggacatctcgctccatgggggaaagacgcaggaagtgcccaccgcgtgccccgattggagaggggaccttctgcaggttgtgcaagaggcctttgaaaaagagcaggagatgcagggggttgagctgcagccccgactcagtggctcagatctggggggtcacagctccctgctcgaaaggctggagaagatcatccgtgagcagggagacctgcaggaaaagtccctggagcatcttcgcttgccggaccggagcagcctgctgtccgagatccaggcgctgcgtgcccagctgcgcatgacgcacctgcagaaccaggagaagctgcagcacttgcgcacggcgctgacaagcgcagaggcgcgcgggagccagcaggagcaccagctgcgcaggcaggttgaactgctggcttataaagtagagcaggagaagtgcattgctggtgacttgcagaagacgctgagtgaagagcaagagaaggcaaacagcgtgcagaagctcctggcggcggagcagactgtagtgcgagatttgaagtccgacctctgtgagagcaggcagaagagcgaacagctgtcccggtccctctgcgaggtgcagcaggaggtcctccagctgagatccatgctgagcagtaaggagaacgagctgaaggccgcgcttcaggagctggagagtgagcaggggaaggggcgtgccctgcagagccagctggaggaggagcagctgcggcacctgcagagggagagccagagtgccaaggccctggaggagctgcgggcgtctttggagacacagcgtgctcagagcagtcgactctgcgtggcactgaaacacgagcagacggccaaggacaacctgcagaaggagctgcgtatcgagcactcacgctgcgaggccttgctggctcaggagcggagccagctctctgagctccagaaggaccttgcggctgagaagagccgcaccctggagctgtcagaggccttgcggcacgagcggctcctgaccgagcagctgagccagaggacacaggaggcttgcgtgcaccaggacacacaggcccatcacgctctgctgcagaagctgaaggaggagaagtcccgggtggtggacttgcaagcgatgcttgaaaaggtgcagcagcaagccctgcattctcagcagcagcttgaggctgaggctcagaagcactgtgaggcgctcaggagagagaaggaggtaagtgccacactgaagtcgacggtggaagccctgcacacccaaaaacgagagctgagatgctctctggagagagagagggagaaaccagcgtggttgcaggcagaattagagcagtcacacccacggttgaaagagcaagaaggacgcaaggctgcgaggaggagcgcggaggccaggcagagcccagcggctgcggagcagtggaggaagtggcagagagacaaggagaagctgcgagaattagaactgcagcgtcagcgtgacttgcataagatcaagcagcttcagcagacagtgagagacctggagtcgaaggacgaggtgcctggcagccgcctccacctaggttctgcccgcagggctgccggctcggatgcggaccacctccgggaacagcagcgagagctggaggcgatgaggcagcggctgctctctgccgcccggcttctcaccagcttcaccagccaggccgtggacaggacagttaatgattggacgtcatccaatgagaaagcagtgatgtctttactgcacacgttggaggagctgaagtctgacttgagcaggcccacctcctcccagaaaaaaatggcagcagagctgcagttccagtttgtggacgtcctgctgaaagacaatgtttccctcacaaaagcgctcagcacggtgacccaggagaagctggagctgagcagagccgtgtctaagcttgagaagttgctgaagcaccatctgcagaagggctgcagcccaagcaggtcggaaaggtctgcttggaagccagacgaaacggctccacagagttccctgaggcgcccagaccccggccggcttccaccagctgccagcgaggaagcacacaccagcaatgtcaagatggaaaaattgtacctgcattacttgagagcagagagctttagaaaagctctgatttatcaaaagaagtatcttttgctgttgattggtggattccaggattctgaacaagaaacactctccatgattgcccatttgggggtatttccttccaaagcagaacggaaaatcacatctcgtcctttcaccaggttccgcacggccgtcagggtggtcattgcaatattaagattacgttttttggttaagaaatggcaagaagtagatcggaaaggagctctggcacaaggcaaagcccctcgcccagggccccgagcacgacagccgcagtctccacccagaaccagagagtcccccccaacccgggatgtaccctctggccacaccagggaccctgccagaggccgcagactggcagcagcagcctccccacacagtgggggaagagccactccatccccaaattcaagattagaaagatccctgactgcttctcaagatccagaacattccttgacagagtatattcaccatttagaagtgatccagcaaagattgggaggggtactaccagattctacttcaaagaaatcctgccacccgatgattaaacagtgaataaaatgtcatggctctttcctgcgacaattctatttgaggaaaagatttgtttttcccttttcccaaggaagctcgtgggacagcatgggcactactcttcatgtgcggtgacaccagcccccagatgccttgaattaagtgtcctcacctttatgcatgactgcaaagccagctggagcattttctatggagcctccgtatgttttaggcccatgaccttcgtgaggtgacgggcactcactcccatgagccctggctgtgtgctgttgtgtgcctatcggcagatccatccttcctgcctccaaggaggatacacagagaatggcttcctgttgttttgtttattttcttaacgtgtacagatggaaacttcatttaaaaataaaaacaaaacaactcaaaaaggaataaaatttaatcactgttttgtttgtgaata

SEQ ID NO: 21890 - DNA, 6820 bp, Homo sapiens
  source 1..6820: mol_type = unassigned DNA
tccggcgggtcacatgactccagtctagctcgcattgcggctcccgcccgggcgagttctcgcccccgcgcggccgttgccgaggagacggcgcatgtcccgccgcgcgttgccccctctgcagtacccccgcccctcttctcccaccacaatgagatcctaagatggcggtggctgcggcggttggcgctgcgtagctgaggtcgaaaaggcggccactggggccgaggcagccaggaaacgtgtgggcctctctgctgcggtctccgagggccgaccgctgccggcggcgggtcgtgggggctgactgtcgctctgcctttgacaggagaggctgcttcttgtagaggaaacagctttgaagtgtggagcgggaaaggagcagtttctgagctgcaaaaactagtttctaaacagagagttaattgttaaatccagtatggccacaggaggaggtccctttgaagatggcatgaatgatcaggatttaccaaactggagtaatgagaatgttgatgacaggctcaacaatatggattggggtgcccaacagaagaaagcaaatagatcatcagaaaagaataagaaaaagtttggtgtagaaagtgataaaagagtaaccaatgatatttctccggagtcgtcaccaggagttggaaggcgaagaacaaagactccacatacgttcccacacagtagatacatgagtcagatgtctgtcccagagcaggcagaattagagaaactgaaacagcggataaacttcagtgatttagatcagagaagcattggaagtgattcccaaggtagagcaacagctgctaacaacaaacgtcagcttagtgaaaaccgaaagcccttcaactttttgcctatgcagattaatactaacaagagcaaagatgcatctacaaaccccccaaacagagaaacgattggatcagcacagtgtaaagagttgtttgcttctgctttaagtaatgacctcttgcaaaactgtcaggtgtctgaagaagatgggaggggagaacctgcaatggagagcagccagattgtaagcaggcttgttcaaattcgcgattatattactaaagctagttccatgcgggaagatcttgtagagaaaaatgagagatctgctaatgttgagcgccttactcatctaatagatcaccttaaagaacaagagaagtcatatatgaaatttcttaaaaaaatccttgccagagatcctcagcaggagcctatggaagagatagaaaatttgaagaaacaacatgatttattaaaaagaatgttacaacagcaggagcaactaagagctctacagggacggcaggctgcacttctagctctgcaacataaagcagagcaagctattgcagtgatggatgattctgttgttgcagaaactgcaggtagcttatctggcgtcagtatcacatctgaactaaatgaagaattgaatgacttaattcagcgttttcataatcagcttcgtgattctcagcctccagctgttccagacaatagaagacaggcagaaagtctttcattaactagggaggtttcccagagcaggaaaccatcagcttcagaacgtttacctgatgagaaagtcgaactttttagcaaaatgagagtgctacaggaaaagaaacaaaaaatggacaaattgcttggagaacttcatacacttcgagatcagcatcttaacaattcatcatcctctccacaaaggagtgtcgatcagagaagtacttcagctccctctgcttctgtaggcttggcaccggttgtcaatggagaatccaatagcctcacatcatctgttccttatcctactgcttctctagtatctcagaatgagagtgaaaacgaaggccacctcaatccatctgaaaaactccagaagttaaatgaagttcgaaagagattgaatgagctaagagaattagttcattattatgaacaaacgtcagacatgatgacagatgctgtgaatgaaaacaggaaagatgaagaaactgaagagtcagaatatgattctgagcatgaaaattccgagcctgttactaacattcgaaatccacaagtagcttccacttggaatgaagtaaatagtcatagtaatgcacagtgtgtttctaataatagagatgggcgaacagttaattctaattgtgaaattaacaacagatctgctgccaacataagggctctaaacatgcctccttctttagattgtcgatataatagagaaggggaacaggagattcatgttgcacaaggtgaagatgatgaggaggaggaggaagaagcagaagaggagggagtcagtggagcttcattatctagtcacaggagcagtctggttgatgagcatccagaagatgctgaatttgaacagaagatcaaccgacttatggctgcaaaacagaaacttagacagttacaagatcttgttgctatggtacaggatgatgatgcagctcaaggagttatctctgccagtgcatcaaatttggatgatttctacccagcagaagaagacaccaagcaaaattcaaataacactagaggaaatgccaataaaacacagaaagatactggagtaaatgaaaaggcaagagagaaattttatgaggctaaactacagcagcaacagagagagctaaaacaattgcaggaagaaagaaagaaactgattgacattcaggagaaaattcaagcattgcaaacggcatgccctgacttacagctgtcagctgctagtgtgggtaactgtcccaccaaaaaatatatgccagctgttacttcaaccccaactgttaatcaacacgagaccagtacaagcaaatctgtttttgagcctgaagattcttcaatagtagataatgagttgtggtcagaaatgagaagacatgaaatgttgagggaggagctgcgacagagaagaaagcagcttgaagctctgatggctgaacatcagaggaggcaaggtctagctgaaactgcatctccagtggctgtgtcattgagaagtgatggatctgagaacctatgtactcctcagcaaagtagaacagaaaaaacgatggcaacttggggagggtctacccagtgtgcactagatgaagaaggagatgaagacggttacctttctgaaggaattgttcggacagatgaagaggaggaagaagagcaagatgccagttccaatgataacttttctgtgtgtccttctaacagtgtgaatcataactcctacaatggaaaggaaactaaaaataggtggaagaacaattgccctttttcggcagatgaaaattatcgtcctttagccaagacaaggcaacagaatatcagcatgcaacggcaagaaaaccttcgttgggtgtcagagctctcttacgtagaagagaaagaacaatggcaagaacaaatcaatcagctaaagaaacagcttgattttagtgtcagtatttgtcagactttgatgcaagaccagcagactctatcttgtctgctacaaactcttctcacgggtccttacagtgttatgcccagcaatgttgcatctcctcaagtacacttcataatgcaccagttgaaccagtgctatactcagctaacatggcaacagaataatgttcagaggttgaaacaaatgctaaatgaacttatgcgccagcaaaatcagcatccagaaaaacctggaggcaaggaaagaggcagtagtgcatcgcaccctccttctcccagtttattttgtcctttcagctttccaacacagcctgtaaatctcttcaatatacctggatttactaacttttcatcatttgcaccaggtatgaatttcagccctttatttccttctaattttggagatttttctcagaatatctctacacccagtgaacagcagcaacccttagcccagaattcttcaggaaaaacagaatatatggcttttccaaaaccttttgaaagcagttcctctattggagcagagaaaccaaggaataaaaaactgcctgaagaggaggtggaaagcagtaggacaccatggttatatgaacaagaaggtgaagtagagaaaccatttatcaagactggattttcagtgtctgtagaaaaatctacaagtagtaaccgcaaaaatcaattagatacaaacggaagaagacgccagtttgatgaagaatcactggaaagctttagcagtatgcctgatccagtagatccaacaacagtgactaaaacattcaagacaagaaaagcgtctgcacaggccagcctggcatctaaagataaaactcccaagtcaaaaagtaagaagaggaattctactcagctgaaaagcagagttaaaaacatcaggtatgaaagtgccagtatgtctagcacatgtgaaccttgcaaaagtaggaacagacattcagcccagactgaagagcctgttcaagcaaaagtattcagcagaaagaatcatgagcaactggaaaaaataataaaatgtaataggtctacagaaatatcttcagaaactgggagtgatttttccatgtttgaagctttgcgagatactatttattctgaagtagctacattaatttctcaaaatgaatctcgtccacattttcttattgaactcttccatgagctgcagctactaaacacagactacttgagacagagggctttatatgcattgcaggacatagtatccagacatatttctgagagccatgaaaaaggagaaaatgtaaagtcagtaaactctggtacttggatagcatcaaactcagaacttactcctagtgagagccttgctactactgatgatgaaacttttgagaagaactttgaaagagaaacccataaaataagtgagcaaaatgatgctgataatgctagtgtcctgtctgtatcatcaaattttgagccttttgcaacagatgatctaggtaacaccgtgattcacttagatcaagcattagccagaatgagagaatatgagcgtatgaagactgaggctgaaagtaactcaaatatgagatgcacctgcaggattattgaggatggagatggtgctggtgcaggtactacagttaataatttagaagaaactcccgttattgaaaatcgtagttcacaacaacctgtaagtgaagtttctaccatcccatgtcctagaattgatactcagcagctggaccggcaaattaaagcaattatgaaagaagtcattccttttttgaaggagcacatggatgaagtatgctcctcgcagcttctaacttcagtaaggcgcatggttttgacccttacccagcaaaatgatgagagcaaagagtttgtaaagttctttcataaacaacttggaagtatattacaggattcactggcaaaatttgctggcagaaaactgaaagactgtggagaagatcttcttgtagagatatctgaagtgttgttcaatgaattggctttctttaagcttatgcaagatttggataataatagtataactgttaaacagagatgcaaaaggaaaatagaagcaactggagtgatacaatcttgtgccaaagaggctaaaaggattcttgaagatcatggctcacctgctggagagattgatgatgaagacaaagacaaggatgaaactgaaacagttaagcagactcaaacatctgaggtgtatgatggtcccaaaaatgtaagatctgatatttctgatcaagaggaagatgaagaaagtgaaggatgtccagtgtctattaatttgtctaaagctgaaactcaggctttaactaattatggaagtggagaagatgaaaatgaggatgaagaaatggaagaatttgaagaaggccctgtggatgtccagacttccctccaggctaacactgaagctactgaagaaaatgaacatgatgaacaggtcctacaacgtgactttaaaaagacagcagaaagcaaaaatgtcccattggaacgagaagccactagtaaaaatgaccaaaataactgtcctgtgaaaccctgttacctcaatatcttggaagatgagcaacctttaaatagtgctgcccataaggagtcacctcctactgttgattcaactcaacagcctaaccctttgccgttacgtttacctgaaatggaacccttagtgcctagagtcaaagaagttaaatctgctcaggaaactcctgaaagctctctggctggaagtcctgatactgaatctccagtgttagtgaatgactatgaagcagaatctggtaatataagtcaaaagtctgatgaagaagattttgtaaaagttgaagatttaccactgaaactgacaatatattcagaggcagatctaagaaagaaaatggtagaagaagaacagaaaaaccatttatctggtgaaatatgtgaaatgcagaccgaagaattagctggaaattctgagacactaaaagaacctgaaacggtgggagcccagagtatatgagatgtcttcagaggctcatctaactctgtccttacatactcaatgcatatatgaaaacaatactaaataaacatctgatctgtataaaaatgtaaattagtttgacactgcttttttgataggtgtggtcatttctccccatggtagtttaaaacatcagaaactgaattctggacagatttaagccttgacacactgtgtttttttttttttcccccttcttttttgggtcttcatttttttccccattgtgatgtttggtaacgaatttaaaatgtagttttaaataaagtttggacttatcta

SEQ ID NO: 21891 - DNA, 8896 bp, Homo sapiens
  source 1..8896: mol_type = unassigned DNA
ctccagtctagctcgcattgcggctcccgcccgggcgagttctcgcccccgcgcggccgttgccgaggagacggcgcatgtcccgccgcgcgttgccccctctgcagtacccccgcccctcttctcccaccacaatgagatcctaagatggcggtggctgcggcggttggcgctgcgtagctgaggtcgaaaaggcggccactggggccgaggcagccaggaaacgtgtgggcctctctgctgcggtctccgagggccgaccgctgccggcggcgggtcgtgggggctgactgtcgctctgcctttgacaggagaggctgcttcttgtagaggaaacagctttgaagtgtggagcgggaaaggagcagtttctgagctgcaaaaactagtttctaaacagagagttaattgttaaatccagtatggccacaggaggaggtccctttgaagatggcatgaatgatcaggatttaccaaactggagtaatgagaatgttgatgacaggctcaacaatatggattggggtgcccaacagaagaaagcaaatagatcatcagaaaagaataagaaaaagtttggtgtagaaagtgataaaagagtaaccaatgatatttctccggagtcgtcaccaggagttggaaggcgaagaacaaagactccacatacgttcccacacagtagatacatgagtcagatgtctgtcccagagcaggcagaattagagaaactgaaacagcggataaacttcagtgatttagatcagagaagcattggaagtgattcccaaggtagagcaacagctgctaacaacaaacgtcagcttagtgaaaaccgaaagcccttcaactttttgcctatgcagattaatactaacaagagcaaagatgcatctacaaaccccccaaacagagaaacgattggatcagcacagtgtaaagagttgtttgcttctgctttaagtaatgacctcttgcaaaactgtcaggtgtctgaagaagatgggaggggagaacctgcaatggagagcagccagattgtaagcaggcttgttcaaattcgcgattatattactaaagctagttccatgcgggaagatcttgtagagaaaaatgagagatctgctaatgttgagcgccttactcatctaatagatcaccttaaagaacaagagaagtcatatatgaaatttcttaaaaaaatccttgctagagaaaatgaggaggaggatgttcggactatagattcagctgtgggatctggttctgtagctgagagcacatcgctaaacatagatgtgcagtctgaggcttcagataccacggccagagatcctcagcaggagcctatggaagagatagaaaatttgaagaaacaacatgatttattaaaaagaatgttacaacagcaggagcaactaagagctctacagggacggcaggctgcacttctagctctgcaacataaagcagagcaagctattgcagtgatggatgattctgttgttgcagaaactgcaggtagcttatctggcgtcagtatcacatctgaactaaatgaagaattgaatgacttaattcagcgttttcataatcagcttcgtgattctcagcctccagctgttccagacaatagaagacaggcagaaagtctttcattaactagggaggtttcccagagcaggaaaccatcagcttcagaacgtttacctgatgagaaagtcgaactttttagcaaaatgagagtgctacaggaaaagaaacaaaaaatggacaaattgcttggagaacttcatacacttcgagatcagcatcttaacaattcatcatcctctccacaaaggagtgtcgatcagagaagtacttcagctccctctgcttctgtaggcttggcaccggttgtcaatggagaatccaatagcctcacatcatctgttccttatcctactgcttctctagtatctcagaatgagagtgaaaacgaaggccacctcaatccatctgaaaaactccagaagttaaatgaagttcgaaagagattgaatgagctaagagaattagttcattattatgaacaaacgtcagacatgatgacagatgctgtgaatgaaaacaggaaagatgaagaaactgaagagtcagaatatgattctgagcatgaaaattccgagcctgttactaacattcgaaatccacaagtagcttccacttggaatgaagtaaatagtcatagtaatgcacagtgtgtttctaataatagagatgggcgaacagttaattctaattgtgaaattaacaacagatctgctgccaacataagggctctaaacatgcctccttctttagattgtcgatataatagagaaggggaacaggagattcatgttgcacaaggtgaagatgatgaggaggaggaggaagaagcagaagaggagggagtcagtggagcttcattatctagtcacaggagcagtctggttgatgagcatccagaagatgctgaatttgaacagaagatcaaccgacttatggctgcaaaacagaaacttagacagttacaagatcttgttgctatggtacaggatgatgatgcagctcaaggagttatctctgccagtgcatcaaatttggatgatttctacccagcagaagaagacaccaagcaaaattcaaataacactagaggaaatgccaataaaacacagaaagatactggagtaaatgaaaaggcaagagagaaattttatgaggctaaactacagcagcaacagagagagctaaaacaattgcaggaagaaagaaagaaactgattgacattcaggagaaaattcaagcattgcaaacggcatgccctgacttacagctgtcagctgctagtgtgggtaactgtcccaccaaaaaatatatgccagctgttacttcaaccccaactgttaatcaacacgagaccagtacaagcaaatctgtttttgagcctgaagattcttcaatagtagataatgagttgtggtcagaaatgagaagacatgaaatgttgagggaggagctgcgacagagaagaaagcagcttgaagctctgatggctgaacatcagaggaggcaaggtctagctgaaactgcatctccagtggctgtgtcattgagaagtgatggatctgagaacctatgtactcctcagcaaagtagaacagaaaaaacgatggcaacttggggagggtctacccagtgtgcactagatgaagaaggagatgaagacggttacctttctgaaggaattgttcggacagatgaagaggaggaagaagagcaagatgccagttccaatgataacttttctgtgtgtccttctaacagtgtgaatcataactcctacaatggaaaggaaactaaaaataggtggaagaacaattgccctttttcggcagatgaaaattatcgtcctttagccaagacaaggcaacagaatatcagcatgcaacggcaagaaaaccttcgttgggtgtcagagctctcttacgtagaagagaaagaacaatggcaagaacaaatcaatcagctaaagaaacagcttgattttagtgtcagtatttgtcagactttgatgcaagaccagcagactctatcttgtctgctacaaactcttctcacgggtccttacagtgttatgcccagcaatgttgcatctcctcaagtacacttcataatgcaccagttgaaccagtgctatactcagctaacatggcaacagaataatgttcagaggttgaaacaaatgctaaatgaacttatgcgccagcaaaatcagcatccagaaaaacctggaggcaaggaaagaggcagtagtgcatcgcaccctccttctcccagtttattttgtcctttcagctttccaacacagcctgtaaatctcttcaatatacctggatttactaacttttcatcatttgcaccaggtatgaatttcagccctttatttccttctaattttggagatttttctcagaatatctctacacccagtgaacagcagcaacccttagcccagaattcttcaggaaaaacagaatatatggcttttccaaaaccttttgaaagcagttcctctattggagcagagaaaccaaggaataaaaaactgcctgaagaggaggtggaaagcagtaggacaccatggttatatgaacaagaaggtgaagtagagaaaccatttatcaagactggattttcagtgtctgtagaaaaatctacaagtagtaaccgcaaaaatcaattagatacaaacggaagaagacgccagtttgatgaagaatcactggaaagctttagcagtatgcctgatccagtagatccaacaacagtgactaaaacattcaagacaagaaaagcgtctgcacaggccagcctggcatctaaagataaaactcccaagtcaaaaagtaagaagaggaattctactcagctgaaaagcagagttaaaaacatcaggtatgaaagtgccagtatgtctagcacatgtgaaccttgcaaaagtaggaacagacattcagcccagactgaagagcctgttcaagcaaaagtattcagcagaaagaatcatgagcaactggaaaaaataataaaatgtaataggtctacagaaatatcttcagaaactgggagtgatttttccatgtttgaagctttgcgagatactatttattctgaagtagctacattaatttctcaaaatgaatctcgtccacattttcttattgaactcttccatgagctgcagctactaaacacagactacttgagacagagggctttatatgcattgcaggacatagtatccagacatatttctgagagccatgaaaaaggagaaaatgtaaagtcagtaaactctggtacttggatagcatcaaactcagaacttactcctagtgagagccttgctactactgatgatgaaacttttgagaagaactttgaaagagaaacccataaaataagtgagcaaaatgatgctgataatgctagtgtcctgtctgtatcatcaaattttgagccttttgcaacagatgatctaggtaacaccgtgattcacttagatcaagcattagccagaatgagagaatatgagcgtatgaagactgaggctgaaagtaactcaaatatgagatgcacctgcaggattattgaggatggagatggtgctggtgcaggtactacagttaataatttagaagaaactcccgttattgaaaatcgtagttcacaacaacctgtaagtgaagtttctaccatcccatgtcctagaattgatactcagcagctggaccggcaaattaaagcaattatgaaagaagtcattccttttttgaaggagcacatggatgaagtatgctcctcgcagcttctaacttcagtaaggcgcatggttttgacccttacccagcaaaatgatgagagcaaagagtttgtaaagttctttcataaacaacttggaagtatattacaggattcactggcaaaatttgctggcagaaaactgaaagactgtggagaagatcttcttgtagagatatctgaagtgttgttcaatgaattggctttctttaagcttatgcaagatttggataataatagtataactgttaaacagagatgcaaaaggaaaatagaagcaactggagtgatacaatcttgtgccaaagaggctaaaaggattcttgaagatcatggctcacctgctggagagattgatgatgaagacaaagacaaggatgaaactgaaacagttaagcagactcaaacatctgaggtgtatgatggtcccaaaaatgtaagatctgatatttctgatcaagaggaagatgaagaaagtgaaggatgtccagtgtctattaatttgtctaaagctgaaactcaggctttaactaattatggaagtggagaagatgaaaatgaggatgaagaaatggaagaatttgaagaaggccctgtggatgtccagacttccctccaggctaacactgaagctactgaagaaaatgaacatgatgaacaggtcctacaacgtgactttaaaaagacagcagaaagcaaaaatgtcccattggaacgagaagccactagtaaaaatgaccaaaataactgtcctgtgaaaccctgttacctcaatatcttggaagatgagcaacctttaaatagtgctgcccataaggagtcacctcctactgttgattcaactcaacagcctaaccctttgccgttacgtttacctgaaatggaacccttagtgcctagagtcaaagaagttaaatctgctcaggaaactcctgaaagctctctggctggaagtcctgatactgaatctccagtgttagtgaatgactatgaagcagaatctggtaatataagtcaaaagtctgatgaagaagattttgtaaaagttgaagatttaccactgaaactgacaatatattcagaggcagatctaagaaagaaaatggtagaagaagaacagaaaaaccatttatctggtgaaatatgtgaaatgcagaccgaagaattagctggaaattctgagacactaaaagaacctgaaacggtgggagcccagagtatatgagatgtcttcagaggctcatctaactctgtccttacatactcaatgcatatatgaaaacaatactaaataaacatctgatctgtataaaaatgtaaattagtttgacactgcttttttgataggtgtggtcatttctccccatggtagtttaaaacatcagaaactgaattctggacagatttaagccttgacacactgtgtttttttttttttcccccttcttttttgggtcttcatttttttccccattgtgatgtttggtaacgaatttaaaatgtagttttaaataaagtttggacttatctataaagtatcttttttggaaattatattgaattctatacagcaagtcaatgttttatataactttaggctgctcagagaagagcaatggttaagagttagttagagaaatatattatttgttataaagcccatccattaggccagtcttccaactaatgccagtgttgctgctgttgggtctgatgttcttcttttagatacctgcaggtcctattcctgtgcaagaatagggcagattatcaagatatccaggatacctatgaagttattatagaatatttattaatccattgaaattggataataagtttagaacataggttctcagtatctagaacttacatcattatcatctgtttgttaggatttgaaattctggaaaatatttatctacatcgcctcagactaaaagtaaaaaaaataagctttatataattagggagatttctgcacagagaagtaacattgtggttaattttaaatgaaaaacttaactttttcaagtggggataaataatacaactaaatttctgtaatagtaagattctgtatgccttcagataaacttgcctattgagatggtaatttaaagccaaagcatagcagtttcttttgtgtgtagtgaggttgaagcagatttgcaggtgaagtattgaaagtttatgtgactttaagtcagcttttgaaaagtgattgatttgctttttatcccaaactgtccatatacccagtaaggcttcaaaaaaccagtcaacaatgagtaagtcaatcttatagattcttcttcctcgaataaaatacaaagaattagttccaataagtattttaactttgttaacaactgaaataccccataaaaaaagaacttgttgagagtatttctttaaaatggttacttgctgcccaggcaccatggctcactcctgtaatcccagcaccttgggaggccgaggcgggcagatcacgaggtcaagagattgagaccatcctgcccaacatgggggaaaccccgtctctactaaaaataaaaaaattagctgggagaggtggcacgtgcctgtagtcctagctacttgggaggctaaggcaggagaatagcctgaacccgggaggtggaggttgcaggttgcagtgagccgagatcatgccactgcactccagcctggcaacagagcgagactctgtctcaaaaaaaaaaaaaaaaaaaaaaaaaagttaacttgctgtatacctcagtgtaatgtccattcaaggagtattaaatgaggatttccctgcgaggacatttactgtattgctacttaaattatggaagacaatatatcttcaactttaataaaacctattcagaaaattaccaattcagaattcggagttcttatccaggtgctctaactaacttcagggaaattggaacaataagttatgttacatgcacactcaaattctttattttctccactttaagcaggaaagggtaaaaactgttttggtactcaagcccagccttacatactgtgtttctctctctgtctgcatgcatattaaagtggaaaaattgtatttatatcttagttattaccatagtacctatgaaccttatcaaaattgcttatttgactggtgttacagctgctattaatctaagtctattgtttttctattttagtagataatttagttttaaaatacgtagggtttgagagcagatatatttatttaatctgttttctctagtaactattgctgaagggttaggcattcagtattcctatttgtcctaattttgaagttaaaaattttggttacagatagatagagggagaaaagttcaaaatgagtgagagagaactttatgcaggttgagataatgcctaaaataatgagctggccagactgtggaggtactctttgtattttgtaacattgactttgggtaaatgctttttcactgttaataaatatatatcctgtat

SEQ ID NO: 21892 - DNA, 2379 bp, Homo sapiens
  source 1..2379: mol_type = unassigned DNA
gaaaagcgtctgcacaggccagcctggcatctaaagataaaactcccaagtcaaaaagtaagaagaggaattctactcagctgaaaagcagagttaaaaacatcaggtatgaaagtgccagtatgtctagcacatgtgaaccttgcaaaagtaggaacagacattcagcccagactgaagagcctgttcaagcaaaagtattcagcagaaagaatcatgagcaactggaaaaaataataaaatgtaataggtctacagaaatatcttcagcacatgctaggagaatactacagcagtctaacagaaatgcatgcaatgaagcgccagaaactgggagtgatttttccatgtttgaagctttgcgagatactatttattctgaagtagctacattaatttctcaaaatgaatctcgtccacattttcttattgaactcttccatgagctgcagctactaaacacagactacttgagacagagggctttatatgcattgcaggacatagtatccagacatatttctgagagccatgaaaaaggagaaaatgtaaagtcagtaaactctggtacttggatagcatcaaactcagaacttactcctagtgagagccttgctactactgatgatgaaacttttgagaagaactttgaaagagaaacccataaaataagtgagcaaaatgatgctgataatgctagtgtcctgtctgtatcatcaaattttgagccttttgcaacagatgatctaggtaacaccgtgattcacttagatcaagcattagccagaatgagagaatatgagcgtatgaagactgaggctgaaagtaactcaaatatgagatgcacctgcaggattattgaggatggagatggtgctggtgcaggtactacagttaataatttagaagaaactcccgttattgaaaatcgtagttcacaacaacctgtaagtgaagtttctaccatcccatgtcctagaattgatactcagcagctggaccggcaaattaaagcaattatgaaagaagtcattccttttttgaaggagcacatggatgaagtatgctcctcgcagcttctaacttcagtaaggcgcatggttttgacccttacccagcaaaatgatgagagcaaagagtttgtaaagttctttcataaacaacttggaagtatattacaggattcactggcaaaatttgctggcagaaaactgaaagactgtggagaagatcttcttgtagagatatctgaagtgttgttcaatgaattggctttctttaagcttatgcaagatttggataataatagtataactgttaaacagagatgcaaaaggaaaatagaagcaactggagtgatacaatcttgtgccaaagaggctaaaaggattcttgaagatcatggctcacctgctggagagattgatgatgaagacaaagacaaggatgaaactgaaacagttaagcagactcaaacatctgaggtgtatgatggtcccaaaaatgtaagatctgatatttctgatcaagaggaagatgaagaaagtgaaggatgtccagtgtctattaatttgtctaaagctgaaactcaggctttaactaattatggaagtggagaagatgaaaatgaggatgaagaaatggaagaatttgaagaaggccctgtggatgtccagacttccctccaggctaacactgaagctactgaagaaaatgaacatgatgaacaggtcctacaacgtgactttaaaaagacagcagaaagcaaaaatgtcccattggaacgagaagccactagtaaaaatgaccaaaataactgtcctgtgaaaccctgttacctcaatatcttggaagatgagcaacctttaaatagtgctgcccataaggagtcacctcctactgttgattcaactcaacagcctaaccctttgccgttacgtttacctgaaatggaacccttagtgcctagagtcaaagaagttaaatctgctcaggaaactcctgaaagctctctggctggaagtcctgatactgaatctccagtgttagtgaatgactatgaagcagaatctggtaatataagtcaaaagtctgatgaagaagattttgtaaaagttgaagatttaccactgaaactgacaatatattcagaggcagatctaagaaagaaaatggtagaagaagaacagaaaaaccatttatctggtgaaatatgtgaaatgcagaccgaagaattagctggaaattctgagacactaaaagaacctgaaacggtgggagcccagagtatatgagatgtcttcagaggctcatctaactctgtccttacatactcaatgcatatatgaaaacaatactaaataaacatctgatctgtat

SEQ ID NO: 21893 - DNA, 2379 bp, Homo sapiens; identical to SEQ ID NO: 21892
  source 1..2379: mol_type = unassigned DNA

SEQ ID NO: 21894 - DNA, 1426 bp, Homo sapiens
  source 1..1426: mol_type = unassigned DNA
gtggctgcggcggttggcgctgcgtagctgaggtcgaaaaggcggccactggggccgaggcagccaggaaacgtgtgggcctctctgctgcggtctccgagggccgaccgctgccggcggcgggtcgtgggggctgactgtcgctctgcctttgacaggagaggctgcttcttgtagagagagttaattgttaaatccagtatggccacaggaggaggtccctttgaagatggcatgaatgatcaggatttaccaaactggagtaatgagaatgttgatgacaggctcaacaatatggattggggtgcccaacagaagaaagcaaatagatcatcagaaaagaataagaaaaagtttggtgtagaaagtgataaaagagtaaccaatgatatttctccggagtcgtcaccaggagttggaaggcgaagaacaaagactccacatacgttcccacacagtagatacatgagtcagatgtctgtcccagagcaggcagaattagagaaactgaaacagcggataaacttcagtgatttagatcagagaagcattggaagtgattcccaaggtagagcaacagctgctaacaacaaacgtcagcttagtgaaaaccgaaagcccttcaactttttgcctatgcagattaatactaacaagagcaaagatgcatctacaaaccccccaaacagagaaacgattggatcagcacagtgtaaagagttgtttgcttctgctttaagtaatgacctcttgcaaaactgtcaggtgtctgaagaagatgggaggggagaacctgcaatggagagcagccagattgtaagcaggcttgttcaaattcgcgattatattactaaagctagttccatgcgggaagatcttgtagagaaaaatgagagatctgctaatgttgagcgccttactcatctaatagatcaccttaaagaacaagagaagtcatatatgaaatttcttaaaaaaatccttgccagagatcctcagcaggagcctatggaagagatagaaaatttgaagaaacaacatgatttattaaaaagaatgttacaacagcaggagcaactaagagctctacagggacggcaggctgcacttctagctctgcaacataaagcagagcaagctattgcagtgatggatgattctgttgttgcagaaactgcaggtagcttatctggcgtcagtatcacatctgaactaaatgaagaattgaatgacttaattcagcgttttcataatcagcttcgtgattctcagcctccagctgttccagacaatagaagacaggcagaaagtctttcattaactagggaggtttcccagagcaggaaaccatcagcttcagaacgtttacctgatgagaaagtcgaactttttagcaaaatgagagtgctacaggaaaagaaacaaa

SEQ ID NO: 21895 - DNA, 2953 bp, Homo sapiens
  source 1..2953: mol_type = unassigned DNA
caggagtgacaggaattgtttctgcctgaggagacactctgcagcctgggctctgtgagactgaggtggcggtcagccggagtgagtgttggggtcctggggcacctgccttacatggcttgtttatgaacattaaagggaagaagttgaagcttgaggagcgaggatggcagtcaacaaaggcctcaccttgctggatggagacctccctgagcaggagaatgtgctgcagcgggtcctgcagctgccggtggtgagtggcacctgcgaatgcttccagaagacctacaccagcactaaggaagcccaccccctggtggcctctgtgtgcaatgcctatgagaagggcgtgcagagcgccagtagcttggctgcctggagcatggagccggtggtccgcaggctgtccacccagttcacagctgccaatgagctggcctgccgaggcttggaccacctggaggaaaagatccccgccctccagtacccccctgaaaagattgcttctgagctgaaggacaccatctccacccgcctccgcagtgccagaaacagcatcagcgttcccatcgcgagcacttcagacaaggtcctgggggccgctttggccgggtgcgagcttgcctggggggtggccagagacactgcggaatttgctgccaacactcgagctggccgactggcttctggaggggccgacttggccttgggcagcattgagaaggtggtggagtacctcctccctccagacaaggaagagtcagcccctgctcctggacaccagcaagcccagaagtctcccaaggccaagccaagcctcttgagcagggttggggctctgaccaacaccctctctcgatacaccgtgcagaccatggcccgggccctggagcagggccacaccgtggccatgtggatcccaggcgtggtgcccctgagcagcctggcccagtggggtgcctcagtggccatgcaggcggtgtcccggcggaggagcgaagtgcgggtaccctggctgcacagcctcgcagccgcccaggaggaggatcatgaggaccagacagacacggagggagaggacacggaggaggaggaagaattggagactgaggagaacaagttcagtgaggtagcagccctgccaggccctcgaggcctcctgggtggtgtggcacataccctgcagaagaccctccagaccaccatctcggctgtgacatgggcacctgcagctgtgctgggcatggcagggagggtgctgcacctcacaccagcccctgctgtctcctcaaccaaggggagggccatgtccctatcagatgccctgaagggcgttactgacaacgtggtggacacagtggtgcattacgtgccgctccccaggctgtcgctgatggagcccgagagcgaattccgggacatcgacaacccaccagccgaggtcgagcgccgggaggcggagcgcagagcgtctggggcgccgtccgccggcccggagcccgccccgcgtctcgcacagccccgccgcagcctgcgcagcgcgcagagccccggcgcgccccccggcccgggcctggaggacgaagtcgccacgcccgcagcgccgcgcccgggcttcccggccgtgccccgcgagaagccaaagcgcagggtcagcgacagcttcttccggcccagcgtcatggagcccatcctgggccgcacgcattacagccagctgcgcaagaagagctgagtcgccgcaccagccgccgcgccccgggccggcgggtttctctaacaaataaacagaacccgcactgcccaggcgagcgttgccactttcaaagtggtcccctggggagctcagcctcatcctgatgatgctgccaaggcgcactttttatttttattttatttttattttttttttagcatccttttggggcttcactctcagagccagtttttaagggacaccagagccgcagcctgctctgattctatggcttggttgttactataagagtaattgcctaacttgatttttcatctctttaaccaaacttgtggccaaaagatatttgaccgtttccaaaattcagattctgcctctgcggataaatatttgccacgaatgagtaactcctgtcaccactctgaaggtccagacagaaggttttgacacattcttagcactgaactcctctgtgatctaggatgatctgttccccctctgatgaacatcctctgatgatctaggctcccagcaggctactttgaagggaacaatcagatgcaaaagctcttgggtgtttatttaaaatactagtgtcactttctgagtacccgccgcttcacaggctgagtccaggcctgtgtgctttgtagagccagctgcttgctcacagccacatttccatttgcatcattactgccttcacctgcatagtcactcttttgatgctggggaaccaaaatggtgatgatatatagactttatgtatagccacagttcatccccaaccctagtcttcgaaatgttaatatttgataaatctagaaaatgcattcatacaattacagaattcaaatattgcaaaaggatgtgtgtctttctccccgagctcccctgttccccttcattgaaaaccaccacggtgccatctcttgtgtatgcagggctatgcacctgcaggcacgtgtgtatgcactccccgcttgtgtttacacaagctgtggggtgttacgcatgcctgcttttttcacttaataatacagcttggagagatttttgtatcacattataaatcccactcgctctttttgatggccacataataactactgcataatatggatacgccttatttgatttaactagttccctaatgatggacttttaagttgtttcctttttttttcttttttgctactgcaaacgatgctataataaatgtccttatcaaaaatg

SEQ ID NO: 21896 - DNA, 2900 bp, Homo sapiens
  source 1..2900: mol_type = unassigned DNA
tggaagcagcattgcccaagcctcccaggagtgacaggaattgtttctgcctgaggagacactctgcagcctgggctctgtgagactgaggtggcggtcagccggacttgaggagcgaggatggcagtcaacaaaggcctcaccttgctggatggagacctccctgagcaggagaatgtgctgcagcgggtcctgcagctgccggtggtgagtggcacctgcgaatgcttccagaagacctacaccagcactaaggaagcccaccccctggtggcctctgtgtgcaatgcctatgagaagggcgtgcagagcgccagtagcttggctgcctggagcatggagccggtggtccgcaggctgtccacccagttcacagctgccaatgagctggcctgccgaggcttggaccacctggaggaaaagatccccgccctccagtacccccctgaaaagattgcttctgagctgaaggacaccatctccacccgcctccgcagtgccagaaacagcatcagcgttcccatcgcgagcacttcagacaaggtcctgggggccgctttggccgggtgcgagcttgcctggggggtggccagagacactgcggaatttgctgccaacactcgagctggccgactggcttctggaggggccgacttggccttgggcagcattgagaaggtggtggagtacctcctccctccagacaaggaagagtcagcccctgctcctggacaccagcaagcccagaagtctcccaaggccaagccaagcctcttgagcagggttggggctctgaccaacaccctctctcgatacaccgtgcagaccatggcccgggccctggagcagggccacaccgtggccatgtggatcccaggcgtggtgcccctgagcagcctggcccagtggggtgcctcagtggccatgcaggcggtgtcccggcggaggagcgaagtgcgggtaccctggctgcacagcctcgcagccgcccaggaggaggatcatgaggaccagacagacacggagggagaggacacggaggaggaggaagaattggagactgaggagaacaagttcagtgaggtagcagccctgccaggccctcgaggcctcctgggtggtgtggcacataccctgcagaagaccctccagaccaccatctcggctgtgacatgggcacctgcagctgtgctgggcatggcagggagggtgctgcacctcacaccagcccctgctgtctcctcaaccaaggggagggccatgtccctatcagatgccctgaagggcgttactgacaacgtggtggacacagtggtgcattacgtgccgctccccaggctgtcgctgatggagcccgagagcgaattccgggacatcgacaacccaccagccgaggtcgagcgccgggaggcggagcgcagagcgtctggggcgccgtccgccggcccggagcccgccccgcgtctcgcacagccccgccgcagcctgcgcagcgcgcagagccccggcgcgccccccggcccgggcctggaggacgaagtcgccacgcccgcagcgccgcgcccgggcttcccggccgtgccccgcgagaagccaaagcgcagggtcagcgacagcttcttccggcccagcgtcatggagcccatcctgggccgcacgcattacagccagctgcgcaagaagagctgagtcgccgcaccagccgccgcgccccgggccggcgggtttctctaacaaataaacagaacccgcactgcccaggcgagcgttgccactttcaaagtggtcccctggggagctcagcctcatcctgatgatgctgccaaggcgcactttttatttttattttatttttattttttttttagcatccttttggggcttcactctcagagccagtttttaagggacaccagagccgcagcctgctctgattctatggcttggttgttactataagagtaattgcctaacttgatttttcatctctttaaccaaacttgtggccaaaagatatttgaccgtttccaaaattcagattctgcctctgcggataaatatttgccacgaatgagtaactcctgtcaccactctgaaggtccagacagaaggttttgacacattcttagcactgaactcctctgtgatctaggatgatctgttccccctctgatgaacatcctctgatgatctaggctcccagcaggctactttgaagggaacaatcagatgcaaaagctcttgggtgtttatttaaaatactagtgtcactttctgagtacccgccgcttcacaggctgagtccaggcctgtgtgctttgtagagccagctgcttgctcacagccacatttccatttgcatcattactgccttcacctgcatagtcactcttttgatgctggggaaccaaaatggtgatgatatatagactttatgtatagccacagttcatccccaaccctagtcttcgaaatgttaatatttgataaatctagaaaatgcattcatacaattacagaattcaaatattgcaaaaggatgtgtgtctttctccccgagctcccctgttccccttcattgaaaaccaccacggtgccatctcttgtgtatgcagggctatgcacctgcaggcacgtgtgtatgcactccccgcttgtgtttacacaagctgtggggtgttacgcatgcctgcttttttcacttaataatacagcttggagagatttttgtatcacattataaatcccactcgctctttttgatggccacataataactactgcataatatggatacgccttatttgatttaactagttccctaatgatggacttttaagttgtttcctttttttttcttttttgctactgcaaacgatgctataataaatgtccttatc

SEQ ID NO: 21897 - DNA, 1972 bp, Homo sapiens
  source 1..1972: mol_type = unassigned DNA
cgtgctgccgcgggtcacgtgctgcggaggcttggggaggggcggcgaggcggggtttatagcccgggcgcccgcgggccccacgctttgaccgggtcgtggcagccggagtcgtcttcgggacgcgcctgctcttcgcctttcgctgcagtccgtcgatttctttctccaggaagaaaaatggcatccgttgcagttgatccacaaccgagtgtggtgactcgggtggtcaacctgcccttggtgagctccacgtatgacctcatgtcctcagcctatctcagtacaaaggaccagtatccctacctgaagtctgtgtgtgagatggcagagaacggtgtgaagaccatcacctccgtggccatgaccagtgctctgcccatcatccagaagctagagccgcaaattgcagttgccaatacctatgcctgtaaggggctagacaggattgaggagagactgcctattctgaatcagccatcaactcagattgttgccaatgccaaaggcgctgtgactggggcaaaagatgctgtgacgactactgtgactggggccaaggattctgtggccagcacgatcacaggggtgatggacaagaccaaaggggcagtgactggcagtgtggagaagaccaagtctgtggtcagtggcagcattaacacagtcttggggagtcggatgatgcagctcgtgagcagtggcgtagaaaatgcactcaccaaatcagagctgttggtagaacagtacctccctctcactgaggaagaactagaaaaagaagcaaaaaaagttgaaggatttgatctggttcagaagccaagttattatgttagactgggatccctgtctaccaagcttcactcccgtgcctaccagcaggctctcagcagggttaaagaagctaagcaaaaaagccaacagaccatttctcagctccattctactgttcacctgattgaatttgccaggaagaatgtgtatagtgccaatcagaaaattcaggatgctcaggataagctctacctctcatgggtagagtggaaaaggagcattggatatgatgatactgatgagtcccactgtgctgagcacattgagtcacgtactcttgcaattgcccgcaacctgactcagcagctccagaccacgtgccacaccctcctgtccaacatccaaggtgtaccacagaacatccaagatcaagccaagcacatgggggtgatggcaggcgacatctactcagtgttccgcaatgctgcctcctttaaagaagtgtctgacagcctcctcacttctagcaaggggcagctgcagaaaatgaaggaatctttagatgacgtgatggattatcttgttaacaacacgcccctcaactggctggtaggtcccttttatcctcagctgactgagtctcagaatgctcaggaccaaggtgcagagatggacaagagcagccaggagacccagcgatctgagcataaaactcattaaacctgcccctatcactagtgcatgctgtggccagacagatgacaccttttgttatgttgaaattaacttgctaggcaaccctaaattgggaagcaagtagctagtataaaggccctcaattgtagttgtttccagctgaattaagagctttaaagtttctggcattagcagatgatttctgttcacctggtaagaaaagaatgataggcttgtcagagcctatagccagaactcagaaaaaattcaaatgcacttatgttctcattctatggccattgtgttgcctctgttactgtttgtattgaataaaaacatcttcatgtgggctggggtagaaactggtgtctgctctggtgtgatctgaaaaggcgtcttcactgctttatctcatgatgcttgcttgtaaaacttgattttagtttttcatttctcaaataggaatactacctttgaattcaataaaattcactgcaggata

SEQ ID NO: 21898 - DNA, 655 bp, Homo sapiens
  source 1..655: mol_type = unassigned DNA
tttgaccgggtcgtggcagccggagtcgtcttcgggacgcgcctgctcttcgcctttcgctgcagtccgtcgatttctttctccaggaagaaaaatggcatccgttgcagttgatccacaaccgagtgtggtgactcgggtggtcaacctgcccttggtgagctccacgtatgacctcatgtcctcagcctatctcagtacaaaggaccagtatccctacctgaagtctgtgtgtgagatggcagagaacggtgtgaagaccatcacctccgtggccatgaccagtgctctgcccatcatccagaagctagagccgcaaattgcagttgccaatacctatgcctgtaaggggctagacaggattgaggagagactgcctattctgaatcagccatcaactcaggtgagcttgggacaaaagtgctgagacttgacacttcacatgttttcatcttctatctgttaaaacaagctgtacatatcacaaacaggcaaatacttgttttcccaacctggatctggatgtatgtttgaaaaataatggccacttccttacttcctgaactgttgtcaagttgtatctacgaagcagagaagaactagcctcctttggattagaaaacttttagtgtgttgtctatcagtttgtgtcttt

SEQ ID NO: 21899 - DNA, 631 bp, Homo sapiens
  source 1..631: mol_type = unassigned DNA
ggcagccggagtcgtcttcgggacgcgcctgctcttcgcctttcgctgcagtccgtcgatttctttctccaggaagaaaaatggcatccgttgcagttgatccacaaccgagtgtggtgactcgggtggtcaacctgcccttggtgagctccacgtatgacctcatgtcctcagcctatctcagtacaaaggaccagtatccctacctgaagtctgtgtgtgagatggcagagaacggtgtgaagaccatcacctccgtggccatgaccagtgctctgcccatcatccagaagctagagccgcaaattgcagttgccaatacctatgcctgtaaggggctagacaggattgaggagagactgcctattctgaatcagccatcaactcaggcaaatacttgttttcccaacctggatctggatgtatgtttgaaaaataatggccacttccttacttcctgaactgttgtcaagttgtatctacgaagcagagaagaactagcctcctttggattagaaaacttttagtgtgttgtctatcagtttgtgtctttgctcctataaatgaaattgctgtctcaagtaactgattgtcttgtggtattaaataaatgcagacgtgatatatataa

SEQ ID NO: 21900 - DNA, 1736 bp, Homo sapiens
  source 1..1736: mol_type = unassigned DNA
gtgctgccgcgggtcacgtgctgcggaggcttggggaggggcggcgaggcggggtttatagcccgggcgcccgcgggccccacgctttgaccgggtcgtggcagccggagtcgtcttcgggacgcgcctgctcttcgcctttcgctgcagtccgtcgatttctttctccaggaagaaaaatggcatccgttgcagttgatccacaaccgagtgtggtgactcgggtggtcaacctgcccttggtgagctccacgtatgacctcatgtcctcagcctatctcagtacaaaggaccagtatccctacctgaagtctgtgtgtgagatggcagagaacggtgtgaagaccatcacctccgtggccatgaccagtgctctgcccatcatccagaagctagagccgcaaattgcagttgccaatacctatgcctgtaaggggctagacaggattgaggagagactgcctattctgaatcagccatcaactcagattgttgccaatgccaaaggcgctgtgactggggcaaaagatgctgtgacgactactgtgactggggccaaggattctgtggccagcacgatcacaggggtgatggacaagaccaaaggggcagtgactggcagtgtggagaagaccaagtctgtgaaaaagaagcaaaaaaagttgaaggatttgatctggttcagaagccaactccattctactgttcacctgattgaatttgccaggaagaatgtgtatagtgccaatcagaaaattcaggatgctcaggataagctctacctctcatgggtagagtggaaaaggagcattggatatgatgatactgatgagtcccactgtgctgagcacattgagtcacgtactcttgcaattgcccgcaacctgactcagcagctccagaccacgtgccacaccctcctgtccaacatccaaggtgtaccacagaacatccaagatcaagccaagcacatgggggtgatggcaggcgacatctactcagtgttccgcaatgctgcctcctttaaagaagtgtctgacagcctcctcacttctagcaaggggcagctgcagaaaatgaaggaatctttagatgacgtgatggattatcttgttaacaacacgcccctcaactggctggtaggtcccttttatcctcagctgactgagtctcagaatgctcaggaccaaggtgcagagatggacaagagcagccaggagacccagcgatctgagcataaaactcattaaacctgcccctatcactagtgcatgctgtggccagacagatgacaccttttgttatgttgaaattaacttgctaggcaaccctaaattgggaagcaagtagctagtataaaggccctcaattgtagttgtttccagctgaattaagagctttaaagtttctggcattagcagatgatttctgttcacctggtaagaaaagaatgataggcttgtcagagcctatagccagaactcagaaaaaattcaaatgcacttatgttctcattctatggccattgtgttgcctctgttactgtttgtattgaataaaaacatcttcatgtgggctggggtagaaactggtgtctgctctggtgtgatctgaaaaggcgtcttcactgctttatctcatgatgcttgcttgtaaaacttgattttagtttttcatttctcaaataggaatactacctttgaattcaataaaattcactgcaggatagaccagtt

SEQ ID NO: 21901 - DNA, 623 bp, Homo sapiens
  source 1..623: mol_type = unassigned DNA
cagaacgttttgtcagaacaattatggctttcttcctgaagtgtgcttggccggaaaagaaagcaggagacctcaagggctaataatctagcagtggctgacactgaaatgatgcatggaagaaaggctaccaagcaagggaggtggagagcagtttgaagcaactggggtaaagtccggagaagaagctggtgagaaagagacaggagccagatgctgaatgacgatttctttctccaggaagaaaaatggcatccgttgcagttgatccacaaccgagtgtggtgactcgggtggtcaacctgcccttggtgagctccacgtatgacctcatgtcctcagcctatctcagtacaaaggaccagtatccctacctgaagtctgtgtgtgagatggcagagaacggtgtgaagaccatcacctccgtggccatgaccagtgctctgcccatcatccagaagctagagccgcaaattgcagttgccaatacctatgcctgtaaggggctagacaggattgaggagagactgcctattctgaatcagccatcaactcagattgttgccaatgccaaaggcgctgtgactggggcaaaagatgctgtgacgactactgtgactggg

SEQ ID NO: 21902 - DNA, 2340 bp, Homo sapiens
  source 1..2340: mol_type = unassigned DNA
tggcgcgggcaatccctcaacctgattggtcccctcgcccgtcactccagtgcgcccccaacctaccacgcagtaaaagccacccccgcctcggcccggacggtttccaagctggttttgaagtcgcggcagctgttcctgggacgtccggttgaccgcgcgtctgctgcagagaccatgtctgccgacggggcagaggctgatggcagcacccaggtgacagtggaagaaccggtacagcagcccagtgtggtggaccgtgtggccagcatgcctctgatcagctccacctgcgacatggtgtccgcagcctatgcctccaccaaggagagctacccgcacatcaagactgtctgcgacgcagcagagaagggagtgaggaccctcacggcggctgctgtcagcggggctcagccgatcctctccaagctggagccccagattgcatcagccagcgaatacgcccacagggggctggacaagttggaggagaacctccccatcctgcagcagcccacggagaaggtcctggcggacaccaaggagcttgtgtcgtctaaggtgtcgggggcccaagagatggtgtctagcgccaaggacacggtggccacccaattgtcggaggcggtggacgcgacccgcggtgctgtgcagagcggcgtggacaagacaaagtccgtagtgaccggcggcgtccaatcggtcatgggctcccgcttgggccagatggtgttgagtggggtcgacacggtgctggggaagtcggaggagtgggcggacaaccacctgccccttacggatgccgaactggcccgcatcgccacatccctggatggctttgacgtcgcgtccgtgcagcagcagcggcaggaacagagctacttcgtacgtctgggctccctgtcggagaggctgcggcagcacgcctatgagcactcgctgggcaagcttcgagccaccaagcagagggcacaggaggctctgctgcagctgtcgcaggtcctaagcctgatggaaactgtcaagcaaggcgttgatcagaagctggtggaaggccaggagaagctgcaccagatgtggctcagctggaaccagaagcagctccagggccccgagaaggagccgcccaagccagagcaggtcgagtcccgggcgctcaccatgttccgggacattgcccagcaactgcaggccacctgtacctccctggggtccagcattcagggcctccccaccaatgtgaaggaccaggtgcagcaggcccgccgccaggtggaggacctccaggccacgttttccagcatccactccttccaggacctgtccagcagcattctggcccagagccgtgagcgtgtcgccagcgcccgcgaggccctggaccacatggtggaatatgtggcccagaacacacctgtcacgtggctcgtgggaccctttgcccctggaatcactgagaaagccccggaggagaagaagtagggggagaggagaggactcagcgggccccgtctctataatgcagctgtgctctggagtcctcaacccggggctcatttcaaacttattttctagccactcctcccagctcttctgtgctgtccacttgggaagctaaggctctcaaaacgggcatcacccagttgacccatctctcagcctctctgagcttggaagaagcctgttctgagcctcaccctatcagtcagtagagagagatgtccagaaaaaatatctttcaggaaagttctcccctgcagaattttttttccttgttaaatatcaggaatataggccgggtgcggtggctcacacctgtaatcccagcactttgggaggctgaggcgggcggaacacctgaggtcaggtgttcgagaccagccaggccaacatggtgaaaccccgtctctactaaaaatacaaaaaaaaatgagccgggcatggtagcaggtgtctgttatcccagttaggaggctgaggcaagagaatctcttgaacctgagaggcggaggttgcagtgagccaagatcgcgccattgcactccagcctgggggacaagagtgagacttagtctcaaaaaaaaaaaaaaagaaaaaaaaatcagggatatagttcatatcccacttctttgtttacaccgatgtccctgaatatcagcctgtagctaatggacttgggatttctggtctaagtgggcctcctggggatggggtggtacactgagcttctgagcctcattgtagagtagaaaggtactggggcctgtgtggtaagccttgttgaaatgctctggtattcagtattgccttaataaacttcacccacaactgcatacaggc

SEQ ID NO: 21903 - DNA, 2154 bp, Homo sapiens
  source 1..2154: mol_type = unassigned DNA
ttttgaagtcgcggcagctgttcctgggacgtccggttgaccgcgcgtctgctgcagagaccatgtctgccgacggggcagaggctgatggcagcacccaggtgacagtggaagaaccggtacagcagcccagtgtggtggaccgtgtggccagcatgcctctgatcagctccacctgcgacatggtgtccgcagcctatgcctccaccaaggagagctacccgcacatcaagactgtctgcgacgcagcagagaagggagtgaggaccctcacggcggctgctgtcagcggggctcagccgatcctctccaagctggagccccagattgcatcagccagcgaatacgcccacagggggctggacaagttggaggagaacctccccatcctgcagcagcccacggagaaggtgtcgggggcccaagagatggtgtctagcgccaaggacacggtggccacccaattgtcggaggcggtggacgcgacccgcggtgctgtgcagagcggcgtggacaagacaaagtccgtagtgaccggcggcgtccaatcggtcatgggctcccgcttgggccagatggtgttgagtggggtcgacacggtgctggggaagtcggaggagtgggcggacaaccacctgccccttacggatgccgaactggcccgcatcgccacatccctggatggctttgacgtcgcgtccgtgcagcagcagcggcaggaacagagctacttcgtacgtctgggctccctgtcggagaggctgcggcagcacgcctatgagcactcgctgggcaagcttcgagccaccaagcagagggcacaggaggctctgctgcagctgtcgcaggtcctaagcctgatggaaactgtcaagcaaggcgttgatcagaagctggtggaaggccaggagaagctgcaccagatgtggctcagctggaaccagaagcagctccagggccccgagaaggagccgcccaagccagagcaggtcgagtcccgggcgctcaccatgttccgggacattgcccagcaactgcaggccacctgtacctccctggggtccagcattcagggcctccccaccaatgtgaaggaccaggtgcagcaggcccgccgccaggtggaggacctccaggccacgttttccagcatccactccttccaggacctgtccagcagcattctggcccagagccgtgagcgtgtcgccagcgcccgcgaggccctggaccacatggtggaatatgtggcccagaacacacctgtcacgtggctcgtgggaccctttgcccctggaatcactgagaaagccccggaggagaagaagtagggggagaggagaggactcagcgggccccgtctctataatgcagctgtgctctggagtcctcaacccggggctcatttcaaacttattttctagccactcctcccagctcttctgtgctgtccacttgggaagctaaggctctcaaaacgggcatcacccagttgacccatctctcagcctctctgagcttggaagaagcctgttctgagcctcaccctatcagtcagtagagagagatgtccagaaaaaatatctttcaggaaagttctcccctgcagaattttttttccttgttaaatatcaggaatataggccgggtgcggtggctcacacctgtaatcccagcactttgggaggctgaggcgggcggaacacctgaggtcaggtgttcgagaccagccaggccaacatggtgaaaccccgtctctactaaaaatacaaaaaaaaatgagccgggcatggtagcaggtgtctgttatcccagttaggaggctgaggcaagagaatctcttgaacctgagaggcggaggttgcagtgagccaagatcgcgccattgcactccagcctgggggacaagagtgagacttagtctcaaaaaaaaaaaaaaagaaaaaaaaatcagggatatagttcatatcccacttctttgtttacaccgatgtccctgaatatcagcctgtagctaatggacttgggatttctggtctaagtgggcctcctggggatggggtggtacactgagcttctgagcctcattgtagagtagaaaggtactggggcctgtgtggtaagccttgttgaaatgctctggtattcagtatt

SEQ ID NO: 21904 - DNA, 2439 bp, Homo sapiens
  source 1..2439: mol_type = unassigned DNA
gacagctggtgtctgaagccgctcgcgcccagggtgaccctgtttgcagcacgatgtctgaagaagaggcggctcagatccccagatccagtgtgtgggagcaggaccagcagaacgtggtgcagcgtgtggtggctctgcccctggtcagggccacgtgcaccgcggtctgcgatgtttacagtgcagccaaggacaggcacccgctgctgggctccgcctgccgcctggctgagaactgcgtgtgcggcctgaccacccgtgccctggaccacgcccagccgctgctcgagcacctgcagccccagctggccactatgaacagcctcgcctgcaggggcctggacaagctggaagagaagcttccctttctccagcaaccttcggagacggtggtgacctcagccaaggacgtggtggccagcagtgtcacgggtgtggtggacctggcccggaggggccggcgctggagcgtggagctgaagcgctccgtgagccatgctgtggatgttgtactggaaaaatcagaggagctggtggatcacttcctgcccatgacggaggaagagctcgcggcactggcggctgaggctgaaggccctgaagtgggttcggtggaggatcagaggagacagcagggctactttgtgcgcctcggctccctgtcagcacggatccgccacctggcctacgagcactctgtggggaaactgaggcagagcaaacaccgtgcccaggacaccctggcccagctgcaggagacgctggagctgatagaccacatgcagtgtggggtgacccccaccgccccggcctgccctgggaaggtgcacgagctgtggggggaatggggccagcgccctccggagagccgccgccggagccaggcagagctggagacgctggtgctgtcccgcagcctgacccaggagctgcagggcacggtagaggctctggagtccagcgtgcggggcctgcccgccggcgcccaggagaaggtggctgaggtgcggcgcagtgtggatgccctgcagaccgccttcgctgatgcccgctgcttcagggacgtgccagcggccgcgctggccgagggccggggtcgcgtggcccacgcgcacgcctgcgtggacgagctgctggagctggtggtgcaggccgtgccgctgccctggctggtgggacccttcgcgcccatccttgtggagcgacccgagcccctgcccgacctggcggacctggtggacgaggtcatcgggggccctgacccccgctgggcgcacctggactggccggcccagcagagagcctgggaggcagagcacagggacgggagtgggaatggggatggggacaggatgggtgttgccggggacatctgcgagcaggaacccgagacccccagctgcccggtcaagcacaccctgatgcccgagctggacttctgacccatgggccagtggaggcggggaggaaaggccacctgcacaccccgatccctgctgccccctggtggccacacgtaagctcgaggccttggccttgacccttctttggaatcaggcccaactccggatctctgaccacctttttggtattggactctcccattttttccttgaacacatggacaaagaggcccgggggagcagggcctcgaaccctattcaggccaacttgagccacaagctgggttcttcacctatgtcctgctccctggctccatgaagcgaatccaaatctttccaagaggctgggcacagtggctcacgcctgtaatcccagcactttgggagtctgaggcaggtggatcatctgaagtcaggagttcgggatcatcctggccaacatgatgaaaccctgtctctacttagaaagaaagaaaaaaaaaaaaaaagccaggtgtggtggtgtgcacctgtagtcccagctagttgtgaggctgacgcagaagaattgcttaaacccgagaggcgcggagcttgcagtgagcagagatcgcgccactgcacaccagcctgggtgacagagcgagactccatctaacaaaaaataatagtaacagcctcccgaagaaatacacattttgcccaatgccttctgtttggggctttgaaaagtgagccctgactgggtgtggtggttgacacctgttatcacagcactttgggaggccaaggtgggaggactgcttgagcccaggagttggaggctgcagtgagccatgatcttgcccctgcgctctcgcctgggtgacagagcaagactctatctcaaaaatgtttttaaaaaatacttcctagggaaacacacattttgccctatttggaactttgaaaagtgagccctcctctgcccatgggccgtgctgctcagcctgccatactcgcttgctttgctgtttgggatttgcctccagaataaaggtcctttttgttgttg

SEQ ID NO: 21905 - DNA, 6385 bp, Homo sapiens
  source 1..6385: mol_type = unassigned DNA
gtaaccgccgccggcgcgcgggcctcgggcaggtcggggtcccagcgccggctcgggcagcggaggcgccgccggaagttccttgggctgctggactcctcggcttgaaacggcgccggcgtgggggcgtgtgcccttggccctgtcccaggtggagagtggtcgagccgcgcgcagggtgcgctcgtttgaactgcggtgacaccgagggttggggactcgaacccccgcttcgcagctcaggagcctgaggtccgaaagcttcgttccagagcccagcatgaatggatacgcggaatttccgcccagccccagtaaccccaccaaggagcccgtggagccccagcccagccaggtcccactgcaggaagatgtggacatgagcagtggctccagtggacatgagaccaacgaaaactgctccacggggcgggactcgcagggcagtgactgtgacgacagtgggaaggagctggggatgctggtggagccaccggatgcccgccagagtccagatacctttagcctgatgatggcaaaatctgaacacaacccatctacaagtggctgcagtagcgaccagtcttcgaaagtggacacacacaaagaactgataaaaacactaaaggagctgaaggtccacctccctgcagacaagaaggccaagggcaaggccagtacgctggccaccttgaagtacgccctcaggagcgtgaagcaggtgaaagccaatgaagagtattaccagctgctgatgtccagcgagggtcacccctgtggagcagacgtgccctcctacaccgtggaggagatggagagcgttacctctgagcacattgtgaagaatgccgatatgtttgcggtggccgtgtccctggtgtctgggaagatcctgtacatctctgaccaggttgcatccatatttcactgtaaaagagatgccttcagcgatgccaagtttgtggagttcctggcgcctcacgatgtgggcgtgttccacagtttcacctccccgtacaagcttcccttgtggagcatgtgcagtggagcagattcttttactcaagaatgcatggaggagaaatctttcttttgccgtgtcagtgtccggaaaagccacgagaatgaaatccgctaccaccccttccgcatgacgccctacctggtcaaggtgcgggaccaacaaggtgctgagagtcagctttgctgccttctgctggcagagagagtgcactctggttatgaagcccctagaattcctcctgaaaagagaatttttacaaccacccatacaccaaattgtttgttccaggatgtggatgaaagggcggtccctctcctgggctacctacctcaggacctgattgaaaccccagtgctcgtgcagctccaccctagtgacaggcccttgatgctggccatccacaaaaagatcctgcagtcaggcgggcagcctttcgactattctcccattcggtttcgcgcccggaacggagagtacatcacgttggacaccagctggtccagcttcatcaacccatggagcaggaaaatctccttcatcattgggaggcacaaagtcagggtgggccctttgaatgaggacgtgtttgcagcccacccctgcacagaggagaaggccctgcaccccagcattcaggagctcacagagcagatccaccggctcctgctgcagcccgtcccccacagcggctccagtggctacgggagtctgggcagcaacgggtcccacgagcaccttatgagccagacctcctccagcgacagcaacggccatgaggactcacgccggaggagagccgaaatttgtaaaaatggtaacaagaccaaaaatagaagtcattattctcatgaatctggagaacaaaagaaaaaatccgttacagaaatgcaaactaatcccccagctgagaagaaagctgtccctgccatggaaaaggacagcctgggggtcagcttccccgaggagttggcctgcaagaaccagcccacctgctcctaccagcagatcagctgcttggacagcgtcatcaggtacttggagagctgcaatgaggctgccaccctgaagaggaaatgcgagttcccagcaaacgtcccagcgctaaggtccagtgataagcggaaggccacagtcagcccagggccacacgctggagaggcagagccgccctccagggtgaacagccgcacgggagtaggtacgcacctgacctcgctggcactgccgggcaaggcagagagtgtggcgtcgctcaccagccagtgcagctacagcagcaccatcgtccatgtgggagacaagaagccgcagccggagttagagatggtggaagatgctgcgagtgggccagaatccctggactgcctggcgggccctgccctggcctgtggtctcagccaagagaaggagcccttcaagaagctgggcctcaccaaggaggtactcgctgcacacacacagaaggaggagcagagcttcctgcagaagttcaaagaaataagaaaactcagcattttccagtcccactgccattactacttgcaagaaagatccaaggggcagccaagtgaacgaactgcccctggactaagaaatacttccggaatagattcaccttggaaaaaaacaggaaagaacagaaaattgaagtccaagcgggtcaaacctcgagactcatctgagagcaccggatctggggggcccgtgtccgcccggcccccgctggtgggcttgaacgccacagcctggtcaccctcagacacgtcccagtccagctgcccagccgtgccctttcccgccccagtgccagcagcttattcactgcccgtgtttccagcgccagggactgtggcagcacccccggcacctccccacgccagcttcacagtgcctgctgtgcccgtggacctccagcaccagtttgcagtccagcccccacctttccctgcccctttggcgcctgtcatggcattcatgctacccagttattccttcccctcggggaccccaaacctgccccaggccttcttccccagccagcctcagtttccgagccaccccacactcacatccgagatggcctctgcctcacagcctgagttccccagccggacctcgatccccagacagccatgtgcttgtccagccacccgggccaccccaccatcggccatgggtagggcctccccaccgctctttcagtcccgcagcagctcgcccctgcagctcaacctgctgcagctggaggaagcccctgagggtggcactggagccatggggaccacaggggccacagagacagcagctgtaggggcggactgcaaacctggcacttctcgggaccagcagccgaaggcgcctctgacccgtgatgaaccctcagacacacagaacagtgacgccctttccacgtcaagcggcctcctaaacctcctgctgaatgaggacctctgctcagcctcgggctctgctgcttcggagtctctgggctccggctcactgggctgcgacgcctccccgagtggggcaggcagtagtgacacaagtcataccagcaaatattttggaagcattgactcctcagagaataatcacaaagcaaaaatgaacactggtatggaagaaagtgagcatttcattaagtgcgtcctgcaggatcccatctggctgctgatggcagatgcggacagcagcgtcatgatgacgtaccagctgccttcccgaaatttagaagcggttttgaaggaggacagagagaagctgaagctcctacagaaactccagcccaggttcacggagagtcagaagcaggagctgcgcgaggtccaccagtggatgcagacgggcggcctgcccgcagccatcgacgtggcagaatgtgtttactgtgaaaacaaggaaaaaggtaatatttgcataccatatgaggaagatattccttctctgggactcagcgaagtgtcggacaccaaagaagacgaaaatggatcccccttgaatcacaggatcgaagagcagacgtaacccctgccccacctcagcccggcagccagcgaggtacaccaggtggtgcttggaagagatgaaagatcttcatggctgtttccactgaaatggacacatatgctcatgttgctttttttgttttagaaaaaaaaacaacatagttttctgaaggggcgacttaaaactgtggagagtggggagagttcggaaagaaatatgtttttatatataaaatatatatgtggagttttgtgggatggggaagagattttagttgttatttaacttgagaaagactaagcgcctcttagtgtcagggaagttgcctcagtgctcccagaagtcctgtgactgtgacgagacctctgtctgctgcaccagctggggactctggcttccagagctttcccagggtgtttggatcagatcaaattttgtcctctcttggggactgctttttatctgaattatcatttagtcaaggtagagtgtttttttatacataccaaatggagatagcagcctctcctagttttatttcaaaacgtttcacattaaatggtgtgaagcgttgtttggcaaaccaacagctttggcttctggtgtggtcaatatttcagtctgacataggttttgtttgtagtgaacaaagttgaaacatttgctctggactaaagaagcctagtggtttgtgtggccaactccatcggatgaatgcacacgcagacagaccctctgtatatttctgcattattcttgtctccttttcagaccatgatggccaatatggagattaaaatatgtcatcagtcatctctttatggtgacttccctttgcaaaccaggctgtgaccaacacatgtgagacccagtcctgtttggttttcttccgttggaaccacccagacatctgcttccacccagccaagcccacatcacatctcctggccgagagcagccactgccactcagtctgacagcttgcgactgcatctgtattttcaggggtgcagtgagctcacctctcccactgcaccctgggttgggtgcacagccctcattcttttcatgagcccgacctctctcggagcagcttcaggcctctgccagtgtccccagcacttttaggtcatttggacacttggggaaaagtgaggccagtctgcccggctttttacaaaacctcatgttgcattgtatattccaaagatggttcagaaaatttaatattggtccctggtggaaattcaaagttatcactgaagaacagttgacttaaaattggaccaagactatgaggcttaaaagggaccagggttttcttttttttttttttttttttttttttttagatggagtttctttttgcccaggctggagtgcagtggcgccatcttggctcactgcaacctctgcctcccaggttcaagcgattctcctgcctcagcctcctgagtagctgggaccacaggcgactgccaccacacccagctaattttttgtatttttagtagagacagggtttcaccatgttggccaggctggtctcgaactcctgacctcaagcgatccacccacctcggcctcccaaagtgctgggattacaggcgtgagccaccacgcccaactgggaccagggttttctgttttttgatggaggtgaaatctctttgtaatccactaggttttcatcgtaaaaccatcttatgcctgactattaaacctattcttcataaacacaagaacactttaatttttcgttaatttacaaagtaacatcagctgcctatgcctatgataaggtagcagtctgcattcttatggccattagatgttacaaactccttgcctctaaagtcagatcatgaagggataggtgttcatctaaggttacagttatgttaccgaaacacaaaactgccaaaatcttactctgctgttatgaatgtttaccatcagcattattttatcatttaatatgtgctcactgattgttaactgtagcttcagcgcgtgccaagcagttgacttaataggatcatcttgtgaatttgtttacgtgatgccaagcatcaagtcatgttttctttagtgtgtgtgcttacacaggtgttaaacagtttttctctattttaaactgagccttctttttaatatattcccgaagagatatgtaaataagctctcagagtttctgtgatgatttgttgagccttgctggacaagtggtttgtttgtgtgcaaaccaaactttctttacccagtgcaatagatttgtttgactgcttgtgtctttttatgacctgtttgccttttagaaaattggtaaataaagcaagtatatttttattttta

SEQ ID NO: 21906 - DNA, 6235 bp, Homo sapiens
  source 1..6235: mol_type = unassigned DNA
agcgccggctcgggcagcggaggcgccgccggaagttccttgggctgctggactcctcggcttgaaacggcgccggcgtgggggcgtgtgcccttggccctgtcccaggtggagagtggtcgagccgcgcgcagggtgcgctcgtttgaactgcggtgacaccgagggttggggactcgaacccccgcttcgcagctcaggagcctgaggtccgaaagcttcgttccagagcccagcatgaatggatacgcggaatttccgcccagccccagtaaccccaccaaggagcccgtggagccccagcccagccaggtcccactgcaggaagatgtggacatgagcagtggctccagtggacatgagaccaacgaaaactgctccacggggcgggactcgcagggcagtgactgtgacgacagtgggaaggagctggggatgctggtggagccaccggatgcccgccagagtccagatacctttagcctgatgatggcaaaatctgaacacaacccatctacaagtggctgcagtagcgaccagtcttcgaaagtggacacacacaaagaactgataaaaacactaaaggagctgaaggtccacctccctgcagacaagaaggccaagggcaaggccagtacgctggccaccttgaagtacgccctcaggagcgtgaagcaggtgaaagccaatgaagagtattaccagctgctgatgtccagcgagggtcacccctgtggagcagacgtgccctcctacaccgtggaggagatggagagcgttacctctgagcacattgtgaagaatgccgatatgtttgcggtggccgtgtccctggtgtctgggaagatcctgtacatctctgaccaggttgcatccatatttcactgtaaaagagatgccttcagcgatgccaagtttgtggagttcctggcgcctcacgatgtgggcgtgttccacagtttcacctccccgtacaagcttcccttgtggagcatgtgcagtggagcagattcttttactcaagaatgcatggaggagaaatctttcttttgccgtgtcagtgtccggaaaagccacgagaatgaaatccgctaccaccccttccgcatgacgccctacctggtcaaggtgcgggaccaacaaggtgctgagagtcagctttgctgccttctgctggcagagagagtgcactctggttatgaagcccctagaattcctcctgaaaagagaatttttacaaccacccatacaccaaattgtttgttccaggatgtggatgaaagtcctgcagtcaggcgggcagcctttcgactattctcccattcggtttcgcgcccggaacggagagtacatcacgttggacaccagctggtccagcttcatcaacccatggagcaggaaaatctccttcatcattgggaggcacaaagtcagggtgggccctttgaatgaggacgtgtttgcagcccacccctgcacagaggagaaggccctgcaccccagcattcaggagctcacagagcagatccaccggctcctgctgcagcccgtcccccacagcggctccagtggctacgggagtctgggcagcaacgggtcccacgagcaccttatgagccagacctcctccagcgacagcaacggccatgaggactcacgccggaggagagccgaaatttgtaaaaatggtaacaagaccaaaaatagaagtcattattctcatgaatctggagaacaaaagaaaaaatccgttacagaaatgcaaactaatcccccagctgagaagaaagctgtccctgccatggaaaaggacagcctgggggtcagcttccccgaggagttggcctgcaagaaccagcccacctgctcctaccagcagatcagctgcttggacagcgtcatcaggtacttggagagctgcaatgaggctgccaccctgaagaggaaatgcgagttcccagcaaacgtcccagcgctaaggtccagtgataagcggaaggccacagtcagcccagggccacacgctggagaggcagagccgccctccagggtgaacagccgcacgggagtaggtacgcacctgacctcgctggcactgccgggcaaggcagagagtgtggcgtcgctcaccagccagtgcagctacagcagcaccatcgtccatgtgggagacaagaagccgcagccggagttagagatggtggaagatgctgcgagtgggccagaatccctggactgcctggcgggccctgccctggcctgtggtctcagccaagagaaggagcccttcaagaagctgggcctcaccaaggaggtactcgctgcacacacacagaaggaggagcagagcttcctgcagaagttcaaagaaataagaaaactcagcattttccagtcccactgccattactacttgcaagaaagatccaaggggcagccaagtgaacgaactgcccctggactaagaaatacttccggaatagattcaccttggaaaaaaacaggaaagaacagaaaattgaagtccaagcgggtcaaacctcgagactcatctgagagcaccggatctggggggcccgtgtccgcccggcccccgctggtgggcttgaacgccacagcctggtcaccctcagacacgtcccagtccagctgcccagccgtgccctttcccgccccagtgccagcagcttattcactgcccgtgtttccagcgccagggactgtggcagcacccccggcacctccccacgccagcttcacagtgcctgctgtgcccgtggacctccagcaccagtttgcagtccagcccccacctttccctgcccctttggcgcctgtcatggcattcatgctacccagttattccttcccctcggggaccccaaacctgccccaggccttcttccccagccagcctcagtttccgagccaccccacactcacatccgagatggcctctgcctcacagcctgagttccccagccggacctcgatccccagacagccatgtgcttgtccagccacccgggccaccccaccatcggccatgggtagggcctccccaccgctctttcagtcccgcagcagctcgcccctgcagctcaacctgctgcagctggaggaagcccctgagggtggcactggagccatggggaccacaggggccacagagacagcagctgtaggggcggactgcaaacctggcacttctcgggaccagcagccgaaggcgcctctgacccgtgatgaaccctcagacacacagaacagtgacgccctttccacgtcaagcggcctcctaaacctcctgctgaatgaggacctctgctcagcctcgggctctgctgcttcggagtctctgggctccggctcactgggctgcgacgcctccccgagtggggcaggcagtagtgacacaagtcataccagcaaatattttggaagcattgactcctcagagaataatcacaaagcaaaaatgaacactggtatggaagaaagtgagcatttcattaagtgcgtcctgcaggatcccatctggctgctgatggcagatgcggacagcagcgtcatgatgacgtaccagctgccttcccgaaatttagaagcggttttgaaggaggacagagagaagctgaagctcctacagaaactccagcccaggttcacggagagtcagaagcaggagctgcgcgaggtccaccagtggatgcagacgggcggcctgcccgcagccatcgacgtggcagaatgtgtttactgtgaaaacaaggaaaaaggtaatatttgcataccatatgaggaagatattccttctctgggactcagcgaagtgtcggacaccaaagaagacgaaaatggatcccccttgaatcacaggatcgaagagcagacgtaacccctgccccacctcagcccggcagccagcgaggtacaccaggtggtgcttggaagagatgaaagatcttcatggctgtttccactgaaatggacacatatgctcatgttgctttttttgttttagaaaaaaaaacaacatagttttctgaaggggcgacttaaaactgtggagagtggggagagttcggaaagaaatatgtttttatatataaaatatatatgtggagttttgtgggatggggaagagattttagttgttatttaacttgagaaagactaagcgcctcttagtgtcagggaagttgcctcagtgctcccagaagtcctgtgactgtgacgagacctctgtctgctgcaccagctggggactctggcttccagagctttcccagggtgtttggatcagatcaaattttgtcctctcttggggactgctttttatctgaattatcatttagtcaaggtagagtgtttttttatacataccaaatggagatagcagcctctcctagttttatttcaaaacgtttcacattaaatggtgtgaagcgttgtttggcaaaccaacagctttggcttctggtgtggtcaatatttcagtctgacataggttttgtttgtagtgaacaaagttgaaacatttgctctggactaaagaagcctagtggtttgtgtggccaactccatcggatgaatgcacacgcagacagaccctctgtatatttctgcattattcttgtctccttttcagaccatgatggccaatatggagattaaaatatgtcatcagtcatctctttatggtgacttccctttgcaaaccaggctgtgaccaacacatgtgagacccagtcctgtttggttttcttccgttggaaccacccagacatctgcttccacccagccaagcccacatcacatctcctggccgagagcagccactgccactcagtctgacagcttgcgactgcatctgtattttcaggggtgcagtgagctcacctctcccactgcaccctgggttgggtgcacagccctcattcttttcatgagcccgacctctctcggagcagcttcaggcctctgccagtgtccccagcacttttaggtcatttggacacttggggaaaagtgaggccagtctgcccggctttttacaaaacctcatgttgcattgtatattccaaagatggttcagaaaatttaatattggtccctggtggaaattcaaagttatcactgaagaacagttgacttaaaattggaccaagactatgaggcttaaaagggaccagggttttcttttttttttttttttttttttttttttagatggagtttctttttgcccaggctggagtgcagtggcgccatcttggctcactgcaacctctgcctcccaggttcaagcgattctcctgcctcagcctcctgagtagctgggaccacaggcgactgccaccacacccagctaattttttgtatttttagtagagacagggtttcaccatgttggccaggctggtctcgaactcctgacctcaagcgatccacccacctcggcctcccaaagtgctgggattacaggcgtgagccaccacgcccaactgggaccagggttttctgttttttgatggaggtgaaatctctttgtaatccactaggttttcatcgtaaaaccatcttatgcctgactattaaacctattcttcataaacacaagaacactttaatttttcgttaatttacaaagtaacatcagctgcctatgcctatgataaggtagcagtctgcattcttatggccattagatgttacaaactccttgcctctaaagtcagatcatgaagggataggtgttcatctaaggttacagttatgttaccgaaacacaaaactgccaaaatcttactctgctgttatgaatgtttaccatcagcattattttatcatttaatatgtgctcactgattgttaactgtagcttcagcgcgtgccaagcagttgacttaataggatcatcttgtgaatttgtttacgtgatgccaagcatcaagtcatgttttctttagtgtgtgtgcttacacaggtgttaaacagtttttctctattttaaactgagccttctttttaatatattcccgaagagatatgtaaataagctctcagagtttctgtgatgatttgttgagccttgctggacaagtggtttgtttgtgtgcaaaccaaactttctttacccagtgcaatagatttgtttgactgcttgtgtctttttatgacctgtttgccttttagaaaattggtaaataaagcaagtatatttttattttta

SEQ ID NO: 21907 - DNA, 1228 bp, Homo sapiens
  source 1..1228: mol_type = unassigned DNA
atgaatggatacgcggaatttccgcccagccccagtaaccccaccaaggagcccgtggagccccagcccagccaggtcccactgcaggaagatgtggacatgagcagtggctccagtggacatgagaccaacgaaaactgctccacggggcgggactcgcagggcagtgactgtgacgacagtgggaaggagctggggatgctggtggagccaccggatgcccgccagagtccagatacctttagcctgatgatggcaaaatctgaacacaacccatctacaagtggctgcagtagcgaccagtcttcgaaagtggacacacacaaagaactgataaaaacactaaaggagctgaaggtccacctccctgcagacaagaaggccaagggcaaggccagtacgctggccaccttgaagtacgccctcaggagcgtgaagcaggtgaaagccaatgaagagtattaccagctgctgatgtccagcgagggtcacccctgtggagcagacgtgccctcctacaccgtggaggagatggagagcgttacctctgagcacattgtgaagaatgccgatatgtttgcggtggccgtgtccctggtgtctgggaagatcctgtacatctctgaccaggttgcatccatatttcactgtaaaagagatgccttcagcgatgccaagtttgtggagttcctggcgcctcacgatgtgggcgtgttccacagtttcacctccccgtacaagcttcccttgtggagcatgtgcagtggagcagattcttttactcaagaatgcatggaggagaaatctttcttttgccgtgtcagtgtccggaaaagccacgagaatgaaatccgctaccaccccttccgcatgacgccctacctggtcaaggtgcgggaccaacaaggtgctgagagtcagctttgctgccttctgctggcagagagagtgcactctggttatgaagcccctagaattcctcctgaaaagagaatttttacaaccacccatacaccaaattgtttgttccaggatgtggatgaaagtcctgcagtcaggcgggcagcctttcgactattctcccattcggtttcgcgcccggaacggagagtacatcacgttggacaccagctggtccagcttcatcaacccatggagcaggaaaatctccttcatcattgggaggcacaaagtcagggtgggccctttgaatgaggacgtgtttgca

SEQ ID NO: 21908 - DNA, 551 bp, Homo sapiens
  source 1..551: mol_type = unassigned DNA
atcacactcaggaattcctgatgtgggttcataacttttccttctgtcccatccctggtccccaggtgagtccaggtaaagaagaacaagaagagtaaagagagatgctgcgggctccagcttcttggacagtctcgccttccccatgagagcctacacattcagagcctgctgcgtgggagcctgaaagctccttcctgtcctcttcgttccagagcccagcatgaatggatacgcggaatttccgcccagccccagtaaccccaccaaggagcccgtggagccccagcccagccaggtcccactgcaggaagatgtggacatgagcagtggctccagtggacatgagaccaacgaaaactgctccacggggcgggactcgcagggcagtgactgtgacgacagtgggaaggagctggggatgctggtggagccaccggatgcccgccagagtccagatacctttagcctgatgatggcaaaatctgaacacaacccatctacaagtggctgcagtagcgaccagtcttcgaaagtggacacacacaaag

SEQ ID NO: 21909 - DNA, 1826 bp, Homo sapiens
  source 1..1826: mol_type = unassigned DNA
atcacactcaggaattcctgatgtgggttcataacttttccttctgtcccatccctggtccccaggtgagtccaggtaaagaagaacaagaagagtaaagagagatgctgcgggctccagcttcttggacagtctcgccttccccatgagagcctacacattcagagcctgctgcgtgggagcctgaaagctccttcctgtcctcttcgttccagagcccagcatgaatggatacgcggaatttccgcccagccccagtaaccccaccaaggagcccgtggagccccagcccagccaggtcccactgcaggaagatgtggacatgagcagtggctccagtggacatgagaccaacgaaaactgctccacggggcgggactcgcagggcagtgactgtgacgacagtgggaaggagctggggatgctggtggagccaccggatgcccgccagagtccagatacctttagcctgatgatggcaaaatctgaacacaacccatctacaagtggctgcagtagcgaccagtcttcgaaagtggacacacacaaagaactgataaaaacactaaaggagctgaaggtccacctccctgcagacaagaaggccaagggcaaggccagtacgctggccaccttgaagtacgccctcaggagcgtgaagcaggtgaaagccaatgaagagtattaccagctgctgatgtccagcgagggtcacccctgtggagcagacgtgccctcctacaccgtggaggagatggagagcgttacctctgagcacattgtgaagaatgccgatatgtttgcggtggccgtgtccctggtgtctgggaagatcctgtacatctctgaccaggttgcatccatatttcactgtaaaagagatgccttcagcgatgccaagtttgtggagttcctggcgcctcacgatgtgggcgtgttccacagtttcacctccccgtacaagcttcccttgtggagcatgtgcagtggagcagattcttttactcaagaatgcatggaggagaaatctttcttttgccgtgtcagtgtccggaaaagccacgagaatgaaatccgctaccaccccttccgcatgacgccctacctggtcaaggtgcgggaccaacaaggtgctgagagtcagctttgctgccttctgctggcagagagagtgcactctggttatgaagcccctagaattcctcctgaaaagagaatttttacaaccacccatacaccaaattgtttgttccaggatgtggatgaaagggcggtccctctcctgggctacctacctcaggacctgattgaaaccccagtgctcgtgcagctccaccctagtgacaggcccttgatgctggccatccacaaaaagatcctgcagtcaggcgggcagcctttcgactattctcccattcggtttcgcgcccggaacggagagtacatcacgttggacaccagctggtccagcttcatcaacccatggagcaggaaaatctccttcatcattgggaggcacaaagtcagggtgggccctttgaatgaggacgtgtttgcagcccacccctgcacagaggagaaggccctgcaccccagcattcaggagctcacagagcagatccaccggctcctgctgcaggtgggtgtggtgcctgcatgtcctcctcccaggtagcagcctgagagccccctgcagaggacataggctctgaaccctggtcctggcacacccactcagacagcttcatctgtcattctctgaacatcccccaggggacagtttgggcatagactgtgctagtccgagacagtccatagtacccttg

SEQ ID NO: 21910 - DNA, 3071 bp, Homo sapiens
  source 1..3071: mol_type = unassigned DNA
ttcggggactaactgcaacggagagactcaagatgattccctttttacccatgttttctctactattgctgcttattgttaaccctataaacgccaacaatcattatgacaagatcttggctcatagtcgtatcaggggtcgggaccaaggcccaaatgtctgtgcccttcaacagattttgggcaccaaaaagaaatacttcagcacttgtaagaactggtataaaaagtccatctgtggacagaaaacgactgtgttatatgaatgttgccctggttatatgagaatggaaggaatgaaaggctgcccagcagttttgcccattgaccatgtttatggcactctgggcatcgtgggagccaccacaacgcagcgctattctgacgcctcaaaactgagggaggagatcgagggaaagggatccttcacttactttgcaccgagtaatgaggcttgggacaacttggattctgatatccgtagaggtttggagagcaacgtgaatgttgaattactgaatgctttacatagtcacatgattaataagagaatgttgaccaaggacttaaaaaatggcatgattattccttcaatgtataacaatttggggcttttcattaaccattatcctaatggggttgtcactgttaattgtgctcgaatcatccatgggaaccagattgcaacaaatggtgttgtccatgtcattgaccgtgtgcttacacaaattggtacctcaattcaagacttcattgaagcagaagatgacctttcatcttttagagcagctgccatcacatcggacatattggaggcccttggaagagacggtcacttcacactctttgctcccaccaatgaggcttttgagaaacttccacgaggtgtcctagaaaggatcatgggagacaaagtggcttccgaagctcttatgaagtaccacatcttaaatactctccagtgttctgagtctattatgggaggagcagtctttgagacgctggaaggaaatacaattgagataggatgtgacggtgacagtataacagtaaatggaatcaaaatggtgaacaaaaaggatattgtgacaaataatggtgtgatccatttgattgatcaggtcctaattcctgattctgccaaacaagttattgagctggctggaaaacagcaaaccaccttcacggatcttgtggcccaattaggcttggcatctgctctgaggccagatggagaatacactttgctggcacctgtgaataatgcattttctgatgatactctcagcatggatcagcgcctccttaaattaattctgcagaatcacatattgaaagtaaaagttggccttaatgagctttacaacgggcaaatactggaaaccatcggaggcaaacagctcagagtcttcgtatatcgtacagctgtctgcattgaaaattcatgcatggagaaagggagtaagcaagggagaaacggtgcgattcacatattccgcgagatcatcaagccagcagagaaatccctccatgaaaagttaaaacaagataagcgctttagcaccttcctcagcctacttgaagctgcagacttgaaagagctcctgacacaacctggagactggacattatttgtgccaaccaatgatgcttttaagggaatgactagtgaagaaaaagaaattctgatacgggacaaaaatgctcttcaaaacatcattctttatcacctgacaccaggagttttcattggaaaaggatttgaacctggtgttactaacattttaaagaccacacaaggaagcaaaatctttctgaaagaagtaaatgatacacttctggtgaatgaattgaaatcaaaagaatctgacatcatgacaacaaatggtgtaattcatgttgtagataaactcctctatccagcagacacacctgttggaaatgatcaactgctggaaatacttaataaattaatcaaatacatccaaattaagtttgttcgtggtagcaccttcaaagaaatccccgtgactgtctataagccaattattaaaaaatacaccaaaatcattgatggagtgcctgtggaaataactgaaaaagagacacgagaagaacgaatcattacaggtcctgaaataaaatacactaggatttctactggaggtggagaaacagaagaaactctgaagaaattgttacaagaagaggtcaccaaggtcaccaaattcattgaaggtggtgatggtcatttatttgaagatgaagaaattaaaagactgcttcagggagacacacccgtgaggaagttgcaagccaacaaaaaagttcaaggatctagaagacgattaagggaaggtcgttctcagtgaaaatccaaaaaccagaaaaaaatgtttatacaaccctaagtcaataacctgaccttagaaaattgtgagagccaagttgacttcaggaactgaaacatcagcacaaagaagcaatcatcaaataattctgaacacaaatttaatatttttttttctgaatgagaaacatgagggaaattgtggagttagcctcctgtggtaaaggaattgaagaaaatataacaccttacaccctttttcatcttgacattaaaagttctggctaactttggaatccattagagaaaaatccttgtcaccagattcattacaattcaaatcgaagagttgtgaactgttatcccattgaaaagaccgagccttgtatgtatgttatggatacataaaatgcacgcaagccattatctctccatgggaagctaagttataaaaataggtgcttggtgtacaaaactttttatatcaaaaggctttgcacatttctatatgagtgggtttactggtaaattatgttattttttacaactaattttgtactctcagaatgtttgtcatatgcttcttgcaatgcatattttttaatctcaaacgtttcaataaaaccatttttcagatataaagagaattacttcaaattgagtaattcagaaaaactcaagatttaagttaaaaagtggtttggacttgggaacaggactt

SEQ ID NO: 21911 - DNA, 3196 bp, Homo sapiens
  source 1..3196: mol_type = unassigned DNA
ctaactgcaacggagagactcaagatgattccctttttacccatgttttctctactattgctgcttattgttaaccctataaacgccaacaatcattatgacaagatcttggctcatagtcgtatcaggggtcgggaccaaggcccaaatgtctgtgcccttcaacagattttgggcaccaaaaagaaatacttcagcacttgtaagaactggtataaaaagtccatctgtggacagaaaacgactgtgttatatgaatgttgccctggttatatgagaatggaaggaatgaaaggctgcccagcagttttgcccattgaccatgtttatggcactctgggcatcgtgggagccaccacaacgcagcgctattctgacgcctcaaaactgagggaggagatcgagggaaagggatccttcacttactttgcaccgagtaatgaggcttgggacaacttggattctgatatccgtagaggtttggagagcaacgtgaatgttgaattactgaatgctttacatagtcacatgattaataagagaatgttgaccaaggacttaaaaaatggcatgattattccttcaatgtataacaatttggggcttttcattaaccattatcctaatggggttgtcactgttaattgtgctcgaatcatccatgggaaccagattgcaacaaatggtgttgtccatgtcattgaccgtgtgcttacacaaattggtacctcaattcaagacttcattgaagcagaagatgacctttcatcttttagagcagctgccatcacatcggacatattggaggcccttggaagagacggtcacttcacactctttgctcccaccaatgaggcttttgagaaacttccacgaggtgtcctagaaaggatcatgggagacaaagtggcttccgaagctcttatgaagtaccacatcttaaatactctccagtgttctgagtctattatgggaggagcagtctttgagacgctggaaggaaatacaattgagataggatgtgacggtgacagtataacagtaaatggaatcaaaatggtgaacaaaaaggatattgtgacaaataatggtgtgatccatttgattgatcaggtcctaattcctgattctgccaaacaagttattgagctggctggaaaacagcaaaccaccttcacggatcttgtggcccaattaggcttggcatctgctctgaggccagatggagaatacactttgctggcacctgtgaataatgcattttctgatgatactctcagcatggatcagcgcctccttaaattaattctgcagaatcacatattgaaagtaaaagttggccttaatgagctttacaacgggcaaatactggaaaccatcggaggcaaacagctcagagtcttcgtatatcgtacagctgtctgcattgaaaattcatgcatggagaaagggagtaagcaagggagaaacggtgcgattcacatattccgcgagatcatcaagccagcagagaaatccctccatgaaaagttaaaacaagataagcgctttagcaccttcctcagcctacttgaagctgcagacttgaaagagctcctgacacaacctggagactggacattatttgtgccaaccaatgatgcttttaagggaatgactagtgaagaaaaagaaattctgatacgggacaaaaatgctcttcaaaacatcattctttatcacctgacaccaggagttttcattggaaaaggatttgaacctggtgttactaacattttaaagaccacacaaggaagcaaaatctttctgaaagaagtaaatgatacacttctggtgaatgaattgaaatcaaaagaatctgacatcatgacaacaaatggtgtaattcatgttgtagataaactcctctatccagcagacacacctgttggaaatgatcaactgctggaaatacttaataaattaatcaaatacatccaaattaagtttgttcgtggtagcaccttcaaagaaatccccgtgactgtctatagacccacactaacaaaagtcaaaattgaaggtgaacctgaattcagactgattaaagaaggtgaaacaataactgaagtgatccatggagagccaattattaaaaaatacaccaaaatcattgatggagtgcctgtggaaataactgaaaaagagacacgagaagaacgaatcattacaggtcctgaaataaaatacactaggatttctactggaggtggagaaacagaagaaactctgaagaaattgttacaagaagaggtcaccaaggtcaccaaattcattgaaggtggtgatggtcatttatttgaagatgaagaaattaaaagactgcttcagggagacacacccgtgaggaagttgcaagccaacaaaaaagttcaaggatctagaagacgattaagggaaggtcgttctcagtgaaaatccaaaaaccagaaaaaaatgtttatacaaccctaagtcaataacctgaccttagaaaattgtgagagccaagttgacttcaggaactgaaacatcagcacaaagaagcaatcatcaaataattctgaacacaaatttaatatttttttttctgaatgagaaacatgagggaaattgtggagttagcctcctgtggtaaaggaattgaagaaaatataacaccttacaccctttttcatcttgacattaaaagttctggctaactttggaatccattagagaaaaatccttgtcaccagattcattacaattcaaatcgaagagttgtgaactgttatcccattgaaaagaccgagccttgtatgtatgttatggatacataaaatgcacgcaagccattatctctccatgggaagctaagttataaaaataggtgcttggtgtacaaaactttttatatcaaaaggctttgcacatttctatatgagtgggtttactggtaaattatgttattttttacaactaattttgtactctcagaatgtttgtcatatgcttcttgcaatgcatattttttaatctcaaacgtttcaataaaaccatttttcagatataaagagaattacttcaaattgagtaattcagaaaaactcaagatttaagttaaaaagtggtttggacttgggaacaggactttatacctcttttactgtaacaagtactcattaaaggaaattga

SEQ ID NO: 21912 - DNA, 3373 bp, Homo sapiens
  source 1..3373: mol_type = unassigned DNA
agactctcaggttgatgcagtgttccctcccacaactctgacatgtatataaattctgagctctccaaagcccactgccagttctcttcggggactaactgcaacggagagactcaagatgattccctttttacccatgttttctctactattgctgcttattgttaaccctataaacgccaacaatcattatgacaagatcttggctcatagtcgtatcaggggtcgggaccaaggcccaaatgtctgtgcccttcaacagattttgggcaccaaaaagaaatacttcagcacttgtaagaactggtataaaaagtccatctgtggacagaaaacgactgtgttatatgaatgttgccctggttatatgagaatggaaggaatgaaaggctgcccagcagttttgcccattgaccatgtttatggcactctgggcatcgtgggagccaccacaacgcagcgctattctgacgcctcaaaactgagggaggagatcgagggaaagggatccttcacttactttgcaccgagtaatgaggcttgggacaacttggattctgatatccgtagaggtttggagagcaacgtgaatgttgaattactgaatgctttacatagtcacatgattaataagagaatgttgaccaaggacttaaaaaatggcatgattattccttcaatgtataacaatttggggcttttcattaaccattatcctaatggggttgtcactgttaattgtgctcgaatcatccatgggaaccagattgcaacaaatggtgttgtccatgtcattgaccgtgtgcttacacaaattggtacctcaattcaagacttcattgaagcagaagatgacctttcatcttttagagcagctgccatcacatcggacatattggaggcccttggaagagacggtcacttcacactctttgctcccaccaatgaggcttttgagaaacttccacgaggtgtcctagaaaggatcatgggagacaaagtggcttccgaagctcttatgaagtaccacatcttaaatactctccagtgttctgagtctattatgggaggagcagtctttgagacgctggaaggaaatacaattgagataggatgtgacggtgacagtataacagtaaatggaatcaaaatggtgaacaaaaaggatattgtgacaaataatggtgtgatccatttgattgatcaggtcctaattcctgattctgccaaacaagttattgagctggctggaaaacagcaaaccaccttcacggatcttgtggcccaattaggcttggcatctgctctgaggccagatggagaatacactttgctggcacctgtgaataatgcattttctgatgatactctcagcatggatcagcgcctccttaaattaattctgcagaatcacatattgaaagtaaaagttggccttaatgagctttacaacgggcaaatactggaaaccatcggaggcaaacagctcagagtcttcgtatatcgtacagctgtctgcattgaaaattcatgcatggagaaagggagtaagcaagggagaaacggtgcgattcacatattccgcgagatcatcaagccagcagagaaatccctccatgaaaagttaaaacaagataagcgctttagcaccttcctcagcctacttgaagctgcagacttgaaagagctcctgacacaacctggagactggacattatttgtgccaaccaatgatgcttttaagggaatgactagtgaagaaaaagaaattctgatacgggacaaaaatgctcttcaaaacatcattctttatcacctgacaccaggagttttcattggaaaaggatttgaacctggtgttactaacattttaaagaccacacaaggaagcaaaatctttctgaaagaagtaaatgatacacttctggtgaatgaattgaaatcaaaagaatctgacatcatgacaacaaatggtgtaattcatgttgtagataaactcctctatccagcagacacacctgttggaaatgatcaactgctggaaatacttaataaattaatcaaatacatccaaattaagtttgttcgtggtagcaccttcaaagaaatccccgtgactgtctatacaactaaaattataaccaaagttgtggaaccaaaaattaaagtgattgaaggcagtcttcagcctattatcaaaactgaaggacccacactaacaaaagtcaaaattgaaggtgaacctgaattcagactgattaaagaaggtgaaacaataactgaagtgatccatggagagccaattattaaaaaatacaccaaaatcattgatggagtgcctgtggaaataactgaaaaagagacacgagaagaacgaatcattacaggtcctgaaataaaatacactaggatttctactggaggtggagaaacagaagaaactctgaagaaattgttacaagaagaggtcaccaaggtcaccaaattcattgaaggtggtgatggtcatttatttgaagatgaagaaattaaaagactgcttcagggagacacacccgtgaggaagttgcaagccaacaaaaaagttcaaggatctagaagacgattaagggaaggtcgttctcagtgaaaatccaaaaaccagaaaaaaatgtttatacaaccctaagtcaataacctgaccttagaaaattgtgagagccaagttgacttcaggaactgaaacatcagcacaaagaagcaatcatcaaataattctgaacacaaatttaatatttttttttctgaatgagaaacatgagggaaattgtggagttagcctcctgtggtaaaggaattgaagaaaatataacaccttacaccctttttcatcttgacattaaaagttctggctaactttggaatccattagagaaaaatccttgtcaccagattcattacaattcaaatcgaagagttgtgaactgttatcccattgaaaagaccgagccttgtatgtatgttatggatacataaaatgcacgcaagccattatctctccatgggaagctaagttataaaaataggtgcttggtgtacaaaactttttatatcaaaaggctttgcacatttctatatgagtgggtttactggtaaattatgttattttttacaactaattttgtactctcagaatgtttgtcatatgcttcttgcaatgcatattttttaatctcaaacgtttcaataaaaccatttttcagatataaagagaattacttcaaattgagtaattcagaaaaactcaagatttaagttaaaaagtggtttggacttgggaacaggactttatacctcttttactgtaacaagtactcattaaaggaaattgaat

SEQ ID NO: 21913 - DNA, 3210 bp, Homo sapiens
  source 1..3210: mol_type = unassigned DNA
ctcttcggggactaactgcaacggagagactcaagatgattccctttttacccatgttttctctactattgctgcttattgttaaccctataaacgccaacaatcattatgacaagatcttggctcatagtcgtatcaggggtcgggaccaaggcccaaatgtctgtgcccttcaacagattttgggcaccaaaaagaaatacttcagcacttgtaagaactggtataaaaagtccatctgtggacagaaaacgactgtgttatatgaatgttgccctggttatatgagaatggaaggaatgaaaggctgcccagcagttttgcccattgaccatgtttatggcactctgggcatcgtgggagccaccacaacgcagcgctattctgacgcctcaaaactgagggaggagatcgagggaaagggatccttcacttactttgcaccgagtaatgaggcttgggacaacttggattctgatatccgtagaggtttggagagcaacgtgaatgttgaattactgaatgctttacatagtcacatgattaataagagaatgttgaccaaggacttaaaaaatggcatgattattccttcaatgtataacaatttggggcttttcattaaccattatcctaatggggttgtcactgttaattgtgctcgaatcatccatgggaaccagattgcaacaaatggtgttgtccatgtcattgaccgtgtgcttacacaaattggtacctcaattcaagacttcattgaagcagaagatgacctttcatcttttagagcagctgccatcacatcggacatattggaggcccttggaagagacggtcacttcacactctttgctcccaccaatgaggcttttgagaaacttccacgaggtgtcctagaaaggatcatgggagacaaagtggcttccgaagctcttatgaagtaccacatcttaaatactctccagtgttctgagtctattatgggaggagcagtctttgagacgctggaaggaaatacaattgagataggatgtgacggtgacagtataacagtaaatggaatcaaaatggtgaacaaaaaggatattgtgacaaataatggtgtgatccatttgattgatcaggtcctaattcctgattctgccaaacaagttattgagctggctggaaaacagcaaaccaccttcacggatcttgtggcccaattaggcttggcatctgctctgaggccagatggagaatacactttgctggcacctgtgaataatgcattttctgatgatactctcagcatggatcagcgcctccttaaattaattctgcagaatcacatattgaaagtaaaagttggccttaatgagctttacaacgggcaaatactggaaaccatcggaggcaaacagctcagagtcttcgtatatcgtacagctgtctgcattgaaaattcatgcatggagaaagggagtaagcaagggagaaacggtgcgattcacatattccgcgagatcatcaagccagcagagaaatccctccatgaaaagttaaaacaagataagcgctttagcaccttcctcagcctacttgaagctgcagacttgaaagagctcctgacacaacctggagactggacattatttgtgccaaccaatgatgcttttaagggaatgactagtgaagaaaaagaaattctgatacgggacaaaaatgctcttcaaaacatcattctttatcacctgacaccaggagttttcattggaaaaggatttgaacctggtgttactaacattttaaagaccacacaaggaagcaaaatctttctgaaagaagtaaatgatacacttctggtgaatgaattgaaatcaaaagaatctgacatcatgacaacaaatggtgtaattcatgttgtagataaactcctctatccagcagacacacctgttggaaatgatcaactgctggaaatacttaataaattaatcaaatacatccaaattaagtttgttcgtggtagcaccttcaaagaaatccccgtgactgtctatacaactaaaattataaccaaagttgtggaaccaaaaattaaagtgattgaaggcagtcttcagcctattatcaaaactgaaggacccacactaacaaaagtcaaaattgaaggtgaacctgaattcagactgattaaagaaggtgaaacaataactgaagtgatccatggagagccaattattaaaaaatacaccaaaatcattgatggagtgcctgtggaaataactgaaaaagagacacgagaagaacgaatcattacaggtcctgaaataaaatacactaggatttctactggaggtggagaaacagaagaaactctgaagaaattgttacaagaagacacacccgtgaggaagttgcaagccaacaaaaaagttcaaggatctagaagacgattaagggaaggtcgttctcagtgaaaatccaaaaaccagaaaaaaatgtttatacaaccctaagtcaataacctgaccttagaaaattgtgagagccaagttgacttcaggaactgaaacatcagcacaaagaagcaatcatcaaataattctgaacacaaatttaatatttttttttctgaatgagaaacatgagggaaattgtggagttagcctcctgtggtaaaggaattgaagaaaatataacaccttacaccctttttcatcttgacattaaaagttctggctaactttggaatccattagagaaaaatccttgtcaccagattcattacaattcaaatcgaagagttgtgaactgttatcccattgaaaagaccgagccttgtatgtatgttatggatacataaaatgcacgcaagccattatctctccatgggaagctaagttataaaaataggtgcttggtgtacaaaactttttatatcaaaaggctttgcacatttctatatgagtgggtttactggtaaattatgttattttttacaactaattttgtactctcagaatgtttgtcatatgcttcttgcaatgcatattttttaatctcaaacgtttcaataaaaccatttttcagatataaagagaattacttcaaattgagtaattcagaaaaactcaagatttaagttaaaaagtggtttggacttgggaacaggactttatacctcttttactgtaacaagtactcattaaaggaaattgaatgaaa

SEQ ID NO: 21914 - DNA, 1952 bp, Homo sapiens
  source 1..1952: mol_type = unassigned DNA
acaccacagacaaactgcccaaaccagagatggaaaagaaatccataggaataaagatacattgtattcagaggaaaatgacaagagagtcaacttttatcagaaacattgcaatccagaaaataaaagaaaaaaacttataataactgccaacaagaaaaagtcaacctagaattttcttgaatagaaaatattcttctaaaaattagatgaaacaaaaataagtaaaagctgagaaaatgtgtcactagaaactctctttgtaagaaatgcaaaaggaaattcttcaagctgagcaaaatgataccaagaaatctggatctactagaaggaatggaaagcacacaaatgcccaaatgtctgtgcccttcaacagattttgggcaccaaaaagaaatacttcagcacttgtaagaactggtataaaaagtccatctgtggacagaaaacgactgtgttatatgaatgttgccctggttatatgagaatggaaggaatgaaaggctgcccagcagttttgcccattgaccatgtttatggcactctgggcatcgtgggagccaccacaacgcagcgctattctgacgcctcaaaactgagggaggagatcgagggaaagggatccttcacttactttgcaccgagtaatgaggcttgggacaacttggattctgatatccgtagaggtttggagagcaacgtgaatgttgaattactgaatgctttacatagtcacatgattaataagagaatgttgaccaaggacttaaaaaatggcatgattattccttcaatgtataacaatttggggcttttcattaaccattatcctaatggggttgtcactgttaattgtgctcgaatcatccatgggaaccagattgcaacaaatggtgttgtccatgtcattgaccgtgtgcttacacaaattggtacctcaattcaagacttcattgaagcagaagatgacctttcatcttttagagcagctgccatcacatcggacatattggaggcccttggaagagacggtcacttcacactctttgctcccaccaatgaggcttttgagaaacttccacgaggtgtcctagaaaggatcatgggagacaaagtggcttccgaagctcttatgaagtaccacatcttaaatactctccagtgttctgagtctattatgggaggagcagtctttgagacgctggaaggaaatacaattgagataggatgtgacggtgacagtataacagtaaatggaatcaaaatggtgaacaaaaaggatattgtgacaaattggtgtgatccatttgattgatcaggtcctaattcctgattctgccaaacaagttattgagctggctggaaaacagcaaaccaccttcacggatcttgtggcccaattaggcttggcatctgctctgaggccagatggagaatacactttgctggcacctgtgaataatgcattttctgatgatactctcagcatggatcagcgcctccttaaattaattctgcagaatcacatattgaaagtaaaagttggccttaatgagctttacaacgggcaaatactggaaaccatcggaggcaaacagctcagagtcttcgtatatcgtacagctgtctgcattgaaaattcatgcatggagaaagggagtaagcaagggagaaacggtgcgattcacatattccgcgagatcatcaagccagcagagaaatccctccatgaaaagttaaaacaagataagcgctttagcaccttcctcagcctacttgaagctgcagacttgaaagagctcctgacacaacctggagactggacattatttgtgccaaccaatgatgcttttaagggaatgactagtgaagaaaaagaaattctgatacgggacaaaaatgctcttcaaaacatcattctttatcacctgacaccaggagttttcattgga

SEQ ID NO: 21915 - DNA, 3214 bp, Homo sapiens
  source 1..3214: mol_type = unassigned DNA
agactctcaggttgatgcagtgttccctcccacaactctgacatgtatataaattctgagctctccaaagcccactgccagttctcttcggggactaactgcaacggagagactcaagatgattccctttttacccatgttttctctactattgctgcttattgttaaccctataaacgccaacaatcattatgacaagatcttggctcatagtcgtatcaggggtcgggaccaaggcccaaatgtctgtgcccttcaacagattttgggcaccaaaaagaaatacttcagcacttgtaagaactggtataaaaagtccatctgtggacagaaaacgactgtgttatatgaatgttgccctggttatatgagaatggaaggaatgaaaggctgcccagcagttttgcccattgaccatgtttatggcactctgggcatcgtgggagccaccacaacgcagcgctattctgacgcctcaaaactgagggaggagatcgagggaaagggatccttcacttactttgcaccgagtaatgaggcttgggacaacttggattctgatatccgtagaggtttggagagcaacgtgaatgttgaattactgaatgctttacatagtcacatgattaataagagaatgttgaccaaggacttaaaaaatggcatgattattccttcaatgtataacaatttggggcttttcattaaccattatcctaatggggttgtcactgttaattgtgctcgaatcatccatgggaaccagattgcaacaaatggtgttgtccatgtcattgaccgtgtgcttacacaaattggtacctcaattcaagacttcattgaagcagaagatgacctttcatcttttagagcagctgccatcacatcggacatattggaggcccttggaagagacggtcacttcacactctttgctcccaccaatgaggcttttgagaaacttccacgaggtgtcctagaaaggatcatgggagacaaagtggcttccgaagctcttatgaagtaccacatcttaaatactctccagtgttctgagtctattatgggaggagcagtctttgagacgctggaaggaaatacaattgagataggatgtgacggtgacagtataacagtaaatggaatcaaaatggtgaacaaaaaggatattgtgacaaataatggtgtgatccatttgattgatcaggtcctaattcctgattctgccaaacaagttattgagctggctggaaaacagcaaaccaccttcacggatcttgtggcccaattaggcttggcatctgctctgaggccagatggagaatacactttgctggcacctgtgaataatgcattttctgatgatactctcagcatggatcagcgcctccttaaattaattctgcagaatcacatattgaaagtaaaagttggccttaatgagctttacaacgggcaaatactggaaaccatcggaggcaaacagctcagagtcttcgtatatcgtacagctgtctgcattgaaaattcatgcatggagaaagggagtaagcaagggagaaacggtgcgattcacatattccgcgagatcatcaagccagcagagaaatccctccatgaaaagttaaaacaagataagcgctttagcaccttcctcagcctacttgaagctgcagacttgaaagagctcctgacacaacctggagactggacattatttgtgccaaccaatgatgcttttaagggaatgactagtgaagaaaaagaaattctgatacgggacaaaaatgctcttcaaaacatcattctttatcacctgacaccaggagttttcattggaaaaggatttgaacctggtgttactaacattttaaagaccacacaaggaagcaaaatctttctgaaagaagtaaatgatacacttctggtgaatgaattgaaatcaaaagaatctgacatcatgacaacaaatggtgtaattcatgttgtagataaactcctctatccagcagacacacctgttggaaatgatcaactgctggaaatacttaataaattaatcaaatacatccaaattaagtttgttcgtggtagcaccttcaaagaaatccccgtgactgtctatagacccacactaacaaaagtcaaaattgaaggtgaacctgaattcagactgattaaagaaggtgaaacaataactgaagtgatccatggagagccaattattaaaaaatacaccaaaatcattgatggagtgcctgtggaaataactgaaaaagagacacgagaagaacgaatcattacaggtcctgaaataaaatacactaggatttctactggaggtggagaaacagaagaaactctgaagaaattgttacaagaagacacacccgtgaggaagttgcaagccaacaaaaaagttcaaggatctagaagacgattaagggaaggtcgttctcagtgaaaatccaaaaaccagaaaaaaatgtttatacaaccctaagtcaataacctgaccttagaaaattgtgagagccaagttgacttcaggaactgaaacatcagcacaaagaagcaatcatcaaataattctgaacacaaatttaatatttttttttctgaatgagaaacatgagggaaattgtggagttagcctcctgtggtaaaggaattgaagaaaatataacaccttacaccctttttcatcttgacattaaaagttctggctaactttggaatccattagagaaaaatccttgtcaccagattcattacaattcaaatcgaagagttgtgaactgttatcccattgaaaagaccgagccttgtatgtatgttatggatacataaaatgcacgcaagccattatctctccatgggaagctaagttataaaaataggtgcttggtgtacaaaactttttatatcaaaaggctttgcacatttctatatgagtgggtttactggtaaattatgttattttttacaactaattttgtactctcagaatgtttgtcatatgcttcttgcaatgcatattttttaatctcaaacgtttcaataaaaccatttttcagatataaagagaattacttcaaattgagtaattcagaaaaactcaagatttaagttaaaaagtggtttggacttgggaacaggactttatacctcttttactgtaacaagtactcattaaaggaaattgaatgaaatt

SEQ ID NO: 21916 - DNA, 2250 bp, Homo sapiens
  source 1..2250: mol_type = unassigned DNA
atgattccctttttacccatgttttctctactattgctgcttattgttaaccctataaacgccaacaatcattatgacaagatcttggctcatagtcgtatcaggggtcgggaccaaggcccaaatgtctgtgcccttcaacagattttgggcaccaaaaagaaatacttcagcacttgtaagaactggtataaaaagtccatctgtggacagaaaacgactgtgttatatgaatgttgccctggttatatgagaatggaaggaatgaaaggctgcccagcagttttgcccattgaccatgtttatggcactctgggcatcgtgggagccaccacaacgcagcgctattctgacgcctcaaaactgagggaggagatcgagggaaagggatccttcacttactttgcaccgagtaatgaggcttgggacaacttggattctgatatccgtagaggtttggagagcaacgtgaatgttgaattactgaatgctttacatagtcacatgattaataagagaatgttgaccaaggacttaaaaaatggcatgattattccttcaatgtataacaatttggggcttttcattaaccattatcctaatggggttgtcactgttaattgtgctcgaatcatccatgggaaccagattgcaacaaatggtgttgtccatgtcattgaccgtgtgcttacacaaattggtacctcaattcaagacttcattgaagcagaagatgacctttcatcttttagagcagctgccatcacatcggacatattggaggcccttggaagagacggtcacttcacactctttgctcccaccaatgaggcttttgagaaacttccacgaggtgtcctagaaaggatcatgggagacaaagtggcttccgaagctcttatgaagtaccacatcttaaatactctccagtgttctgagtctattatgggaggagcagtctttgagacgctggaaggaaatacaattgagataggatgtgacggtgacagtataacagtaaatggaatcaaaatggtgaacaaaaaggatattgtgacaaataatggtgtgatccatttgattgatcaggtcctaattcctgattctgccaaacaagttattgagctggctggaaaacagcaaaccaccttcacggatcttgtggcccaattaggcttggcatctgctctgaggccagatggagaatacactttgctggcacctgtgaataatgcattttctgatgatactctcagcatggatcagcgcctccttaaattaattctgcagaatcacatattgaaagtaaaagttggccttaatgagctttacaacgggcaaatactggaaaccatcggaggcaaacagctcagagtcttcgtatatcgtacagctgtctgcattgaaaattcatgcatggagaaagggagtaagcaagggagaaacggtgcgattcacatattccgcgagatcatcaagccagcagagaaatccctccatgaaaagttaaaacaagataagcgctttagcaccttcctcagcctacttgaagctgcagacttgaaagagctcctgacacaacctggagactggacattatttgtgccaaccaatgatgcttttaagggaatgactagtgaagaaaaagaaattctgatacgggacaaaaatgctcttcaaaacatcattctttatcacctgacaccaggagttttcattggaaaaggatttgaacctggtgttactaacattttaaagaccacacaaggaagcaaaatctttctgaaagaagtaaatgatacacttctggtgaatgaattgaaatcaaaagaatctgacatcatgacaacaaatggtgtaattcatgttgtagataaactcctctatccagcagacacacctgttggaaatgatcaactgctggaaatacttaataaattaatcaaatacatccaaattaagtttgttcgtggtagcaccttcaaagaaatccccgtgactgtctatagtcctgaaataaaatacactaggatttctactggaggtggagaaacagaagaaactctgaagaaattgttacaagaagaggtcaccaaggtcaccaaattcattgaaggtggtgatggtcatttatttgaagatgaagaaattaaaagactgcttcagggagacacacccgtgaggaagttgcaagccaacaaaaaagttcaaggatctagaagacgattaagggaaggtcgttctcagtga

SEQ ID NO: 21917 - DNA, 3608 bp, Homo sapiens
  source 1..3608: mol_type = unassigned DNA
acactgcctttccccattgggtctctgtaagagtcacacgctttgggcatccttgaaaagaatcttctgaggcctcagcattttatctgagtcttctgaatcccacttagaactgtgttgagctctcacccatcacgatgagcaacaaattcctgggcacctggaaacttgtctctagtgagaactttgacgattacatgaaagctctgggtgtggggttagccaccagaaaactgggaaatttggccaaacccactgtgatcatcagcaagaaaggagatattataactatacgaactgaaagtacctttaaaaatacagaaatctccttcaagctaggccaggaatttgaagaaaccacagctgacaatagaaagaccaagagcatcgtaaccctgcagagaggatcactgaatcaagtgcagagatgggatggcaaagagacaaccataaagagaaagctagtgaatgggaaaatggtagcggaatgtaaaatgaagggcgtggtgtgcaccagaatctatgagaaggtctgaaaaatcatttcttcattgaagtggctttttatcatttaatgatggaaatcaattgcttccattgacaaaactgaatacactgcaaatatttgtttttgcttttgtcttaatatatcagatatgcaaaggcctaaactgagaattaatctaaaagtcagtgttatttaaacattttcaatgtgcatgcatgtcattattacatcaaagcatatatattggccagacacaaacagttgatgatgtcattcaattaactacaaaattctaatctatgttgaactttgtatacttgaaatgataataaaaaggatataatttcttagtaaaatgaaatcaaagtattgatcagggtagcaaactcaaatgctgacaggggccagaggagatatggggaaggagcatcagaaatgaggcaagctaggagaatgggctattataatgtaaagaattgtagtctcagttaaaaggggtagcctctactccagccaacattttaaaattaatggataatttatagacagttaaatttatagacagttaagtaaaaatggataatttatagacagataatttatagacaggtaaatgtgagttaaatataactcacatcccactcaagacacaaaacattttcttaatcctagtacatttttttctgtcccttcccaatcagtgtccttttctgttccacccctaccaaaagcaagtagtggtttggtttctatcatatagattaattttacctgctcatatgaagggaattgtacatcatgcattcttttctgtttgccttttttaaattcagcatcatgtttttgtgatacatccacattgttgcatgcagctgtagtttgtttctttttattaccaagtactatttcattgtatgaatatatcacagtttatccattctactattaagacaattgagctatttctaattttcggctgctatgaataaagctgctacaaatatttttgtacaagactttttgtaaacataggagtccctttattttaaataaataactagtcatatcattaggtccagtaattgttgacaggcaggaacgggggaccattgcattgtgcccaagtaataataaaactatttcagatgtattatatgattgagcaaatgagaaaacatgttgatgttgatgggagtcaggatgttcactatggaaaaacaaatatacaaatatgaaatgagggaaggcaagaaagaaccatgtggaaatggaatagaattggtataaattcataatttctaaaccatgtatatgtacgtttatatgtattataattgcatacacatgcctccatgcatatatgtgtgtgataatacacatgcatttatgtgcgtgtgtgtatacacatgcatatatttactaatcctatctgccaaaatggcttagacacaaaaacacctcagcagaaatgaatatacctagcactcagatcttcgtgtctaatatagtttgccactaaaaggaaccaaggctacttggaaaaatggatgattccaaagcaagggcaaggtaggaacaagatgagcttgaaatatcttgttatgccagaaagtaatgttaaaaaaaaaaatagaggtatattgccaaaacatagagccagcttgaaggggctcccactggccaaacttgagccaatctgagagcaaaataattgagaaaaataaataacaagataattgagaaaaaaataaaataaattcccaattccattgggaaaaaatagaaatccatgaatccatactgatataatgatagataatcgatagataggtagatgactgacagatgatagatagatatatagatagatagatagatagatagatagatagatagatagatagagaaatgagaaggtttctcttttgcaatagaacgtcatggaccagtgttaaatgtgagtggaaggagttctggaattggaaaaccatcatttttcaaccatcacagtaaatatggctcaggcaagaattatcaatcaatgctaaagctagggggaaatttcgcttaggagcaggatattagggtattagtctgggcttaaagtatctcctcacagattgttgttagtttctggggaaagaatagtaaccatgcaatggaaaaaaatggacaacctcttgactaggttatcaaaattaacctcaccaataaagggtggatgttcaacatgtgccttcaaatgtgacccactgagaaggaaacaacatcactgtaacaacaacaaccagaaacgacagggggttttgactgaattcttcaaaaatgtcaatgtcatagaagacaaagaaaggttgtggaaatgtttcagattaaatgatagtaaaaacacctgacaactaaacatagtaagtaatactagactggattctgtaccagaggtaacataagtgctccaaaggacaatgttaggtcaactggcaaattggaatatagacagtcaatcagataagaagtatactttgattaagtaaaaaaaatccctattcttggaaaatacacaataaagtattttgaggtaaagggccataatgtatgcaatctactctcaaaaaattcagaaacatatatttgtgtgcatttgcatgtgcaacagtacacacaaacatacataaagagagcaattgataaggcaaataaggtaacatttaacaataatctgatacacataaatagagaaagagcaattgataaagtaaatgaggtaaaatttaacaataatctgagcaaaaggtatatgtgttttctttgagacagtctgattcttgcaacttattctgtaagttggaacttatttccaaacatgattgaaaaaaaaccccgcacttggcaacttcttctctttttcagcctagaaatgtctgtgttaagtggttttttatttattgttgttgtttgttgttattgttgttttgttgccaggctccaactcacaaaatacgagtttaaaaactgcgttgttatttttagagatttgtgataatacaacttgttataaaatttattcctcaataaatataatttctctactatgcaaaaa

SEQ ID NO: 21918 - DNA, 1829 bp, Homo sapiens
  source 1..1829: mol_type = unassigned DNA
agttacagggagcaccaccagggaacatctcggggagcctggttggaagctgcaggcttagtctgtcggctgcgggtctctgactgccctgtggggagggtcttgccttaacatcccttgcatttggctgcaaagaaatctgcttggaagaaggggttacgctgtttggccgggcagaaactccgctgagcagaacttgccgccagaatgctcctcctgttgctgagtatcatcgtcctccacgtcgcggtgctggtgctgctgttcgtctccacgatcgtcagccaatggatcgtgggcaatggacacgcaactgatctctggcagaactgtagcacctcttcctcaggaaatgtccaccactgtttctcatcatcaccaaacgaatggctgcagtctgtccaggccaccatgatcctgtcgatcatcttcagcattctgtctctgttcctgttcttctgccaactcttcaccctcaccaaggggggcaggttttacatcactggaatcttccaaattcttgctggtctgtgcgtgatgagtgctgcggccatctacacggtgaggcacccggagtggcatctcaactcggattactcctacggtttcgcctacatcctggcctgggtggccttccccctggcccttctcagcggtgtcatctatgtgatcttgcggaaacgcgaatgaggcgcccagacggtctgtctgaggctctgagcgtacatagggaagggaggaagggaaaacagaaagcagacaaagaaaaaagagctagcccaaaatcccaaactcaaaccaaaccaaacagaaagcagtggaggtgggggttgctgttgattgaagatgtatataatatctccggtttataaaacctatttataacactttttacatatatgtacatagtattgtttgctttttatgttgaccatcagcctcgtgttgagccttaaagaagtagctaaggaactttacatcctaacagtataatccagctcagtatttttgttttgttttttgtttgtttgttttgttttacccagaaataagataactccatctcgccccttccctttcatctgaaagaagatacctccctcccagtccacctcatttagaaaaccaaagtgtgggtagaaaccccaaatgtccaaaagcccttttctggtgggtgacccagtgcatccaacagaaacagccgctgcccgaacctctgtgtgaagctttacgcgcacacggacaaaatgcccaaactggagcccttgcaaaaacacggcttgtggcattggcatacttgcccttacaggtggagtatcttcgtcacacatctaaatgagaaatcagtgacaacaagtctttgaaatggtgctatggatttaccattccttattatcactaatcatctaaacaactcactggaaatccaattaacaattttacaacataagatagaatggagacctgaataattctgtgtaatataaatggtttataactgcttttgtacctagctaggctgctattattactataatgagtaaatcataaagccttcatcactcccacatttttcttacggtcggagcatcagaacaagcgtctagactccttgggaccgtgagttcctagagcttggctgggtctaggctgttctgtgcctccaaggactgtctggcaatgacttgtattggccaccaactgtagatgtatatatggtgcccttctgatgctaagactccagaccttttgtttttgctttgcattttctgattttataccaactgtgtggactaagatgcattaaaataaacatcagagtaactcac

SEQ ID NO: 21919 - DNA, 816 bp, Homo sapiens
  source 1..816: mol_type = unassigned DNA
tcgcgcgcgcgcagccccgcagcgcagctttggcggcgccagcagcggagccaacgcacccgagtttgtgtttgaggccaccctgaggatcgggacagctgttcctttgggctgcagaaactccgctgagcagaacttgccgccagaatgctcctcctgttgctgagtatcatcgtcctccacgtcgcggtgctggtgctgctgttcgtctccacgatcgtcagccaatggatcgtgggcaatggacacgcaactgatctctggcagaactgtagcacctcttcctcaggaaatgtccaccactgtttctcatcatcaccaaacgaatggctgcagtctgtccaggccaccatgatcctgtcgatcatcttcagcattctgtctctgttcctgttcttctgccaactcttcaccctcaccaaggggggcaggttttacatcactggaatcttccaaattcttgctgaatcaaactcaagtcaaatgtgtggttaccgggattaagaacagaaagaatagaggggactcctgagtctgtgcgtgatgagtgctgcggccatctacacggtgaggcacccggagtggcatctcaactcggattactcctacggtttcgcctacatcctggcctgggtggccttccccctggcccttctcagcggtgtcatctatgtgatcttgcggaaacgcgaatgaggcgcccagacggtctgtctgaggctctgagcgtacatagggaagggaggaagggaaaacagaaagcagacaaagaaaaaagagctagcccaaaatcccaaactcaaaccaaaccaaaca

SEQ ID NO: 21920 - DNA, 1817 bp, Homo sapiens
  source 1..1817: mol_type = unassigned DNA
tgttcccgttaaaggggaacgccaggagcctcccactgcccccttgcttcgcgcgcgcgcagccccgcagcgcagctttggcggcgccagcagcggagccaacgcacccgagtttgtgtttgaggccaccctgaggatcgggacagctgttcctttgggctgcagaaactccgctgagcagaacttgccgccagaatgctcctcctgttgctgagtatcatcgtcctccacgtcgcggtgctggtgctgctgttcgtctccacgatcgtcagccaatggatcgtgggcaatggacacgcaactgatctctggcagaactgtagcacctcttcctcaggaaatgtccaccactgtttctcatcatcaccaaacgaatggctgcagtctgtccaggccaccatgatcctgtcgatcatcttcagcattctgtctctgttcctgttcttctgccaactcttcaccctcaccaaggggggcaggttttacatcactggaatcttccaaattcttgctggtctgtgcgtgatgagtgctgcggccatctacacggtgaggcacccggagtggcatctcaactcggattactcctacggtttcgcctacatcctggcctgggtggccttccccctggcccttctcagcggtgtcatctatgtgatcttgcggaaacgcgaatgaggcgcccagacggtctgtctgaggctctgagcgtacatagggaagggaggaagggaaaacagaaagcagacaaagaaaaaagagctagcccaaaatcccaaactcaaaccaaaccaaacagaaagcagtggaggtgggggttgctgttgattgaagatgtatataatatctccggtttataaaacctatttataacactttttacatatatgtacatagtattgtttgctttttatgttgaccatcagcctcgtgttgagccttaaagaagtagctaaggaactttacatcctaacagtataatccagctcagtatttttgttttgttttttgtttgtttgttttgttttacccagaaataagataactccatctcgccccttccctttcatctgaaagaagatacctccctcccagtccacctcatttagaaaaccaaagtgtgggtagaaaccccaaatgtccaaaagcccttttctggtgggtgacccagtgcatccaacagaaacagccgctgcccgaacctctgtgtgaagctttacgcgcacacggacaaaatgcccaaactggagcccttgcaaaaacacggcttgtggcattggcatacttgcccttacaggtggagtatcttcgtcacacatctaaatgagaaatcagtgacaacaagtctttgaaatggtgctatggatttaccattccttattatcactaatcatctaaacaactcactggaaatccaattaacaattttacaacataagatagaatggagacctgaataattctgtgtaatataaatggtttataactgcttttgtacctagctaggctgctattattactataatgagtaaatcataaagccttcatcactcccacatttttcttacggtcggagcatcagaacaagcgtctagactccttgggaccgtgagttcctagagcttggctgggtctaggctgttctgtgcctccaaggactgtctggcaatgacttgtattggccaccaactgtagatgtatatatggtgcccttctgatgctaagactccagaccttttgtttttgctttgcattttctgattttataccaactgtgtggactaagatgcattaaaataaacatcagagtaactcac

SEQ ID NO: 21921 - DNA, 1236 bp, Homo sapiens
  source 1..1236: mol_type = unassigned DNA
acccgagtttgtgtttgaggccaccctgaggatcgggacagctgttcctttgggctgcagaaactccgctgagcagaacttgccgccagaatgctcctcctgttgctgagtatcatcgtcctccacgtcgcggtgctggtgctgctgttcgtctccacgatcgtcagccaatggatcgtgggcaatggacacgcaactgatctctggcagaactgtagcacctcttcctcaggaaatgtccaccactgtttctcatcatcaccaaacgaatggctgcagtctgtccaggccaccatgatcctgtcgatcatcttcagcattctgtctctgttcctgttcttctgccaactcttcaccctcaccaaggggggcaggttttacatcactggaatcttccaaattcttgctggtctgtgcgtgatgagtgctgcggccatctacacggtgaggcacccggagtggcatctcaactcggattactccttccccctggcccttctcagcggtgtcatctatgtgatcttgcggaaacgcgaatgaggcgcccagacggtctgtctgaggctctgagcgtacatagggaagggaggaagggaaaacagaaagcagacaaagaaaaaagagctagcccaaaatcccaaactcaaaccaaaccaaacagaaagcagtggaggtgggggttgctgttgattgaagatgtatataatatctccggtttataaaacctatttataacactttttacatatatgtacatagtattgtttgctttttatgttgaccatcagcctcgtgttgagccttaaagaagtagctaaggaactttacatcctaacagtataatccagctcagtatttttgttttgttttttgtttgtttgttttgttttacccagaaataagataactccatctcgccccttccctttcatctgaaagaagatacctccctcccagtccacctcatttagaaaaccaaagtgtgggtagaaaccccaaatgtccaaaagcccttttctggtgggtgacccagtgcatccaacagaaacagccgctgcccgaacctctgtgtgaagctttacgcgcacacggacaaaatgcccaaactggagcccttgcaaaaacacggcttgtggcattggcatacttgcccttacaggtggagtatcttcgtcacacatctaaatgagaaatcagtgacaacaagtctttgaaatggtgctatggatttaccat

SEQ ID NO: 21922 - DNA, 3241 bp, Homo sapiens
  source 1..3241: mol_type = unassigned DNA
agatgcactctcttgtcctcaggtcccatctgaggcagacctgtctcacaggacagcgctggagtccccagcagcagcagcagccccagccctatggttcctggcaaacccagcagacctcagcaacccggctcctgcagaccatccgagctgcctctgtccactcctgggcaggttgtgcttgcattctggaagctgtttgacatacaaaggccagatatcagccttctcgctaactctggagtaggggagggtgtggtgggatgtgtgattgtgtgtgtatgtgtgtgtatgtagtgtgtgtgcgcatagatatacaaagctgtgtgtatgcatctgtttgcgtgcgcaggtttgtggacctgttctggggccttctctctttcagactgctggggatgggcactttctctttccccatctcttccccatccagccccacccatccctggtacctgcaactcatcaatactggaaaccagctcctgccagtccatccatctctcagccttggcagccgctgttgcccctcagccccctccccttcctacctcaggaatcactctggttcctgtaaagcccatgactgagcagcaattggtgtggggttggggggagggagaatccagtaaaccaagacagaatacaaaaggcccacttagcccagcccgtggcatggggcagaccctcccgagtgggatccagagctgggtccagccaccctcagccccctatgatgtacccacctcattggggcttgttgcggggtaggtctaggtttgggggctgtgtctttaaggctgaaacatcagcagacaacctctgctgggccgtcttcaggggagggggaggggggctggtcagcccattagcagcagagctggcgccaggcaccagcccttcacagggccctggggattagggagagtagctcttccccagcccgatctgcctctgcgcccctgtctcctattcctctctgggtgtggtgaaggaggggtagctgacagcaggtgaaaatagagcctggccttcagggggcaagtcaaggcactagctatggggcctaagccaggtcaactctccctccagctggcctcctccctactcctgtgccagaagcctgccctttaacttcaggtccttctacctcgcaattttcagggactctagttcaagtcaggccttcctaccctaggttctagctttgggtgcttgttgggaggaagtgacccccaccccagcggcaacagggggcaatcaagtgggtagaggcctgcaaccagggaagggaggggaaggcgctcctgctgttccgcaggggtggggcatccccctccccatacaacccccctccagcgggccatcaggccagtgggaggagctgcccgtgccccccctgagaccgcagggctataaagccgcctcgcagcggtctgcggctccttcccagcccccggcctagctctgcgaacggtgactgcccatccttggccgcaatgagccaccacccgtcgggcctccgggccggcttcagctccacctcataccgccgtaccttcggtccaccgccctcactatcccccggggccttctcctactcgtccagctcccgcttctccagcagccgcctgctgggctccgcgtccccgagctcctcggtgcgcctgggcagcttccgtagcccccgagcgggagcgggcgccctcctgcgcctgccctcggagcgcctcgacttctccatggccgaggccctcaaccaggagttcctggccacgcgcagcaacgagaagcaggagctgcaggagctcaacgaccgcttcgccaacttcatcgagaaggtacgctttctggagcagcagaacgcggccctgcgcggggagctgagccaagcccggggccaggagccggcgcgcgccgaccagctgtgccagcaggagctgcgcgagctgcggcgagagctggagctgttgggccgcgagcgtgaccgggtgcaggtggagcgcgacgggctggcggaggacctggcggcgctcaagcagaggttggaggaggagacgcgcaagcgggaggacgcggagcacaacctcgtgctcttccgcaaggacgtggacgatgccactctgtcccgcctggaactagagcgcaagattgagtctctgatggatgagattgagttcctcaagaagctgcacgaggaggagctgcgagacctgcaggtgagtgtggagagccagcaggtgcagcaggtggaggtggaagccacggtgaagcccgagctgacggcagcgctgagggacatccgcgcgcagtacgagagcatcgccgcgaagaacctgcaggaggcggaggagtggtacaagtccaagtacgcggacctgtccgacgctgccaaccggaaccacgaggccctgcgccaggccaagcaggagatgaacgagtcccgacgccagatccagagtctaacgtgcgaggtggacgggctgcgcggcacgaacgaggcgctgctcaggcagttgagagagctggaggagcagttcgccctggaggcggggggctaccaggcgggcgctgcgcggctcgaggaggagctgcgacagctaaaagaggagatggcgcggcacctgagggagtaccaggagctcctcaacgtcaagatggccctggacatcgagatcgccacctaccgcaagctgctggagggcgaggagagccggatctccgtgcccgtccattcttttgcctccttaaatataaagacgactgtgcctgaggtggagcctccccaggacagccacagccggaagacggttctgatcaagaccattgagacccggaatggggaggtggtgacagagtcccagaaggagcagcgcagtgagctggacaagtcttctgcccacagttactgaaccccttggtccggagccttgactctgccctaggcctgctcaaagcccaaaccctaagaccactcctgaattgtctcctctccctctgcatgtgtctaaaaggtggtaccaggcatccctttcctggcttatggccaagccctacccggccagcagtcgctgggcctctccctgccctgacacttgatgtgacctatgtgcttcccttttcatgtcccgataagaagccaatgatcccccctcaggacaaatctactccagccacgatgagaagtgggtgagccagggtctgagtttcacatttgaaccaaataaaatgctgtcaagag

SEQ ID NO: 21923 - DNA, 2974 bp, Homo sapiens
  source 1..2974: mol_type = unassigned DNA
caacgcccaggaccaggactatcccctgctcaagctgtgattccgagacccctgccaccactactgcattcacggggatcccaggctagtgggactcgacatgggtagcccccagggcagctccctacagcttgggccatctgcacttttcccaaggccctaagtctccgcctctgggctcgttaaggtttggggtgggagctgtgctgtgggaagcaacccggactacacttggcaagcatggcgctactgaaagtcaagtttgaccagaagaagcgggtcaagttggcccaagggctctggctcatgaactggttctccgtgttggctggcatcatcatcttcagcctaggactgttcctgaagattgaactccgaaagaggagcgatgtgatgaataattctgagagccattttgtgcccaactcattgatagggatgggggtgctatcctgtgtcttcaactcgctggctgggaagatctgctacgacgccctggacccagccaagtatgccagatggaagccctggctgaagccgtacctggctatctgtgttctcttcaacatcatcctcttccttgtggctctctgctgctttctgcttcggggctcgctggagaacaccctgggccaagggctcaagaacggcatgaagtactaccgggacacagacacccctggcaggtgtttcatgaagaagaccatcgacatgctgcagatcgagttcaaatgctgcggcaacaacggttttcgggactggtttgagattcagtggatcagcaatcgctacctggacttttcctccaaagaagtcaaagatcgaatcaagagcaacgtggatgggcggtacctggtggacggcgtccctttcagctgctgcaatcctagctcgccacggccctgcatccagtatcagatcaccaacaactcagcacactacagttacgaccaccagacggaggagctcaacctgtgggtgcgtggctgcagggctgccctgctgagctactacagcagcctcatgaactccatgggtgtcgtcacgctcctcatttggctcttcgaggtgaccattacaattgggctgcgctacctacagacgtcgctggatggtgtgtccaaccccgaggaatctgagagcgagagccagggctggctgctggagaggagcgtgccggagacctggaaggcctttctggagagtgtgaagaagctgggcaagggcaaccaggtggaagccgagggcgcagacgcaggccaggccccagaggctggctgagggccctggggcccctcccctcccgaacactgagaaatagtgcactccaagaaacgtggatctccccctcatccaactccgaaagtctgaatctcccaaggagggcaccatcttacagagactctccctgacggtggaatttaagtttagggtccctaaaagcatttgacacacagttgttgaatgactgacccaaaatgtgaatgaagctaatgtgaatgtgagtgaagctcccttcaggcccgctgccctaggatatgccctcctggtgactcgggggctgtctcagacgactagcccaggacccatctttctcacacggatttagtcccaccctatggccactggccgtatctgagggctgctccccttttagaatttacctcttatgagctccatgttgcttcactctatccaaagtgtcacttggtgcataagcacagaaatctgaaaaatggccatgttgtcttttttttttttttttaatgccaagattgacaggttggccgtttgcttaatgccagaagttgggggaaagttacgcttttctaagaataatggactcttaaggcattgagggctctaaacaggattctttaatcatggagcaagagaatttcaaggcaggggattttatcccccaccaaaaacacagtgaaaggcctgcttttgtgtcccattcacatgccctcggtcactgagtctggagtgaaccacgggttgaggaagtcaggctgttggcgtgtcccagcaccacaccacccctaaagtgccaggtgatctcctgtggctcatcggtggaagcagtggggtaggctgctgccctgctgtggaagaggagcaacaatcagacatgagtccaccctttggagaccaggcctcagctcttggtgggcccagggacacccacacaggtggccatcacagccccatggacaacactaattgtccacagcaaagggcaaggaatcctctgggagcttcttccgtttcttccccccagatacccatcttgaaaaacactatttctggaatgcttctgcatcaaaggagattctttgagatagcccatcttcctgagctagcaaatacaggagttttcactttctttaggaaagagaagctttcaggggaaggagagaatgattttgctgacttcccaagccctggtgaccagaccaaggcagggcccagcataattcctccagttggatgaacattcaagagagctcgttcctacctggctggagaccgaggccagaaggcaaaaaccagaaagggaacagtccataacttacctctgcttctgaccgatggtgtttgggaataggttactttggactgagtttgggttctctgctgtcctaagaacttcagtgtagagaaaataagacttctggtgctgctggggtatgttctgggcttaattcccccaagcagaagaccagatccaagatgtttggacaccctgtcagacgttggtcccaagtttaattagatttctgaatctcgttgaggccaaggaatgatccatactgaaaaaatgctgagccagccatctttggcaaaggtccctgagctcttgctatctctcaagagtgctgagaaccacggtgaaagtgctgctctaggcccacaagtgtaactatgctgttaacagctgtcaatagataattaaaattcatactgtatg

SEQ ID NO: 21924 - DNA, 1643 bp, Homo sapiens
  source 1..1643: mol_type = unassigned DNA
ggaagtacctacctgggataacggcggcgagcggacggctgcatttacggggtctcccggagggccagagtcgtggcttacagaagagacgaaatgtggtctgagggacgatatgaatatgaaagaattccgagagaacgagcacctcctcgaagtcatcccagtgatggctacaatagactagttaatattgtgccaaagaaaccaccactgctagacagacctggtgaaggaagctacaatagatattacagtcatgttgattaccgagactatgacgagggccgcagtttttctcatgatcgaagaagtggtccacctcacagaggagatgaatctggttatagatggacaagagacgatcattctgcaagcaggcaacctgaatacagggacatgagagatggctttagaagaaaaagtttctactcttcccattatgcgagagagcggtctccttataaaagggacaatacttttttcagagaatcacctgttggccgaaaggattctccacacagcagatctggttccagtgtcagtagcagaagctactctccagaaaggagcaaatcatactctttccatcagtctcaacatagaaagtccgtgcgtcctggtgcctcctacaaacggcagaatgaaggaaatcctgaaagagataaagagaggcctgtccagtctttgaaaacatcaagagatacttcaccctcaagtggttcagcagtttcttcatcaaaggtgttagacaaacccagtaggctaactgaaaaggaacttgctgaggctgcaagcaagtgggctgctgaaaagctagagaaatcagatgaaagtaacttgcctgaaatttctgagtatgaggcgggatccacagcaccattgtttactgaccagccagaggaacctgagtcaaacacaacacatgggatagaattatttgaagatagtcagctaaccactcgctctaaagcaatagcatcaaaaaccaaagagattgaacaggtttaccgacaagactgtgaaactttcgggatggtggtgaaaatgctgattgaaaaagatccttcattagaaaagtctatacagtttgcattgaggcagaatttacatgaaataggtgagcggtgtgttgaagaactcaagcatttcattgcagagtatgatacttccactcaagattttggagagcctttttagatttttctgctcaggctaaaaaaaaaaaaaaacagtttctaaaaattttttttcctggattgtgtaaatccttaatatatggaatttttgtgatgcagagaaatactttatgatagttgacaacatttcagtattaaataaacatctaaaatagtctgtttaaaatgtttgattcaaatttttgtattttttgtagagatggggttcaccatgttggccaggctagtctctaactcctggcctcaagtgatctgcctgcctcagcctctcaaagtgttgagattacaggcgtgagccaccgctccctgcccaacacatataccatctgaaaatgttagaattctgagttgtgattttattgacttgttgcttgctttttcttaggctttgtaacttgtaatatgttaaagtgtactatcctaataaactgaatactttggtatctt

SEQ ID NO: 21925 - DNA, 2170 bp, Homo sapiens
  source 1..2170: mol_type = unassigned DNA
tacctgggataacggcggcgagcggacggctgcatttacggggtctcccggagggccagagtcgtggcttacagaagagacgaaatgtggtctgagggacgatatgaatatgaaagaattccgagagaacgagcacctcctcgaagtcatcccagtgatggctacaatagactagttaatattgtgccaaagaaaccaccactgctagacagacctggtgaaggaagctacaatagatattacagtcatgttgattaccgagactatgacgagggccgcagtttttctcatgatcgaagaagtggtccacctcacagaggagatgaatctggttatagatggacaagagacgatcattctgcaagcaggcaacctgaatacagggacatgagagatggctttagaagaaaaagtttctactcttcccattatgcgagagagcggtctccttataaaagggacaatacttttttcagagaatcacctgttggccgaaaggattctccacacagcagatctggttccagtgtcagtagcagaagctactctccagaaaggagcaaatcatactctttccatcagtctcaacatagaaagtccgtgcgtcctggtgcctcctacaaacggcagaatgaaggaaatcctgaaagagataaagagaggcctgtccagtctttgaaaacatcaagagatacttcaccctcaagtggttcagcagtttcttcatcaaaggtgttagacaaacccagtaggctaactgaaaaggaacttgctgaggctgcaagcaagtgggctgctgaaaagctagagaaatcagatgaaagtaacttgcctgaaatttctgagtatgaggcgggatccacagcaccattgtttactgaccagccagaggaacctgagtcaaacacaacacatgggatagaattatttgaagatagtcagctaaccactcgctctaaagcaatagcatcaaaaaccaaagagattgaacaggtttaccgacaagactgtgaaactttcgggatggtggtgaaaatgctgattgaaaaagatccttcattagaaaagtctatacagtttgcattgaggcagaatttacatgaaatagagtctgcaggacagacttggcagcaggtaccccctgtgaggaacactgaaatggatcacgacggaacccccgaaaacgaaggcgaagagactgcgcagtcagccccgcagcccccgcaggccccgcagcccctgcagccccggaagaaacgggttcgtcggacgacacagcttcgtcggacgacaggagccccagacattacctgggggatgctgaagaagacaactcaggaggctgagaggatcctgctccgaacacagacaccattcactccagaaaatttgttccttgctatgctctctgttgtacattgcaactcacgcaaggatgtaaagccagaaaacaagcagtaactgctatgcctgacaaaactgttgctgcacacatctgtactcgtcaatcaacaaaacctgatgcaaaaaacagaaaaggggtgatgtaggagatggtcaggttggtaggagaagctataaggaaagacgcaattggaaggtcgggaggttttccaaagcttcaggagagaataaagctgaaggcagctttattaattaattctcttaccctgaggctgagggcgaacagtaggtagcaagggagtgtaaaggaatttatctagataagtttgtttacttatgccctccggaaatcatgcaagactgctccctgcaaaggggggcgacaatgttcattactcacaaattgtgttggcttcaggcctttggtattctgtctctactgaataaatacaaatggttccagcctatcaggactgcactctcttctcggctgcactaaagctggcactcccccagccgttctcatgcaaaatacctgtgtcagaatactcctttcatccatcactcagccagagtcttcaggacagactccgcatgggacttgtccaaaaaaactctaatcaaaagaggaaaattttggaatatgccaggaatagtggaattttattttttaaatttttttataggcccatatgctctatctcaagaaacaagatgattgtaacatgtccatgattaaactattggcagattattgctgtgttaa

SEQ ID NO: 21926 - DNA, 1693 bp, Homo sapiens
  source 1..1693: mol_type = unassigned DNA
attgcgcgcgccggaagtacctacctgggataacggcggcgagcggacggctgcatttacggggtctcccggagggccagagtcggaaattgttgaaaacgttaaatttgattcctaaaaggactcaatggcttacagaagagacgaaatgtggtctgagggacgatatgaatatgaaagaattccgagagaacgagcacctcctcgaagtcatcccagtgatggctacaatagactagttaatattgtgccaaagaaaccaccactgctagacagacctggtgaaggaagctacaatagatattacagtcatgttgattaccgagactatgacgagggccgcagtttttctcatgatcgaagaagtggtccacctcacagaggagatgaatctggttatagatggacaagagacgatcattctgcaagcaggcaacctgaatacagggacatgagagatggctttagaagaaaaagtttctactcttcccattatgcgagagagcggtctccttataaaagggacaatacttttttcagagaatcacctgttggccgaaaggattctccacacagcagatctggttccagtgtcagtagcagaagctactctccagaaaggagcaaatcatactctttccatcagtctcaacatagaaagtccgtgcgtcctggtgcctcctacaaacggcagaatgaaggaaatcctgaaagagataaagagaggcctgtccagtctttgaaaacatcaagagatacttcaccctcaagtggttcagcagtttcttcatcaaaggtgttagacaaacccagtaggctaactgaaaaggaacttgctgaggctgcaagcaagtgggctgctgaaaagctagagaaatcagatgaaagtaacttgcctgaaatttctgagtatgaggcgggatccacagcaccattgtttactgaccagccagaggaacctgagtcaaacacaacacatgggatagaattatttgaagatagtcagctaaccactcgctctaaagcaatagcatcaaaaaccaaagagattgaacaggtttaccgacaagactgtgaaactttcgggatggtggtgaaaatgctgattgaaaaagatccttcattagaaaagtctatacagtttgcattgaggcagaatttacatgaaataggtgagcggtgtgttgaagaactcaagcatttcattgcagagtatgatacttccactcaagattttggagagcctttttagatttttctgctcaggctaaaaaaaaaaaaaaacagtttctaaaaattttttttcctggattgtgtaaatccttaatatatggaatttttgtgatgcagagaaatactttatgatagttgacaacatttcagtattaaataaacatctaaaatagtctgtttaaaatgtttgattcaaatttttgtattttttgtagagatggggttcaccatgttggccaggctagtctctaactcctggcctcaagtgatctgcctgcctcagcctctcaaagtgttgagattacaggcgtgagccaccgctccctgcccaacacatataccatctgaaaatgttagaattctgagttgtgattttattgacttgttgcttgctttttcttaggctttgtaacttgtaatatgttaaagtgtactatcctaataaactgaatactttggt

SEQ ID NO: 21927 - DNA, 3377 bp, Homo sapiens
  source 1..3377: mol_type = unassigned DNA
cggcggcgagcggacggctgcatttacggggtctcccggagggccagagtcgtggcttacagaagagacgaaatgtggtctgagggacgatatgaatatgaaagaattccgagagaacgagcacctcctcgaagtcatcccagtgatgaatctggttatagatggacaagagacgatcattctgcaagcaggcaacctgaatacagggacatgagagatggctttagaagaaaaagtttctactcttcccattatgcgagagagcggtctccttataaaagggacaatacttttttcagagaatcacctgttggccgaaaggattctccacacagcagatctggttccagtgtcagtagcagaagctactctccagaaaggagcaaatcatactctttccatcagtctcaacatagaaagtccgtgcgtcctggtgcctcctacaaacggcagaatgaaggaaatcctgaaagagataaagagaggcctgtccagtctttgaaaacatcaagagatacttcaccctcaagtggttcagcagtttcttcatcaaaggtgttagacaaacccagtaggctaactgaaaaggaacttgctgaggctgcaagcaagtgggctgctgaaaagctagagaaatcagatgaaagtaacttgcctgaaatttctgagtatgaggcgggatccacagcaccattgtttactgaccagccagaggaacctgagtcaaacacaacacatgggatagaattatttgaagatagtcagctaaccactcgctctaaagcaatagcatcaaaaaccaaagagattgaacaggtttaccgacaagactgtgaaactttcgggatggtggtgaaaatgctgattgaaaaagatccttcattagaaaagtctatacagtttgcattgaggcagaatttacatgaaatagagtctgcaggacagacttggcagcaggtaccccctgtgaggaacactgaaatggatcacgacggaacccccgaaaacgaaggcgaagagactgcgcagtcagccctctttggattccagcacgacgcatcaaaccataccatagtggggctaggacccaaccaagtaccagaaatgaaggaaacgaccctgcaggccccgcagcccccgcaggccccgcagcccctgcagccccggaagaaacgggttcgtcggacgacacagcttcgtcggacgacaggagccccagacattacctgggggatgctgaagaagacaactcaggaggctgagaggatcctgctccgaacacagacaccattcactccagaaaatttgttccttgctatgctctctgttgtacattgcaactcacgcaaggatgtaaagccagaaaacaagcagtaactgctatgcctgacaaaactgttgctgcacacatctgtactcgtcaatcaacaaaacctgatgcaaaaaacagaaaaggggtgatgtaggagatggtcaggttggtaggagaagctataaggaaagacgcaattggaaggtcgggaggttttccaaagcttcaggagagaataaagctgaaggcagctttattaattaattctcttaccctgaggctgagggcgaacagtaggtagcaagggagtgtaaaggaatttatctagataagtttgtttacttatgccctccggaaatcatgcaagactgctccctgcaaaggggggcgacaatgttcattactcacaaattgtgttggcttcaggcctttggtattctgtctctactgaataaatacaaatggttccagcctatcaggactgcactctcttctcggctgcactaaagctggcactcccccagccgttctcatgcaaaatacctgtgtcagaatactcctttcatccatcactcagccagagtcttcaggacagactccgcatgggacttgtccaaaaaaactctaatcaaaagaggaaaattttggaatatgccaggaatagtggaattttattttttaaatttttttataggcccatatgctctatctcaagaaacaagatgattgtaacatgtccatgattaaactattggcagattattgctgtgttaatctctgtagtctaatgagttctttgttctgttctgctgccttttacgttttcttgtcctttcaaaagtgttcttgaaagaaacaaagcgaataggcagttagcacagcacagctaccccttaccaagcagtctatggaaacaacccctcatccaaatcatgggttagttaagaatctaactggggcaattaagatgaattccactcacttcctggtcacttcagcagcccagcggcattgagccaaaatatacaattctgtgttattagtgaggaaactttaaaactcatgtttgttattacttactacccaatttcattatcctcccttcctctttccatttctattctctctcacttgaattctggcattatttttagtggcctctactgataatacctaccctagagtacataaaaattatattaaaagaggaagtagcagtatgcataattttaacagattctataatgggtgcctcaaaatatgtattgtgccattccgcaaatttaaaagctaattgaggacaatttttttttaatttcctaaatgagaccaccttggatttttatttttgccatttagatgtttatacttatttagcttttataaaacataagccaagctaaatcccacataacaactctggtattcttccctcatatgagcagtgattttatttgttacccaccttagatagactaagaaagttctagtcttgtttctccttctccccgcttccctggggtttttccttaccataagtattctggtccgagggttcagttcctttagtcaagatgtcacaagtttaaaaacaaaacttgagaaactaccaaaggctcaggagttgtccactttgttgaaatccattaaattagagaagtctcactaacagatgtatttaaatataggtacaacaaataatttctttttctccccttccccaaattacagtcagcatttaaagctgtttatggcttgccatcagcattattctggtaggcttgttagtgttaaaatctatttgattttttttttttttttttgcctcttaaagtctaattttaggatggatgaattcagatgtttaccagagtgtgtattttacataatgttcttgattaaaaagacttgtttgtaaattatccgttgtttttgcatatgcccagttgatgtgataaaattttcattgtcttgccatataaagccttggttatcaacaggtggaatgtagatattgtaaagctttttgtgaattaaaagtgcaaaataaagcaaccacatttaa

SEQ ID NO: 21928 - DNA, 1581 bp, Homo sapiens
  source 1..1581: mol_type = unassigned DNA
cctgggataacggcggcgagcggacggctgcatttacggggtctcccggagggccagagtcgtggcttacagaagagacgaaatgtggtctgagggacgatatgaatatgaaagaattccgagagaacgagcacctcctcgaagtcatcccagtgatggctacaatagactagttaatattgtgccaaagaaaccaccactgctagacagacctggtgaaggaagctacaatagatattacagtcatgttgattaccgagactatgacgagggccgcagtttttctcatgatcgaagaagtggtccacctcacagaggagatgaatctggttatagatggacaagagacgatcattctgcaagcaggcaacctgaatacagggacatgagagatggctttagaagaaaaagtttctactcttcccattatgcgagagagcggtctccttataaaagggacaatacttttttcagagaatcacctgttggccgaaaggattctccacacagcagatctggttccagtgtcagtagcagaagctactctccagaaaggagcaaatcatactctttccatcagtctcaacatagaaataaagagaggcctgtccagtctttgaaaacatcaagagatacttcaccctcaagtggttcagcagtttcttcatcaaaggtgttagacaaacccagtaggctaactgaaaaggaacttgctgaggctgcaagcaagtgggctgctgaaaagctagagaaatcagatgaaagtaacttgcctgaaatttctgagtatgaggcgggatccacagcaccattgtttactgaccagccagaggaacctgagtcaaacacaacacatgggatagaattatttgaagatagtcagctaaccactcgctctaaagcaatagcatcaaaaaccaaagagattgaacaggtttaccgacaagactgtgaaactttcgggatggtggtgaaaatgctgattgaaaaagatccttcattagaaaagtctatacagtttgcattgaggcagaatttacatgaaataggtgagcggtgtgttgaagaactcaagcatttcattgcagagtatgatacttccactcaagattttggagagcctttttagatttttctgctcaggctaaaaaaaaaaaaaaacagtttctaaaaattttttttcctggattgtgtaaatccttaatatatggaatttttgtgatgcagagaaatactttatgatagttgacaacatttcagtattaaataaacatctaaaatagtctgtttaaaatgtttgattcaaatttttgtattttttgtagagatggggttcaccatgttggccaggctagtctctaactcctggcctcaagtgatctgcctgcctcagcctctcaaagtgttgagattacaggcgtgagccaccgctccctgcccaacacatataccatctgaaaatgttagaattctgagttgtgattttattgacttgttgcttgctttttcttaggctttgtaacttgtaatatgttaaagtgtactatcctaataaactgaatactttggtatcttagagaa

SEQ ID NO: 21929 - DNA, 588 bp, Homo sapiens
  source 1..588: mol_type = unassigned DNA
aacttttctggagtaccatcgaaactgcactgatatgaggagatgtagtgatgatgtggcaggaaattgttgaaaacgttaaatttgattcctaaaaggactcaatggcttacagaagagacgaaatgtggtctgagggacgatatgaatatgaaagaattccgagagaacgagcacctcctcgaagtcatcccagtgatggctacaatagactagttaatattgtgccaaagaaaccaccactgctagacagacctggtgaaggaagctacaatagatattacagtcatgttgattaccgagactatgacgagggccgcagtttttctcatgatcgaagaagtggtccacctcacagaggagatgaatctggttatagatggacaagagacgatcattctgcaagcaggcaacctgaatacagggacatgagagatggctttagaagaaaaagtttctactcttcccattatgcgagagagcggtctccttataaaagggacaatacttttttcagagaatcacctgttggccgaaaggattctccacacagcagatctggttccagtgtcagtagcagaagctact

SEQ ID NO: 21930 - DNA, 576 bp, Homo sapiens
  source 1..576: mol_type = unassigned DNA
agtaccatcgaaactgcactgatatgaggagatgtagtgatgatgtggcagtggcttacagaagagacgaaatgtggtctgagggacgatatgaatatgaaagaattccgagagaacgagcacctcctcgaagtcatcccagtgatggctacaatagactagttaatattgtgccaaagaaaccaccactgctagacagacctggtgaaggaagctacaatagatattacagtcatgttgattaccgagactatgacgagggccgcagtttttctcatgatcgaagaagtggtccacctcacagaggagatgaatctggttatagatggacaagagacgatcattctgcaagcaggcaacctgaatacagggacatgagagatggctttagaagaaaaagtttctactcttcccattatgcgagagagcggtctccttataaaagggacaatacttttttcagagaatcacctgttggccgaaaggattctccacacagcagatctggttccagtgtcagtagcagaagctactctccagaaaggagcaaatcatactctttccatcagtctcaac

SEQ ID NO: 21931 - DNA, 1095 bp, Homo sapiens
  source 1..1095: mol_type = unassigned DNA
gggataacggcggcgagcggacggctgcatttacggggtctcccggagggccagagtcggaaattgttgaaaacgttaaatttgattcctaaaaggactcaatggcttacagaagagacgaaatgtggtctgagggacgatatgaatatgaaagaattccgagagaacgagcacctcctcgaagtcatcccagtgatgaatctggttatagatggacaagagacgatcattctgcaagcaggcaacctgaatacagggacatgagagatggctttagaagaaaaagtttctactcttcccattatgcgagagagcggtctccttataaaagggacaatacttttttcagagaatcacctgttggccgaaaggattctccacacagcagatctggttccagtgtcagtagcagaagctactctccagaaaggagcaaatcatactctttccatcagtctcaacatagaaagtccgtgcgtcctggtgcctcctacaaacggcagaatgaaggaaatcctgaaagagataaagagaggcctgtccagtctttgaaaacatcaagagatacttcaccctcaagtggttcagcagtttcttcatcaaaggtgttagacaaacccagtaggctaactgaaaaggaacttgctgaggctgcaagcaagtgggctgctgaaaagctagagaaatcagatgaaagtaacttgcctgaaatttctgagtatgaggcgggatccacagcaccattgtttactgaccagccagaggaacctgagtcaaacacaacacatgggatagaattatttgaagatagtcagctaaccactcgctctaaagcaatagcatcaaaaaccaaagagattgaacaggtttaccgacaagactgtgaaactttcgggatggtggtgaaaatgctgattgaaaaagatccttcattagaaaagtctatacagtttgcattgaggcagaatttacatgaaataggtgagcggtgtgttgaagaactcaagcatttcattgcagagtatgatacttccactcaagattttggagagcctttttagatttttctgctcaggctaaaaaaaaaaaaaaaca

SEQ ID NO: 21932 - DNA, 6238 bp, Homo sapiens
  source 1..6238: mol_type = unassigned DNA
cgcgccgccgctcgctcacctgcgctcccgcccgcccctcggtgcgcgcccggcccgccagccgccgccgcccgcaccccgagcgccaccatgaactcgctcttcaggaagagaaacaaaggcaaatacagccccactgtgcagacccggagcatctctaacaaggagctctcggagctgatcgagcagctgcagaagaatgccgaccaggtggagaagaacatcgtggacacagaggccaagatgcagagtgacctggctcggctgcaggagggtcggcagcctgagcaccgggacgtgaccctgcagaaggtgttggactctgagaagctgctctatgtgctagaggcggatgcggccattgccaagcacatgaagcacccacagggggacatgatcgccgaggatatccgccagctgaaggagcgtgtgaccaacctgcgcgggaaacacaagcagatctacaggctggcggtgaaggaagtggatccacaggtcaactgggcggcactggtggaggagaagctggacaagctgaacaaccagagctttgggactgacctgccgctggtggaccaccaagtggaggagcataacatcttccacaatgaggtcaaggccatcgggccccacctggccaaggacggggacaaggagcagaacagcgaactccgggccaagtaccagaaactgctggcagcatcacaggcccggcagcagcacctgagttcgctgcaggactacatgcagcgctgcaccaatgagctgtactggctggaccagcaggccaagggccgcatgcagtacgactggagtgaccgcaacctcgactaccccagccgccggcgccagtatgagaatttcatcaaccggaacctggaggccaaagaggagagaatcaacaaactgcacagcgagggcgaccagctgctggcggccgagcaccccgggaggaactccattgaggcgcacatggaggctgtgcacgcagactggaaggagtacctgaacctgctcatctgcgaggagagccacctcaagtacatggaggactaccaccagtttcacgaagacgtgaaggacgctcaggagctgctgcgcaaggtggactcggacctgaaccagaagtatggccctgacttcaaggaccggtaccagattgagctgctgctgcgggagctggatgaccaggagaaggtgctggacaagtatgaggacgtggtgcaggggctgcagaagcgaggccagcaggtggtgcccctcaagtaccgccgggagactccgctcaagcccatccccgtggaggcactctgtgactttgagggggagcagggcctgatctcgcggggctacagctacaccctgcagaagaacaacggggagagctgggagctcatggacagcgctgggaacaagctgattgctccggccgtgtgttttgtgatcccccccacagaccctgaggccctggctctggctgacagcctgggcagccagtaccggagcgtgcggcagaaggcagctgggagcaaacgcacgctgcagcagcggtatgaggtgctgaagaccgagaatcccggagatgcctctgacctacaggggcggcagctgctggctggcttggacaaggtggccagcgacctggaccggcaggagaaggccatcacagggatcctgcggccaccactggagcaaggccgggctgtgcaggacagtgccgagcgggccaaggacctcaagaacatcaccaacgagctactgcggattgaacctgagaagacgcggagcacggctgagggcgaagccttcatccaggccctcccaggcagtggcaccacacccctgctgaggacccgggtggaggacaccaaccggaaatacgagcacctcctgcagctgctggacttggcccaggagaaggttgatgtggccaaccgcctggagaagagcctgcagcagagctgggagttgctggccacacacgagaaccatctgaatcaggatgacacagtgcctgagagcagccgtgtcctggacagcaaggggcaggagctggcggccatggcctgtgagttacaggcccagaagtccctcctgggtgaggtggagcagaacttgcaggcggccaagcagtgctcgagcacactggccagccgcttccaggagcactgtccggacctggagcgccaggaggccgaggtgcacaagctgggccagcgtttcaacaacctgcgccagcaggtggaacgcagggcgcagagcctacagagcgccaaggcagcctacgagcacttccaccgcggccatgaccacgtgctgcagttcctagtcagcatccccagttacgagccccaggagacagacagcctcagccagatggagaccaagctgaagaaccagaagaacctgctagatgagatagcaagtagggagcaggaagtacagaagatctgtgccaattcccagcagtaccagcaagctgtaaaggactatgagttagaagcagaaaaactaaggtctcttctcgacttggagaatggaaggagaagccacgtgagcaagagagccaggctccaatctcctgccaccaaagtgaaggaagaggaagcagcacttgccgccaagttcactgaagtttatgccatcaacagacagaggctgcagaatctggagtttgctctgaatctcctcagacagcagccggaagtagaagtgacccatgagaccctgcaaaggaataggccggactctggagtggaggaggcgtggaagatcaggaaggaactggatgaggagactgagcggaggcggcagctggagaacgaggtcaagagcacccaggaagaaatctggaccttgaggaatcaggggcctcaggaatcggtggtgaggaaggaggtgctcaagaaggtgccggatcccgtgctggaggagagcttccagcagctgcagcggacgctggcagaggagcagcacaagaaccagctgctgcaggaggagctggaggcactgcagctgcagctgcgtgccctggagcaggagaccagagacggggggcaggagtacgtggtcaaggaggtcctgcgcatcgagcctgacagggcccaggcggatgaggtcttgcagctgcgggaggagctggaggcactgaggcggcagaagggcgcccgggaggcagaggtgctcctcctgcagcagcgtgtggccgccctggctgaagagaagagccgggcgcaggagaaggtcacagagaaagaggtggtgaaactgcagaatgacccccagctggaggcagagtaccagcagctgcaggaggaccaccagcgccaggaccagctcagggagaagcaggaggaggagctgagcttcctccaggacaagctcaagaggctagagaaggagcgggccatggccgagggcaagatcaccgtcaaggaggtgctcaaggtggagaaggacgcggccaccgagagggaggtcagcgatctcacccgccaatatgaggacgaggctgccaaggctcgcgctagccagagggagaagacggagctgctccgaaagatatgggccttggaggaggagaacgccaaagtggtggtgcaggagaaggtgcgggagatcgtgcggccagaccccaaggcggaaagtgaagtggcgaacctccgcctggagcttgtggagcaggagcgaaagtaccggggtgccgaggagcagctccggagctaccagagtgagctggaggccctcaggaggcgaggcccccaggtggaagtcaaagaggtgactaaggaagtcattaagtacaagactgaccctgagatggagaaggagcttcagcggctcagggaggagatcgtggacaagaccagactgatcgaaaggtgtgatttagagatctaccagctgaaaaaggaaatccaggccctgaaagacaccaaaccccaggtccagaccaaagaggtggtccaggagatcctccaattccaagaagaccctcaaaccaaggaggaggtggcgtctctgagggcaaagctctcagaggagcagaagaaacaagtggatctggagagggaaagagcttcccaggaagagcagatcgcccggaaagaggaggagctctcgcgggtgaaggaaagggtggtgcagcaggaggtggtcaggtatgaggaggagccaggcctgcgggccgaggcgagcgcctttgccgagagcatcgatgtggagctgcggcagattgacaagctgcgggcagagctgcggcggctgcagcgccggcgcaccgagcttgagcggcagctggaggagctagagcgcgagcggcaggcccgcagggaggccgagcgcgaggtacagcggttgcagcagcggctggcagcgctggagcaggaagaagctgaggcccgtgagaaggtaacccatacgcagaaggtggtgctgcagcaggacccgcagcaggcgcgagagcatgccctgctccgactccagctggaagaagagcagcaccggcggcagctcctggagggggagctcgagaccctccggaggaaactggctgcactggagaaggcggaggtcaaggagaaggtggtgctctccgagagtgtccaggtggagaagggcgacaccgagcaagagatccagaggctcaagagcagcctggaggaggagagccgcagcaagcgcgagctggacgtcgaggtgagccggctggaagccaggctttcggagctggaattccataactccaagtcatccaaggaactagactttctgagggaagagaaccacaaattacagctggagaggcaaaacctgcagctggagacccgaaggctccaatcggaaatcaacatggcagcgacggaaacacgagacctgcggaacatgaccgtggcggactctgggaccaaccatgactccagactgtggtccctggagagggaactggatgacctcaagaggctctccaaggacaaagacctcgagatcgacgagctgcagaagcgcctgggctccgtggccgtcaagcgggagcagcgggagaaccacctgcggcgctccatcgtagtcatccaccctgacacaggccgcgagctgtccccggaggaagcccaccgtgccgggctcattgactggaacatgttcgtgaaactcagaagccaggagtgcgactgggaggagatctcagtgaagggtcccaatggggagtcctcagtgatacacgacaggaagtctggcaagaagttctccatcgaagaggccctgcagagtggcaggctgacccctgctcagtatgaccgctatgtcaacaaggatatgtccatccaggagctggcggtcttggtatctgggcagaagtaggcacagctcttgcaactcttcgtaacggcagacgctggccctctcctacgacgcagtgacctccttggtgtcgtcctctcccttgccctggtgcaggccaagcattttatacataccctcgctgccaggctgctcagagtcccgcccacatatgagacaggcactggctgaagacaggcaactctcgtcccaaccatcattcaccctgagtgacgtacttcatcctccaatgactggacaactgcgatgccttttcctcccttttcctgtacactcccagcaacaaactcctcatgataactgcacacaatctgaaaaccactgaaggacaagccaaccacagcagccaagcccactccttgcagcatgggtactggtggcacaccagacagtgacactgccccacaaaggcctgggcccgtgggggctgctgcctggcatgacatctctccagatttctggcttaaaaccaactttccatccgagaagcctcctcagtagttactctgctcatgagacagatctgggctccaagccaggaaaggtgaacagaaaccacaagtgtccagccctcggtgctggagtggacgttaattgtcagccaccagactgtcccggcacctacagagaatgtttcacagttctggcatttaaatcctttgatagtggattgtgctgctgttagccttagtttcagtgctttacaagtctcgcttattatctcactggtatttaggtatacaaaacagttgattattcaccacgccaatatctgggtctctgtatctcatgtagaacataagaaaatgggaactaatagggaaatttatttatagcatgaaaataaacctggtggctggagtctgcttgtacggtc

SEQ ID NO: 21933 - DNA, 6808 bp, Homo sapiens
  source 1..6808: mol_type = unassigned DNA
agccggccgtggtggctccgtgcgtccgagcgtccgtccgcgccgtcggccatggccaagcgctccaggggccccgggcgccgctgcctgttggcgctcgtgctgttctgcgcctgggggacgctggccgtggtggcccagaagccgggcgcagggtgtccgagccgctgcctgtgcttccgcaccaccgtgcgctgcatgcatctgctgctggaggccgtgcccgccgtggcgccgcagacctccatcctagatcttcgctttaacagaatcagagagatccaacctggggcattcaggcggctgaggaacttgaacacattgcttctcaataataatcagatcaagaggatacctagtggagcatttgaagacttggaaaatttaaaatatctctatctgtacaagaatgagatccagtcaattgacaggcaagcatttaagggacttgcctctctagagcaactatacctgcactttaatcagatagaaactttggacccagattcgttccagcatctcccgaagctcgagaggctatttttgcataacaaccggattacacatttagttccagggacatttaatcacttggaatctatgaagagattgcgactggactcaaacacacttcactgcgactgtgaaatcctgtggttggcggatttgctgaaaacctacgcggagtcggggaacgcgcaggcagcggccatctgtgaatatcccagacgcatccagggacgctcagtggcaaccatcaccccggaagagctgaactgtgaaaggccccggatcacctccgagccccaggacgcagatgtgacctcggggaacaccgtgtacttcacctgcagagccgaaggcaaccccaagcctgagatcatctggctgcgaaacaataatgagctgagcatgaagacagattcccgcctaaacttgctggacgatgggaccctgatgatccagaacacacaggagacagaccagggtatctaccagtgcatggcaaagaacgtggccggagaggtgaagacgcaagaggtgaccctcaggtacttcgggtctccagctcgacccacttttgtaatccagccacagaatacagaggtgctggttggggagagcgtcacgctggagtgcagcgccacaggccaccccccgccgcggatctcctggacgagaggtgaccgcacacccttgccagttgacccgcgggtgaacatcacgccttctggcgggctttacatacagaacgtcgtacagggggacagcggagagtatgcgtgctctgcgaccaacaacattgacagcgtccatgccaccgctttcatcatcgtccaggctcttcctcagttcactgtgacgcctcaggacagagtcgttattgagggccagaccgtggatttccagtgtgaagccaagggcaacccgccgcccgtcatcgcctggaccaagggagggagccagctctccgtggaccggcggcacctggtcctgtcatcgggaacacttagaatctctggtgttgccctccacgaccagggccagtacgaatgccaggctgtcaacatcatcggctcccagaaggtcgtggcccacctgactgtgcagcccagagtcaccccagtgtttgccagcattcccagcgacacaacagtggaggtgggcgccaatgtgcagctcccgtgcagctcccagggcgagcccgagccagccatcacctggaacaaggatggggttcaggtgacagaaagtggaaaatttcacatcagccctgaaggattcttgaccatcaatgacgttggccctgcagacgcaggtcgctatgagtgtgtggcccggaacaccattgggtcggcctcggtgagcatggtgctcagtgtgaatgttcctgacgtcagtcgaaatggagatccgtttgtagctacctccatcgtggaagcgattgcgactgttgacagagctataaactcaacccgaacacatttgtttgacagccgtcctcgttctccaaatgatttgctggccttgttccggtatccgagggatccttacacagttgaacaggcacgggcgggagaaatctttgaacggacattgcagctcattcaggagcatgtacagcatggcttgatggtcgacctcaacggaacaagttaccactacaacgacctggtgtctccacagtacctgaacctcatcgcaaacctgtcgggctgtaccgcccaccggcgcgtgaacaactgctcggacatgtgcttccaccagaagtaccggacgcacgacggcacctgtaacaacctgcagcaccccatgtggggcgcctcgctgaccgccttcgagcgcctgctgaaatccgtgtacgagaatggcttcaacacccctcggggcatcaacccccaccgactgtacaacgggcacgcccttcccatgccgcgcctggtgtccaccaccctgatcgggacggagaccgtcacacccgacgagcagttcacccacatgctgatgcagtggggccagttcctggaccacgacctcgactccacggtggtggccctgagccaggcacgcttctccgacggacagcactgcagcaacgtgtgcagcaacgaccccccctgcttctctgtcatgatcccccccaatgactcccgggccaggagcggggcccgctgcatgttcttcgtgcgctccagccctgtgtgcggcagcggcatgacttcgctgctcatgaactccgtgtacccgcgggagcagatcaaccagctcacctcctacatagacgcatccaacgtgtacgggagcacggagcatgaggcccgcagcatccgcgacctggccagccaccgcggcctgctgcggcagggcatcgtgcagcggtccgggaagccgctgctccccttcgccaccgggccgcccacggagtgcatgcgggacgagaacgagagccccatcccctgcttcctggccggggaccaccgcgccaacgagcagctgggcctgaccagcatgcacacgctgtggttccgcgagcacaaccgcattgccacggagctgctcaagctgaacccgcactgggacggcgacaccatctactatgagaccaggaagatcgtgggtgcggagatccagcacatcacctaccagcactggctcccgaagatcctgggggaggtgggcatgaggacgctgggagagtaccacggctacgaccccggcatcaatgctggcatcttcaacgccttcgccaccgcggccttcaggtttggccacacgcttgtcaacccactgctttaccggctggacgagaacttccagcccattgcacaagatcacctcccccttcacaaagctttcttctctcccttccggattgtgaatgagggcggcatcgatccgcttctcagggggctgttcggggtggcggggaaaatgcgtgtgccctcgcagctgctgaacacggagctcacggagcggctgttctccatggcacacacggtggctctggacctggcggccatcaacatccagcggggccgggaccacgggatcccaccctaccacgactacagggtctactgcaatctatcggcggcacacacgttcgaggacctgaaaaatgagattaaaaaccctgagatccgggagaaactgaaaaggttgtatggctcgacactcaacatcgacctgtttccggcgctcgtggtggaggacctggtgcctggcagccggctgggccccaccctgatgtgtcttctcagcacacagttcaagcgcctgcgagatggggacaggttgtggtatgagaaccctggggtgttctccccggcccagctgactcagatcaagcagacgtcgctggccaggatcctatgcgacaacgcggacaacatcacccgggtgcagagcgacgtgttcagggtggcggagttccctcacggctacggcagctgtgacgagatccccagggtagacctccgggtgtggcaggactgctgtgaagactgtaggaccagggggcagttcaatgccttttcctatcatttccgaggcagacggtctcttgagttcagctaccaggaggacaagccgaccaagaaaacaagaccacggaaaatacccagtgttgggagacagggggaacatctcagcaacagcacctcagccttcagcacacgctcagatgcatctgggacaaatgacttcagagagtttgttctggaaatgcagaagaccatcacagacctcagaacacagataaagaaacttgaatcacggctcagtaccacagagtgcgtggatgccgggggcgaatctcacgccaacaacaccaagtggaaaaaagatgcatgcaccatttgtgaatgcaaagacgggcaggtcacctgcttcgtggaagcttgcccccctgccacctgtgctgtccccgtgaacatcccaggggcctgctgtccagtctgcttacagaagagggcggaggaaaagccctaggctcctgggaggctcctcagagtttgtctgctgtgccatcgtgagatcgggtggccgatggcagggagctgcggactgcagaccaggaaacacccagaactcgtgacatttcatgacaacgtccagctggtgctgttacagaaggcagtgcaggaggcttccaaccagagcatctgcggagaaggaggcacagcaggtgcctgaagggaagcaggcaggagtcctagcttcacgttagacttctcaggtttttatttaattcttttaaaatgaaaaattggtgctactattaaattgcacagttgaatcatttaggcgcctaaattgattttgcctcccaacaccatttctttttaaataaagcaggatacctctatatgtcagccttgccttgttcagatgccaggagccggcagacctgtcacccgcaggtggggtgagtcttggagctgccagaggggctcaccgaaatcggggttccatcacaagctatgtttaaaaagaaaattggtgtttggcaaacggaacagaacctttgatgagagcgttcacagggacactgtctgggggtgcagtgcaagcccccggcctcttccctgggaacctctgaactcctccttcctctgggctctctgtaacatttcaccacacgtcagcatctaatcccaagacaaacattcccgctgctcgaagcagctgtatagcctgtgactctccgtgtgtcagctccttccacacctgattagaacattcataagccacatttagaaacaggtttgctttcagctgtcacttgcacacatactgcctagttgtgaaccaaatgtgaaaaaacctccttcatcccattgtgtatctgatacctgccgagggccaagggtgtgtgttgacaacgccgctcccagccggccctggttgcgtccacgtcctgaacaagagccgcttccggatggctcttcccaagggaggaggagctcaagtgtcgggaactgtctaacttcaggttgtgtgagtgcgttaaaaaaaaaaaaaaaaaagaatccctatacctcatttgtatttttaaaatgcgtgatgttttatgaaattgtgtccattttttaggtattagatatggcagaaaaaccatttccactatgcaaagttcttttagacgtcagtgaaaatcaactctcatacctcatggtctctctttaattgaccaaaaccttccatttttctctaaatacaaagcgatctgtgttctgagcaacctttccccgaacacacagcttcagtgcagcacgctgacctgagtatccaccatgtgccaggcacagtgctgggcacacgaggcaccaaggtccgggccacctgcccgcagcaaggcccagctgaggtggtggagggagcccctgaggtcaggggccgtttcggttcagggtggcaggtgtccagcactggggtatggcgtcgaggcttccatggggtgggggaggccagcttccttctgacaggatgggcgcatacagtgcctggtgtgatttgtgcacaacccgtgttccaggtgcacatcctcccaaggagacacccagacccttccagcacgggccggccaagttgctgcggcggaggcagcatttcagctgtgaggaaggtcattggattcatgtgttttatctgtaaaaatggttgtcttaacttcttaacctcatattggtaagtgattgataaaaattggttggtgtttcatgacatgtggacttcttttgaaatagcaagtcaaatgtagtgaccaaattgtggaagagatttctgtcaaataggaaatgtgtaagttcgtctaaaagctgatggttatgtaagttgctcaggcactcagatgacagcagattctgggttctgggagtgttctgtgcctcttacatgccctggaggcctcatggtctcagtgctgaggcggcacacctgtagcacacctgcgtaatgtgcggtctgggccagtcacaaggaattgtgttgtctaagccaaagggggaagctgactgtgatttaccaaaaaaaattctgtaattcaaaccaaaatgtctgcggaatcaccagtttgatactctctgtaatcagaacagtgggcagtgcctgggtgaacgtgtctagcagccactgtgcgggatcgctgtaacaggagtggaatgtacatatttatttacttttctaactgctccaacagccaaatgccttttttatgaccattgtattcagttcattaccaaagaaatgtttgcactttgtaatgatgcctttcagttcaaataaatgggtcacattttcaaatgga

SEQ ID NO: 21934 - DNA, 2643 bp, Homo sapiens
  source 1..2643: mol_type = unassigned DNA
ccaggggccccgggcgccgctgcctgttggcgctcgtgctgttctgcgcctgggggacgctggccgtggtggcccagaagccgggcgcagggtgtccgagccgctgcctgtgcttccgcaccaccgtgcgctgcatgcatctgctgctggaggccgtgcccgccgtggcgccgcagacctccatcctagatcttcgctttaacagaatcagagagatccaacctggggcattcaggcggctgaggaacttgaacacattgcttctcaataataatcagatcaagaggatacctagtggagcatttgaagacttggaaaatttaaaatatctctatctgtacaagaatgagatccagtcaattgacaggcaagcatttaagggacttgcctctctagagcaactatacctgcactttaatcagatagaaactttggacccagattcgttccagcatctcccgaagctcgagaggctatttttgcataacaaccggattacacatttagttccagggacatttaatcacttggaatctatgaagagattgcgactggactcaaacacacttcactgcgactgtgaaatcctgtggttggcggatttgctgaaaacctacgcggagtcggggaacgcgcaggcagcggccatctgtgaatatcccagacgcatccagggacgctcagtggcaaccatcaccccggaagagctgaactgtgaaaggccccggatcacctccgagccccaggacgcagatgtgacctcggggaacaccgtgtacttcacctgcagagccgaaggcaaccccaagcctgagatcatctggctgcgaaacaataatgagctgagcatgaagacagattcccgcctaaacttgctggacgatgggaccctgatgatccagaacacacaggagacagaccagggtatctaccagtgcatggcaaagaacgtggccggagaggtgaagacgcaagaggtgaccctcaggtacttcgggtctccagctcgacccacttttgtaatccagccacagaatacagaggtgctggttggggagagcgtcacgctggagtgcagcgccacaggccaccccccgccgcggatctcctggacgagaggtgaccgcacacccttgccagttgacccgcgggtgaacatcacgccttctggcgggctttacatacagaacgtcgtacagggggacagcggagagtatgcgtgctctgcgaccaacaacattgacagcgtccatgccaccgctttcatcatcgtccaggctcttcctcagttcactgtgacgcctcaggacagagtcgttattgagggccagaccgtggatttccagtgtgaagccaagggcaacccgccgcccgtcatcgcctggaccaagggagggagccagctctccgtggaccggcggcacctggtcctgtcatcgggaacacttagaatctctggtgttgccctccacgaccagggccagtacgaatgccaggctgtcaacatcatcggctcccagaaggtcgtggcccacctgactgtgcagcccagagtcaccccagtgtttgccagcattcccagcgacacaacagtggaggtgggcgccaatgtgcagctcccgtgcagctcccagggcgagcccgagccagccatcacctggaacaaggatggggttcaggtgacagaaagtggaaaatttcacatcagccctgaaggattcttgaccatcaatgacgttggccctgcagacgcaggtcgctatgagtgtgtggcccggaacaccattgggtcggcctcggtgagcatggtgctcagtgtgaatgttcctgacgtcagtcgaaatggagatccgtttgtagctacctccatcgtggaagcgattgcgactgttgacagagctataaactcaacccgaacacatttgtttgacagccgtcctcgttctccaaatgatttgctggccttgttccggtatccgagggatccttacacagttgaacaggcacgggcgggagaaatctttgaacggacattgcagctcattcaggagcatgtacagcatggcttgatggtcgacctcaacggaacaagtcagtgccaaagccttttcttcctcctccatggcctgagtaacggggttgaacacgcctcagttaagtcacattcctagggaagagttccagcattttctttcccactgtgcttatgaactgtgaaattatttccttaaactgtgattcctcttgagccctacagccctgtcgctctcactttggtttaataggaatctctgggggacgtgaagtcccttggagtgctgatcaggctacagcaggtccacctgccctgagtgggttatgccatcctggccagggtgggttatgcaagcccagtccctctgcaacaaatgagccataagggaggacttggcagcgtgcttgctccctgagtgacgttgtgtcctgggaatgcggtgccacgcgtattaggagggttgttttggaagagtcccgggtctgtgaaaccagctgatgagatcacctcgggctggtgtggagatgctgttgggggaggtatgtcccccactcactctgctctggcactttgccgttgcccagtaaataacagatgcctttacatgt

SEQ ID NO: 21935 - DNA, 1584 bp, Homo sapiens
  source 1..1584: mol_type = unassigned DNA
ccctgcgtctctgcccgccccgtggcgcccgagtgcactgaagatggcggctgctgtaggacggttgctccgagcgtcggttgcccgacatgtgagtgccattccttggggcatttctgccactgcagccctcaggcctgctgcatgtggaagaacgagcttgacaaatttattgtgttctggttccagtcaagcaaaattattcagcaccagttcctcatgccatgcacctgctgtcacccagcatgcaccctattttaagggtacagccgttgtcaatggagagttcaaagacctaagccttgatgactttaaggggaaatatttggtgcttttcttctatcctttggatttcacctttgtgtgtcctacagaaattgttgcttttagtgacaaagctaacgaatttcacgacgtgaactgtgaagttgtcgcagtctcagtggattcccactttagccatcttgcctggataaatacaccaagaaagaatggtggtttgggccacatgaacatcgcactcttgtcagacttaactaagcagatttcccgagactacggtgtgctgttagaaggttctggtcttgcactaagaggtctcttcataattgaccccaatggagtcatcaagcatttgagcgtcaacgatctcccagtgggccgaagcgtggaagaaaccctccgcttggtgaaggcgttccagtatgtagaaacacatggagaagtctgcccagcgaactggacaccggattctcctacgatcaagccaagtccagctgcttccaaagagtactttcagaaggtaaatcagtagatcacccatgtgtatctgcaccttctcaactgagagaagaaccacagttgaaacctgcttttatcattttcaagatggttatttgtagaaggcaaggaaccaattatgcttgtattcataagtattactctaaatgttttgtttttgtaattctggctaagaccttttaaacatggttagttgctagtacaaggaatcctttattggtaacatcttggtggctggctagctagtttctacagaacataatttgcctctatagaaggctattcttagatcatgtctcaatggaaacactcttctttcttagccttacttgaatcttgcctataataaagtagagcaacacacattgaaagcttctgatcaacggtcctgaaattttcatcttgaatgtctttgtattaaactgaattttcttttaagctaacaaagatcataattttcaatgattagccgtgtaactcctgcaatgaatgtttatgtgattgaagcaaatgtgaatcgtattattttaaaaagtggcagagtgacttaactgatcatgcatgatccctcatccctgaaattgagtttatgtagtcattttacttattttattcattagctaactttgtctatgtatatttctagatattgattagtgtaatcgattataaaggatatttatcaaatccagggattgcattttgaaattataattattttctttgctgaagtattcattgtaaaacatacaaaataaacatattttaaaacatttgcatttt

SEQ ID NO: 21936 - DNA, 1537 bp, Homo sapiens
  source 1..1537: mol_type = unassigned DNA
ccctgcgtctctgcccgccccgtggcgcccgagtgcactgaagatggcggctgctgtaggacggttgctccgagcgtcggttgcccgacatgtgagtgccattccttggggcatttctgccactgcagccctcaggcctgctgcatgtggaagaacgagcttgacaaatttattgtgttctggttccagtcaagcaccctattttaagggtacagccgttgtcaatggagagttcaaagacctaagccttgatgactttaaggggaaatatttggtgcttttcttctatcctttggatttcacctttgtgtgtcctacagaaattgttgcttttagtgacaaagctaacgaatttcacgacgtgaactgtgaagttgtcgcagtctcagtggattcccactttagccatcttgcctggataaatacaccaagaaagaatggtggtttgggccacatgaacatcgcactcttgtcagacttaactaagcagatttcccgagactacggtgtgctgttagaaggttctggtcttgcactaagaggtctcttcataattgaccccaatggagtcatcaagcatttgagcgtcaacgatctcccagtgggccgaagcgtggaagaaaccctccgcttggtgaaggcgttccagtatgtagaaacacatggagaagtctgcccagcgaactggacaccggattctcctacgatcaagccaagtccagctgcttccaaagagtactttcagaaggtaaatcagtagatcacccatgtgtatctgcaccttctcaactgagagaagaaccacagttgaaacctgcttttatcattttcaagatggttatttgtagaaggcaaggaaccaattatgcttgtattcataagtattactctaaatgttttgtttttgtaattctggctaagaccttttaaacatggttagttgctagtacaaggaatcctttattggtaacatcttggtggctggctagctagtttctacagaacataatttgcctctatagaaggctattcttagatcatgtctcaatggaaacactcttctttcttagccttacttgaatcttgcctataataaagtagagcaacacacattgaaagcttctgatcaacggtcctgaaattttcatcttgaatgtctttgtattaaactgaattttcttttaagctaacaaagatcataattttcaatgattagccgtgtaactcctgcaatgaatgtttatgtgattgaagcaaatgtgaatcgtattattttaaaaagtggcagagtgacttaactgatcatgcatgatccctcatccctgaaattgagtttatgtagtcattttacttattttattcattagctaactttgtctatgtatatttctagatattgattagtgtaatcgattataaaggatatttatcaaatccagggattgcattttgaaattataattattttctttgctgaagtattcattgtaaaacatacaaaataaacatattttaaaacatttgcattttaccacca

SEQ ID NO: 21937 - DNA, 893 bp, Homo sapiens
  source 1..893: mol_type = unassigned DNA
cgcgcctgcgcagtggaggcggcccaggcccgccttccgcagggtgtcgccgctgtgccgctagcggtgccccgcctgctgcggtggcaccagccaggaggcggagtggaagtggccgtggggcgggtatgggactagctggcgtgtgcgccctgagacgctcagcgggctatatactcgtcggtggggccggcggtcagtctgcggcagcggcagcaagacggtacagtgaaggagagtgggcgtctggcggggtccgcagtttcagcagagccgctgcagccatggccccaatcaaggtgggagatgccatcccagcagtggaggtgtttgaaggggagccagggaacaaggtgaacctggcagagctgttcaagggcaagaagggtgtgctgtttggagttcctggggccttcacccctggatgttccaagacacacctgccagggtttgtggagcaggctgaggctctgaaggccaagggagtccaggtggtggcctgtctgagtgttaatgatgcctttgtgactggcgagtggggccgagcccacaaggcggaaggcaaggttcggctcctggctgatcccactggggcctttgggaaggagacagacttattactagatgattcgctggtgtccatctttgggaatcgacgtctcaagaggttctccatggtggtacaggatggcatagtgaaggccctgaatgtggaaccagatggcacaggcctcacctgcagcctggcacccaatatcatctcacagctctgaggccctgggccagattacttcctccacccctccctatctcacctgcccagccctgtgctggggccctgcaattggaatgttggccagatttctgcaataaacacttgtggtttgcggcca

SEQ ID NO: 21938 - DNA, 463 bp, Homo sapiens
  source 1..463: mol_type = unassigned DNA
caggaggcggagtggaagtggccgtggggcgggtatgggactagctggcgtgtgcgccctgagacgctcagcgggctatatactcgtcggtggggccggcggtcagtctgcggcagcggcagcaagacggtacagtgaaggagagtgggcgtctggcggggtccgcagtttcagcagagccgctgcagccatggccccaatcaaggttcggctcctggctgatcccactggggcctttgggaaggagacagacttattactagatgattcgctggtgtccatctttgggaatcgacgtctcaagaggttctccatggtggtacaggatggcatagtgaaggccctgaatgtggaaccagatggcacaggcctcacctgcagcctggcacccaatatcatctcacagctctgaggccctgggccagattacttcctccacccctccctatctcacctgcccagc

SEQ ID NO: 21939 - DNA, 596 bp, Homo sapiens
  source 1..596: mol_type = unassigned DNA
caggaggcggagtggaagtggccgtggggcgggtatgggactagctggcgtgtgcgccctgagacgctcagcgggctatatactcgtcggtggggccggcggtcagtctgcggcagcggcagcaagacggtacagtgaaggagagtgggcgtctggcggggtccgcagtttcagcagagccgctgcagccatggccccaatcaaggtgggagatgccatcccagcagtggaggtgtttgaaggggagccagggaacaaggtgaacctggcagagctgttcaagggcaagaagggtgtgctgtttggagttcctggggccttcacccctggatgttccaaggttcggctcctggctgatcccactggggcctttgggaaggagacagacttattactagatgattcgctggtgtccatctttgggaatcgacgtctcaagaggttctccatggtggtacaggatggcatagtgaaggccctgaatgtggaaccagatggcacaggcctcacctgcagcctggcacccaatatcatctcacagctctgaggccctgggccagattacttcctccacccctccctatctcacctgccca

SEQ ID NO: 21940 - DNA, 1751 bp, Homo sapiens
  source 1..1751: mol_type = unassigned DNA
ccccgcccccgccgccccagtccccgcccctcgcgccttcgtttattcctccgcgcgctgggacaggctgcttcttcgccagaaccaaccggttgcttgctgtcccagcggcgccccctcatcaccgtcgccatgcccggaggtctgcttctcggggacgtggctcccaactttgaggccaataccaccgtcggccgcatccgtttccacgactttctgggagactcatggggcattctcttctcccaccctcgggactttaccccagtgtgcaccacagagcttggcagagctgcaaagctggcaccagaatttgccaagaggaatgttaagttgattgccctttcaatagacagtgttgaggaccatcttgcctggagcaaggatatcaatgcttacaattgtgaagagcccacagaaaagttaccttttcccatcatcgatgataggaatcgggagcttgccatcctgttgggcatgctggatccagcagagaaggatgaaaagggcatgcctgtgacagctcgtgtggtgtttgtttttggtcctgataagaagctgaagctgtctatcctctacccagctaccactggcaggaactttgatgagattctcagggtagtcatctctctccagctgacagcagaaaaaagggttgccaccccagttgattggaaggatggggatagtgtgatggtccttccaaccatccctgaagaagaagccaaaaaacttttcccgaaaggagtcttcaccaaagagctcccatctggcaagaaatacctccgctacacaccccagccttaagtctcttggagaagctggtgctgtgagccagaggatgtcagctgccaattgtgttttcctgcagcaattccataaacacatcctggtgtcatcacagccaaggtttttaggttgctataccaatggcttattaaatgaaaatggcactaaaagtttcttgagattctttatactctctgccttcagcaatcaattccattcatacatcagcactctgctggttctgtttgaaatatgttctgtatttaaaactcaaatcttgttggatctctgcagggcttgtgaccaatgaagtcatatttgttgatggttgacaaagcttgcttcactccatcagagaatgactatcaatttttttttaactgtcctatcacgtcctctcctgtcacccattttgaagagtggcagaacttgaagttcaacttcctctgtaaatatccaagtataaagcccaggaacttctagaataacccagatgcgctttaattttttttaatatgttttgatcacagaacttctagaataacccagatgctctttcatattcttttaatacatcttgatcacagctgggggaaaaaaagctttttaattctataccttcctagtagataagtgaagagcagggaaagagacctttaaatattttgctataaaaaaatttgtgataagtttctatcaaaatggggagattgcagaaaaggcttcccttggctcccaaggaggtgtagcaggtgtgagcaatattagtgccatgtgcctttcacacagggtttgcatttatcagtctgttttccgatgatgtgtacatgaaagagtacaccatgtgaagagaagagagaatgattgaaaatgttttagtatagaactcttcttgcagtgggttgctattttctagattttactttttagggaacaaaataaaatcctttgttaaaactggg

SEQ ID NO: 21941 - DNA, 4385 bp, Homo sapiens
  source 1..4385: mol_type = unassigned DNA
cgatcgatctcctccggctccgacgtcctcggcctgccgggtcccgggtcctttgcggcgctagggtgggcgaacccagagcgacgctccgggacgatgtggggcagcgatcgcctggcgggtgctgggggaggcggggcggcagtgactgtggccttcaccaacgctcgcgactgcttcctccacctgccgcggcgtctcgtggcccagctgcatctgctgcagaatcaagctatagaagtggtctggagtcaccagcctgcattcttgagctgggtggaaggcaggcattttagtgatcaaggtgaaaatgtggctgaaattaacagacaagttggtcaaaaacttggactctcaaatgggggacaggtatttctcaagccatgttcccatgtggtatcttgtcaacaagttgaggtggaacccctctcagcagatgattgggagatactggagctgcatgctgtttcccttgaacaacatcttctagatcaaattcgaatagtttttccaaaagccatttttcctgtttgggttgatcaacaaacgtacatatttatccaaattgttgcactaataccagctgcctcttatggaaggctggaaactgacaccaaactccttattcagccaaagacacgccgagccaaagagaatacattttcaaaagctgatgctgaatataaaaaacttcatagttatggaagagaccagaaaggaatgatgaaagaacttcaaaccaagcaacttcagtcaaatactgtgggaatcactgaatctaatgaaaacgagtcagagattccagttgactcatcatcagtagcaagtttatggactatgataggaagcattttttcctttcaatctgagaagaaacaagagacatcttggggtttaactgaaatcaatgcattcaaaaatatgcagtcaaaggttgttcctctagacaatattttcagagtatgcaaatctcaacctcctagtatatataacgcgtcagcaacctctgtttttcataaacactgtgccattcatgtatttccatgggaccaggaatattttgatgtagagcccagctttactgtgacatatggaaagctagttaagctactttctccaaagcaacagcaaagtaaaacaaaacaaaatgtgttatcacctgaaaaagagaagcagatgtcagagccactagatcaaaaaaaaattaggtcagatcataatgaagaagatgagaaggcctgtgtgctacaagtagtctggaatggacttgaagaattgaacaatgccatcaaatataccaaaaatgtagaagttctccatcttgggaaagtctggattccagatgacctgaggaagagactaaatatagaaatgcatgccgtagtcaggataactccagtggaagttacccctaaaattccaagatctctaaagttacaacctagagagaatttacctaaagacataagtgaagaagacataaaaactgtattttattcatggctacagcagtctactaccaccatgcttcctttggtaatatcagaggaagaatttattaagctggaaactaaagatggactgaaggaattttctctgagtatagttcattcttgggaaaaagaaaaagataaaaatatttttctgttgagtcccaatttgctgcagaagactacaatacaagtccttctagatcctatggtaaaagaagaaaacagtgaggaaattgactttattcttccttttttaaagctgagctctttgggaggagtgaattccttaggcgtatcctccttggagcacatcactcacagcctcctgggacgccctttgtctcggcagctgatgtctcttgttgcaggacttaggaatggagctcttttactcacaggaggaaagggaagtggaaaatcaactttagccaaagcaatctgtaaagaagcatttgacaaactggatgcccatgtggagagagttgactgtaaagctttacgaggaaaaaggcttgaaaacatacaaaaaaccctagaggtggctttctcagaggcagtgtggatgcagccatctgttgtcctgctggatgaccttgacctcattgctggactgcctgctgtcccggaacatgagcacagtcctgatgcggtgcagagccagcggcttgctcatgctttgaatgatatgataaaagagtttatctccatgggaagtttggttgcactgattgccacaagtcagtctcagcaatctctacatcctttacttgtttctgctcaaggagttcacatatttcagtgcgtccaacacattcagcctcctaatcaggaacaaagatgtgaaattctgtgtaatgtaataaaaaataaattggactgtgatataaacaagttcaccgatcttgacctgcagcatgtagctaaagaaactggcgggtttgtggctagagattttacagtacttgtggatcgagccatacattctcgactctctcgtcagagtatatccaccagagaaaaattagttttaacaacattggacttccaaaaggctctccgcggatttcttcctgcgtctttgcgaagtgtcaacctgcataaacctagagacctgggttgggacaagattggtgggttacatgaagttaggcagatactcatggatactatccagttacctgccaagtatccagaattatttgcaaacttgcccatacgacaaagaacaggaatactgttgtatggtccgcctggaacaggaaaaaccttactagctggggtaattgcacgagagagtagaatgaattttataagtgtcaaggggccagagttactcagcaaatacattggagcaagtgaacaagctgttcgggatatttttattagagcacaggctgcaaagccctgcattcttttctttgatgaatttgaatccattgctcctcggcggggtcatgataatacaggagttacagaccgagtagttaaccagttgctgactcagttggatggagtagaaggcttacagggtgtttatgtattggctgctactagtcgccctgacttgattgaccctgccctgcttaggcctggtcgactagataaatgtgtatactgtcctcctcctgatcaggtgtcacgtcttgaaattttaaatgtcctcagtgactctctacctctggcagatgatgttgaccttcagcatgtagcatcagtaactgactcctttactggagctgatctgaaagctttactttacaatgcccaattggaggccttacatggaatgctgctctcgagtggactccaggatggaagttccagctctgatagtgacctaagtctgtcttcaatggtctttcttaaccatagcagtggctctgacgattcagctggagatggagaatgtggcttagatcagtcccttgtttctttagagatgtccgagatccttccagatgaatcaaaattcaatatgtaccggctctactttggaagctcttatgaatcagaacttggaaatggaacctcttctgatttgagctcacaatgtctctctgcaccaagctccatgactcaggatttgcctggagttcctgggaaagaccagttgttttcacagcctccagtgttaaggacagcttcacaagagggttgccaagaacttacacaagaacaaagagatcaactgagggcagatatcagtattatcaaaggcagataccggagccaaagtggagaggacgaatccatgaaccaaccaggaccaatcaaaaccagactggctattagtcagtcacatttaatgactgcacttggtcacacaagaccatccattagtgaagatgactggaagaattttgctgagctatatgaaagctttcaaaatccaaagaggagaaaaaatcaaagtggaacaatgtttcgacctggacagaaagtaactttagcataaaatatacttctttttgatttggttctgttaagttttttgatggcttttccatatgttgtaacaggaaaaaaatggtgtctatgaatttcttcttaatttaacaaatttggttaatttataaaatcacagattggtaaatgctataattatgtaatgatcaggattgagattaatactgtagtataaattgggacattataacagattccatattttatttcctaaaatctaaattcagtctttaatgaaataatattagccaaatggtggaactaatttatttcttttgaggaaaagataataaagaatgtaattaaatttaaatttcttggaattcccagttgtatattcatcacctttgtagcatttgacaaattttatgcttagcagcttcttcactgttttgaaataaaatatcctattacctactgatacaa

SEQ ID NO: 21942 - DNA, 3681 bp, Homo sapiens
  source 1..3681: mol_type = unassigned DNA
atgtggggcagcgatcgcctggcgggtgctgggggaggcggggcggcagtgactgtggccttcaccaacgctcgcgactgcttcctccacctgccgcggcgtctcgtggcccagctgcatctgctgcagaatcaagctatagaagtggtctggagtcaccagcctgcattcttgagctgggtggaaggcaggcattttagtgatcaaggtgaaaatgtggctgaaattaacagacaagttggtcaaaaacttggactctcaaatgggggacaggtatttctcaagccatgttcccatgtggtatcttgtcaacaagttgaggtggaacccctctcagcagatgattgggagatactggagctgcatgctgtttcccttgaacaacatcttctagatcaaattcgaatagtttttccaaaagccatttttcctgtttgggttgatcaacaaacgtacatatttatccaaattgttgcactaataccagctgcctcttatggaaggctggaaactgacaccaaactccttattcagccaaagacacgccgagccaaagagaatacattttcaaaagctgatgctgaatataaaaaacttcatagttatggaagagaccagaaaggaatgatgaaagaacttcaaaccaagcaacttcagtcaaatactgtgggaatcactgaatctaatgaaaacgagtcagagattccagttgactcatcatcagtagcaagtttatggactatgataggaagcattttttcctttcaatctgagaagaaacaagagacatcttggggtttaactgaaatcaatgcattcaaaaatatgcagtcaaaggttgttcctctagacaatattttcagagtatgcaaatctcaacctcctagtatatataacgcgtcagcaacctctgtttttcataaacactgtgccattcatgtatttccatgggaccaggaatattttgatgtagagcccagctttactgtgacatatggaaagctagttaagctactttctccaaagcaacagcaaagtaaaacaaaacaaaatgtgttatcacctgaaaaagagaagcagatgtcagagccactagatcaaaaaaaaattaggtcagatcataatgaagaagatgagaaggcctgtgtgctacaagtagtctggaatggacttgaagaattgaacaatgccatcaaatataccaaaaatgtagaagttctccatcttgggaaagtctggattccagatgacctgaggaagagactaaatatagaaatgcatgccgtagtcaggataactccagtggaagttacccctaaaattccaagatctctaaagttacaacctagagagaatttacctaaagacataagtgaagaagacataaaaactgtattttattcatggctacagcagtctactaccaccatgcttcctttggtaatatcagaggaagaatttattaagctggaaactaaagatggactgaaggaattttctctgagtatagttcattcttgggaaaaagaaaaagataaaaatatttttctgttgagtcccaatttgctgcagaagactacaatacaagtccttctagatcctatggtaaaagaagaaaacagtgaggaaattgactttattcttccttttttaaagctgagctctttgggaggagtgaattccttaggcgtatcctccttggagcacatcactcacagcctcctgggacgccctttgtctcggcagctgatgtctcttgttgcaggacttaggaatggagctcttttactcacaggaggaaagggaagtggaaaatcaactttagccaaagcaatctgtaaagaagcatttgacaaactggatgcccatgtggagagagttgactgtaaagctttacgagctttgaatgatatgataaaagagtttatctccatgggaagtttggttgcactgattgccacaagtcagtctcagcaatctctacatcctttacttgtttctgctcaaggagttcacatatttcagtgcgtccaacacattcagcctcctaatcaggaacaaagatgtgaaattctgtgtaatgtaataaaaaataaattggactgtgatataaacaagttcaccgatcttgacctgcagcatgtagctaaagaaactggcgggtttgtggctagagattttacagtacttgtggatcgagccatacattctcgactctctcgtcagagtatatccaccagagaaaaattagttttaacaacattggacttccaaaaggctctccgcggatttcttcctgcgtctttgcgaagtgtcaacctgcataaacctagagacctgggttgggacaagattggtgggttacatgaagttaggcagatactcatggatactatccagttacctgccaagtatccagaattatttgcaaacttgcccatacgacaaagaacaggaatactgttgtatggtccgcctggaacaggaaaaaccttactagctggggtaattgcacgagagagtagaatgaattttataagtgtcaaggggccagagttactcagcaaatacattggagcaagtgaacaagctgttcgggatatttttattagagcacaggctgcaaagccctgcattcttttctttgatgaatttgaatccattgctcctcggcggggtcatgataatacaggagttacagaccgagtagttaaccagttgctgactcagttggatggagtagaaggcttacagggtgtttatgtattggctgctactagtcgccctgacttgattgaccctgccctgcttaggcctggtcgactagataaatgtgtatactgtcctcctcctgatcaggtgtcacgtcttgaaattttaaatgtcctcagtgactctctacctctggcagatgatgttgaccttcagcatgtagcatcagtaactgactcctttactggagctgatctgaaagctttactttacaatgcccaattggaggccttacatggaatgctgctctcgagtggactccaggatggaagttccagctctgatagtgacctaagtctgtcttcaatggtctttcttaaccatagcagtggctctgacgattcagctggagatggagaatgtggcttagatcagtcccttgtttctttagagatgtccgagatccttccagatgaatcaaaattcaatatgtaccggctctactttggaagctcttatgaatcagaacttggaaatggaacctcttctgatttgagctcacaatgtctctctgcaccaagctccatgactcaggatttgcctggagttcctgggaaagaccagttgttttcacagcctccagtgttaaggacagcttcacaagagggttgccaagaacttacacaagaacaaagagatcaactgagggcagatatcagtattatcaaaggcagataccggagccaaagtggagaggacgaatccatgaaccaaccaggaccaatcaaaaccagactggctattagtcagtcacatttaatgactgcacttggtcacacaagaccatccattagtgaagatgactggaagaattttgctgagctatatgaaagctttcaaaatccaaagaggagaaaaaatcaaagtggaacaatgtttcgacctggacagaaagtaactttagcataa

SEQ ID NO: 21943 - DNA, 1411 bp, Homo sapiens
  source 1..1411: mol_type = unassigned DNA
aaaaaaaaattaggtcagatcataatgaagaagatgagaaggcctgtgtgctacaagtagtctggaatggacttgaagaattgaacaatgccatcaaatataccaaaaatgtagaagttctccatcttgggaaagtctggattccagatgacctgaggaagagactaaatatagaaatgcatgccgtagtcaggataactccagtggaagttacccctaaaattccaagatctctaaagttacaacctagagagaatttacctaaagacataagtgaagaagacataaaaactgtattttattcatggctacagcagtctactaccaccatgcttcctttggtaatatcagaggaagaatttattaagctggaaactaaagatggactgaaggaattttctctgagtatagttcattcttgggaaaaagaaaaagataaaaatatttttctgttgagtcccaatttgctgcagaagactacaatacaaaggagtgaattccttaggcgtatcctccttggagcacatcactcacagcctcctgggacgccctttgtctcggcagctgatgtctcttgttgcaggacttaggaatggagctcttttactcacaggaggaaagggaagtggaaaatcaactttagccaaagcaatctgtaaagaagcatttgacaaactggatgcccatgtggagagagttgactgtaaagctttacgaggaaaaaggcttgaaaacatacaaaaaaccctagaggtggctttctcagaggcagtgtggatgcagccatctgttgtcctgctggatgaccttgacctcattgctggactgcctgctgtcccggaacatgagcacagtcctgatgcggtgcagagccagcggcttgctcatgctttgaatgatatgataaaagagtttatctccatgggaagtttggttgcactgattgccacaagtcagtctcagcaatctctacatcctttacttgtttctgctcaaggagttcacatatttcagtgcgtccaacacattcagcctcctaatcagaattagttttaacaacattggacttccaaaaggctctccgcggatttcttcctgcgtctttgcgaagtgtcaacctgcataaacctagagacctgggttgggacaagattggtgggttacatgaagttaggcagatactcatggatactatccagttacctgccaagtatccagaattatttgcaaacttgcccatacgacaaagaacaggaatactgttgtatggtccgcctggaacaggaaaaaccttactagctggggtaattgcacgagagagtagaatgaattttataagtgtcaaggggccagagttactcagcaaatacattggagcaagtgaacaagctgttcgggatatttttattag

SEQ ID NO: 21944 - DNA, 2593 bp, Homo sapiens
  source 1..2593: mol_type = unassigned DNA
atgtggggcagcgatcgcctggcgggtgctgggggaggcggggcggcagtgactgtggccttcaccaacgctcgcgactgcttcctccacctgccgcggcgtctcgtggcccagctgcatctgctgcagaatcaagctatagaagtggtctggagtcaccagcctgcattcttgagctgggtggaaggcaggcattttagtgatcaaggtgaaaatgtggctgaaattaacagacaagttggtcaaaaacttggactctcaaatgggggacaggtatttctcaagccatgttcccatgtggtatcttgtcaacaagttgaggtggaacccctctcagcagatgattgggagatactggagctgcatgctgtttcccttgaacaacatcttctagatcaaattcgaatagtttttccaaaagccatttttcctgtttgggttgatcaacaaacgtacatatttatccaaattgttgcactaataccagctgcctcttatggaaggctggaaactgacaccaaactccttattcagccaaagacacgccgagccaaagagaatacattttcaaaagctgatgctgaatataaaaaacttcatagttatggaagagaccagaaaggaatgatgaaagaacttcaaaccaagcaacttcagtcaaatactgtgggaatcactgaatctaatgaaaacgagtcagagattccagttgactcatcatcagtagcaagtttatggactatgataggaagcattttttcctttcaatctgagaagaaacaagagacatcttggggtttaactgaaatcaatgcattcaaaaatatgcagtcaaaggttgttcctctagacaatattttcagagtatgcaaatctcaacctcctagtatatataacgcgtcagcaacctctgtttttcataaacactgtgccattcatgtatttccatgggaccaggaatattttgatgtagagcccagctttactgtgacatatggaaagctagttaagctactttctccaaagcaacagcaaagtaaaacaaaacaaaatgtgttatcacctgaaaaagagaagcagatgtcagagccactagatcaaaaaaaaattaggtcagatcataatgaagaagatgagaaggcctgtgtgctacaagtagtctggaatggacttgaagaattgaacaatgccatcaaatataccaaaaatgtagaagttctccatcttgggaaagtctggattccagatgacctgaggaagagactaaatatagaaatgcatgccgtagtcaggataactccagtggaagttacccctaaaattccaagatctctaaagttacaacctagagagaatttacctaaagacataagtgaagaagacataaaaactgtattttattcatggctacagcagtctactaccaccatgcttcctttggtaatatcagaggaagaatttattaagctggaaactaaagatggactgaaggaattttctctgagtatagttcattcttgggaaaaagaaaaagataaaaatatttttctgttgagtcccaatttgctgcagaagactacaatacaagtccttctagatcctatggtaaaagaagaaaacagtgaggaaattgactttattcttccttttttaaagctgagctctttgggaggagtgaattccttaggcgtatcctccttggagcacatcactcacagcctcctgggacgccctttgtctcggcagctgatgtctcttgttgcaggacttaggaatggagctcttttactcacaggaggaaagggaagtggaaaatcaactttagccaaagcaatctgtaaagaagcatttgacaaactggatgcccatgtggagagagttgactgtaaagctttacgaggaaaaaggcttgaaaacatacaaaaaaccctagaggtggctttctcagaggcagtgtggatgcagccatctgttgtcctgctggatgaccttgacctcattgctggactgcctgctgtcccggaacatgagcacagtcctgatgcggtgcagagccagcggcttgctcatgctttgaatgatatgataaaagagtttatctccatgggaagtttggttgcactgattgccacaagtcagtctcagcaatctctacatcctttacttgtttctgctcaaggagttcacatatttcagtgcgtccaacacattcagcctcctaatcagaattagttttaacaacattggacttccaaaaggctctccgcggatttcttcctgcgtctttgcgaagtgtcaacctgcataaacctagagacctgggttgggacaagattggtgggttacatgaagttaggcagatactcatggatactatccagttacctgccaagtatccagaattatttgcaaacttgcccatacgacaaagaacaggaatactgttgtatggtccgcctggaacaggaaaaaccttactagctggggtaattgcacgagagagtagaatgaattttataagtgtcaaggggccagagttactcagcaaatacattggagcaagtgaacaagctgttcgggatatttttattag

SEQ ID NO: 21945 - DNA, 2038 bp, Homo sapiens
  source 1..2038: mol_type = unassigned DNA
ctgctcgggaccacccgaacccgcggccatggccccggccgccgccagccccccggaggtgatccgcgcggcgcagaaggacgagtactaccgcggtgggctgcggagcgcggcgggcggcgccctgcacagcctggcgggtgcgaggaagtggctggagtggaggaaggaggttgagctgctctcagatgtggcctactttggcctcaccacacttgcaggctaccagaccctgggggaggagtacgtcagcatcatccaggtggacccatcgcggatacatgtgccctcctcgctgcgccgtggcgtgctggtgacactgcatgccgtcctgccctacctgctggacaaggccctgctccccctggagcaggagctgcaggctgaccccgacagtgggcgacccttgcaggggagcctggggccaggtgggcgtggctgctcaggggcgcggcgctggatgcgtcaccacacggccaccctgactgagcagcagaggagggcgctgctgcgggcggtcttcgtcctcagacagggcctcgcctgcctccagcggctacatgttgcctggttttacatccacggtgtcttctaccacctggccaagaggctcacggggatcacgtaccaggcgctgaggccagatcccctcagggtcctgatgagtgtggcgccatctgccttacagctccgtgtccgcagcctgcccggagaggacctgagggcccgtgttagctacaggctgctgggggtcatctcactgctgcacctggtgctgtccatggggctgcagctgtacggtttcaggcagcggcagcgagccaggaaggagtggaggctgcaccgcggcctgtctcaccgcagggcctccttggaggagagagccgtttccagaaaccccctgtgcaccctgtgcctggaggagcgcaggcacccaacagccacgccctgcggccacctgttctgctgggagtgcatcaccgcgtggtgcagcagcaaggcggagtgtcccctctgccgggagaagttccctccccagaagctcatctaccttcggcactaccgctgagccggcgcccgggtgggcctggacacagatgacctctacgggagtctgaacgccaagatttagtctcaggattaaccttgcttgcacagaagttagaacactctcagttttttgtcatgtaagatactaacctagccaccctgggagagaacagaaagctgtccctggctgcgctttctcagccctgggaggggcgcctgaacccagaacatttccctaaccccaacctggtaggactcagccacttcttcaggaatttcacttatttggacgggattttaggtttccctcccttccccaaaccatacagttgagaagtaattcagaagtaggccagaagacactttattcgtttatattgtgagaaaacagccccatcaggcttgtgttaaggcaatggactgaatgagtgcgtgctgggtggggtggggcacggaggctggcgggttgcttcagccagtgcagtgagaacagcagccccacggccccatgggaggcggcgctgctctccccgagggcggctgggcagagcacatcccccaggacttgatgaccacacggggcagagagaaaccaaccaaggccagcacctccgtcggaagcatttggcacacacaccttcaatacacgtcaaggtcgcttccagttttagaaaacagaaatctgcatctcagcctgagacgcacagagaggtctcttcctgacccagacgcactcacgagccaggtcctgggggtatgggggctgccaggggcgcccgagccctctcctggggggcctgctgggcaggcgacctgctgacccacggtcactgctgtgttcagcccctcagctcggccccagcctatttcccgcctccatttgatgtttccaggttttcaaaactgcatttaacctgcgccagagagttcaccgtaggcatctttaataaactaactccagcaaaatgtgggtacgttactaacacaa

SEQ ID NO: 21946 - DNA, 1997 bp, Homo sapiens
  source 1..1997: mol_type = unassigned DNA
atcagttctcgcccgtctgggcgtgggcgtggccggcgtggctgctcgggaccacccgaacccgcggccatggccccggccgccgccagccccccggaggtgatccgcgcggcgcagaaggacgagtactaccgcggtgggctgcggagcgcggcgggcggcgccctgcacagcctggcgggtgcgaggaagtggctggagtggaggaaggaggttgagctgctctcagatgtggcctactttggcctcaccacacttgcaggctaccagaccctgggggaggagtacgtcagcatcatccaggtggacccatcgcggatacatgtgccctcctcgctgcgccgtggcgtgctggtgacactgcatgccgtcctgccctacctgctggacaaggccctgctccccctggagcaggagctgcaggctgaccccgacagtgggcgacccttgcaggggagcctggggccaggtgggcgtggctgctcaggggcgcggcgctggatgcgtcaccacacggccaccctgactgagcagcagaggagggcgctgctgcgggcggtcttcgtcctcagacagggcctcgcctgcctccagcggctacatgttgcctggttttacatccacggtgtcttctaccacctggccaagaggctcacggggatcacgtacctccgtgtccgcagcctgcccggagaggacctgagggcccgtgttagctacaggctgctgggggtcatctcactgctgcacctggtgctgtccatggggctgcagctgtacggtttcaggcagcggcagcgagccaggaaggagtggaggctgcaccgcggcctgtctcaccgcagggcctccttggaggagagagccgtttccagaaaccccctgtgcaccctgtgcctggaggagcgcaggcacccaacagccacgccctgcggccacctgttctgctgggagtgcatcaccgcgtggtgcagcagcaaggcggagtgtcccctctgccgggagaagttccctccccagaagctcatctaccttcggcactaccgctgagccggcgcccgggtgggcctggacacagatgacctctacgggagtctgaacgccaagatttagtctcaggattaaccttgcttgcacagaagttagaacactctcagttttttgtcatgtaagatactaacctagccaccctgggagagaacagaaagctgtccctggctgcgctttctcagccctgggaggggcgcctgaacccagaacatttccctaaccccaacctggtaggactcagccacttcttcaggaatttcacttatttggacgggattttaggtttccctcccttccccaaaccatacagttgagaagtaattcagaagtaggccagaagacactttattcgtttatattgtgagaaaacagccccatcaggcttgtgttaaggcaatggactgaatgagtgcgtgctgggtggggtggggcacggaggctggcgggttgcttcagccagtgcagtgagaacagcagccccacggccccatgggaggcggcgctgctctccccgagggcggctgggcagagcacatcccccaggacttgatgaccacacggggcagagagaaaccaaccaaggccagcacctccgtcggaagcatttggcacacacaccttcaatacacgtcaaggtcgcttccagttttagaaaacagaaatctgcatctcagcctgagacgcacagagaggtctcttcctgacccagacgcactcacgagccaggtcctgggggtatgggggctgccaggggcgcccgagccctctcctggggggcctgctgggcaggcgacctgctgacccacggtcactgctgtgttcagcccctcagctcggccccagcctatttcccgcctccatttgatgtttccaggttttcaaaactgcatttaacctgcgccagagagttcaccgtaggcatctttaataaactaactccagcaaaa

SEQ ID NO: 21947 - DNA, 2740 bp, Homo sapiens
  source 1..2740: mol_type = unassigned DNA
agaaagtgtgcccgccccctctggggcggagagactcagcccctccccctcagcggataacctgggactgaccgttccctggggatccgacgggccccagaggacccacgcctgagccccgtgcgactcgtggcctttgggctagaagccatggacgccttcacccgcttcaccaaccagacccagggccgggaccgactcttcagagccactcagtacacatgcatgttgcttagatatttgttagagcccaaagctggcaaagagaaggtggtaatgaagctcaagaaactggagtccagtgtgagcactggtcgtaaatggttcagactaggcaatgtggtacatgctatacaggcaactgagcagagcattcatgccactgacctggtacctcgcttatgcttaacattagccaacctgaaccgtgtgatttatttcatctgtgacaccatcctctgggtgaggagcgtaggtctcacctctggcatcaacaaagagaaatggcgaacgagggctgctcaccactactactattctcttctgctgagcctggtcagggatctgtatgaaatctccctgcagatgaaacgagttacatgtgacagggcaaagaaagagaaatcagcatcccaggatcctctttggttcagcgtggctgaggaggaaacagaatggctccaatcctttctacttcttttattccgatctctgaagcagcatcctcccttgctcctggacacagtgaagaacctttgtgatatcctgaaccctttggaccagctggggatctataaatccaatcctggcatcattggacttggaggtcttgtgtcctctatagcaggcatgatcactgtggcatatcctcagatgaagctgaagacccgttagggtgtttttaggcttggaactagtacctactttaaaagatggcctcttggtgggacagacatttgtataagtcacaggccatgtcatactgtgcttaagttcttgttcatgtgagcatttaacaacctgtgatgtgggcagagatgaggccaagaacggagaagggaggagcatgaagagttgtatgtttttggagtgctggagtgacttgtgaatttctgaatattttcccttcatctaacattgattgaacatctcttatgtgcatagtgggagcttagtatttgctgaatgaataaaaattgaaaggaaaaaatttaaaaagacccaatcgcactgatcattgaacaccagtatacaataactttagggtcatatggatcattggtttcacgattacagtaggtctggtgcatggcactctcagatctagtagaggctctgatgtcagtagcaggatggaggagagctgggcttacagcctctcaacttgttggcccttataccatcactgcactcatgtccttgctctgtgcagaagtagaatcagaaaagcatcaggcaccttcatggtataaattgtgtctatgggtgcagtgaataagcaaaaatcagaagcagaccggagggacttataaaaataggtacagggtcacaatgggtgcctatatgtagcctgtgacagataagaagctgacagtgagacaaacaaaaaactgaggctagagcctcattcctctgactcctaatccagtgttctctccatgctctcccactgtcttcagaattgagtagaaatgtgatcccctcctgaatcctgttttttgcctcttactctcccataatttggaaatttccttgtccagtggtttatattcttttctagaaaaactaaaactgggtggagtgtggtggctcacacctataatcccagcactttgggaggctgaagcggaaggattgcttgaggccaggagttcaagaccagcctgggcaatgtagtgagactccttctctacaacaaagtgttaaaaaattagccaggcatggtggagtatgcctgtagtcccagatactctggaggctgaagcaggaggatcacttgagcccaggagttcaaggctgcagtgagcttccaccgcactccagcccgggtgatagagcaagaccctgtgtcttaaaaaaaaattaagacagtatttagacttatcagttagattgttttatttaaatccttctaacaatttaggcaattctacattaattttcatcaaaatttatccagtcaaaaaaatttcatgaatactccagatgtaagagagtcacaattttctacgataaatcagacatcttatttctagggtgattgagggaggtggaaagcgcaggaggaagccagtgaagaggacaatggaatgctgagtcaatgacattgacttgtgttcctatctgccatcttgggtgtgggtctttatatgtggttacagatcctttagtttgagggaggtgaggtagagaaataggatgccagcaggtaggaggccgatgtcagtcctcccagcaaagctgtgtcatttatctgaatggaaatgagaaaataaatatgtactcaataagtcacatttcccagaaatgtgattgagattctcaaaaaatagactcagattcttggctgtctgtttaaccaatcacgatatgggatttgagaaataaaatttagggaattttaagagacatgaaagctactaggtcagggaaaataaaaagcttaaataactatttttattgtccagatcctctactgtaatagattaactatgttcaataaatttctagacaaaattga

SEQ ID NO: 21948 - DNA, 1062 bp, Homo sapiens
  source 1..1062: mol_type = unassigned DNA
ggagttgccatggcgtcgctgagcggcctggcgtcggcgctggagtcgtacaggggccgggaccgcctgatccgagtgctggggtactgctgccagctggttggtggagttctggttgaacagtgtcccgccaggtccgaagtggggacacgtctgttggtggtgtccacccaactcagccactgcaggaccatcttgcgactctttgatgacctggccatgtttgtctacactaagcaatatggcctgggggcacaggaggaggacgcctttgtccgctgtgtctccgtcctagggaacctggctgaccagctctactacccctgtgagcacgtggcctgggcggctgatgcccgggtcctccacgtggactcttctcggtggtggacgctgagtacaaccctgtgggccctctctctgctcctgggggttgccaggtccctgtggatgctgctgaaactgagacagaggctgcggagccccacggcgcccttcaccagcccgctgccccggggcaagcggagggccatggaggcgcagatgcagtcggaggcgctgtcacttctcagcaacctggccgacctggccaacgccgtgcactggctgccccggggcgtgctgtgggccggccgcttcccgccgtggctagtgggcctcatgggcaccatctcctcaatcctcagcatgtaccaggcggcccgggccggcggccaggccgaggccactaccccctgacactgccggaagagcacagggacacagccagagcccacggagggcccttcccgcaaagcagaagccgccagggcaggggccggggctctcatggagctgcctgtggtgaaacccatgggcagggtgggtggagggactgatgcgaggtcccccaggcctcagcctggagctcctgagccgtgacagttttcaggggccgtgcagggcttcagcagcacctcctgcctgccagctggcgtcttgtatccaaatcaagatgaggaagagggggcctgtcgtgccttgagaaagctggaacgggaatcaattaaacattgtggtgctggc

SEQ ID NO: 21949 - DNA, 806 bp, Homo sapiens
  source 1..806: mol_type = unassigned DNA
gtacaggggccgggaccgcctgatccgagtgctggggtactgctgccagctggttggtggagttctggttgaacagtgtcccgccaggtccgaagtggggacacgtctgttggtggtgtccacccaactcagccactgcaggaccatcttgcgactctttgatgacctggccatgtttgtctacactaagcaatatggcctgggggcacaggaggaggacgcctttgtccgctgtgtctccgtcctagggaacctggctgaccagctctactacccctgtgagcacgtggcctgggcggctgatgcccgggtcctccacgtggactcttctcggtggtggacgctgagtacaaccctgtgggccctctctctgctcctgggggttgccaggtccctgtggatgctgctgaaactgagacagaggctgcggagccccacggcgcccttcaccagcatgtaccaggcggcccgggccggcggccaggccgaggccactaccccctgacactgccggaagagcacagggacacagccagagcccacggagggcccttcccgcaaagcagaagccgccagggcaggggccggggctctcatggagctgcctgtggtgaaacccatgggcagggtgggtggagggactgatgcgaggtcccccaggcctcagcctggagctcctgagccgtgacagttttcaggggccgtgcagggcttcagcagcacctcctgcctgccagctggcgtcttgtatccaaatcaagatgaggaagagggggcctgtcgtgccttgagaaagctggaacggg

SEQ ID NO: 21950 - DNA, 1739 bp, Homo sapiens
  source 1..1739: mol_type = unassigned DNA
tcaggggtaggagcgggagccgagaggaggcggaggagatggcgtcccagccgccacctccccccaaaccctgggagacccgccgaattccgggagccggaccgggaccaggaccgggccccactttccaatctgctgatttgggtcctactttaatgacaagacctggacaaccagcacttaccagagtgcccccacctattcttccaaggccatcacagcagacaggaagtagcagtgtgaacacttttagacctgcttacagttcattttcttctggatatggtgcctatggaaattcattttatggaggctatagtccttatagttatggatataatgggctgggctacaaccgcctccgtgtagatgatcttccacccagtagatttgttcagcaagctgaagaaagcagcaggggtgcatttcagtccattgaaagtattgtgcatgcatttgcctctgtcagtatgatgatggatgctaccttttcagctgtctataacagtttcagggctgtattggatgtagcaaatcacttttcccgattgaaaatacactttacaaaagtgttttcagcttttgcattggttaggactatacggtatctttacagacggctacagcggatgttaggtttaagaagaggctctgagaatgaagacctctgggcagagagtgaaggaactgtggcatgccttggtgctgaggaccgagcagctacctcagcaaaatcttggccaatattcttgttctttgctgttatccttggtggtccttacctcatttggaaactattgtctactcacagtgatgaagtaacagacagcatcaactgggcaagtggtgaggatgaccatgtagttgccagagcagaatatgattttgctgccgtatctgaagaagaaatttctttccgggctggtgatatgctgaacttagctctcaaagaacaacaacccaaagtgcgtggttggcttctggctagccttgatggccaaacaacaggacttatacctgcgaattatgtcaaaattcttggcaaaagaaaaggtaggaaaacggtggaatcaagtaaagtttccaagcagcaacaatcttttaccaacccaacactaactaaaggagccacggttgctgattctttggatgaacaggaagctgcctttgaatctgtttttgttgaaactaataaggttccagttgcacctgattccattgggaaagatggagaaaagcaagatctttgatatctttcatgtttgcctgcagttgaacaatactttagagtactttttaaaattatttctcacaaagaaatgaatgtacaatccaatgaaaacatttgttattggctatttcaggtgttttgctgctagaaattattaaagttacacactagtatgttggtctggtgacctggttacattttattatacacattattggaccataaggacatttgtttcacctagattttaagattatggagactgctgtcatttttatcttatttaaatctctaggtttattggaagagtaagattgatgaactatagcatgcacagtttggtacagtagagatcattaatacttttaaaagttctgcattaattgacttggaatccttagaaatggagtggtgacatgtcagtatgagaacaggcaaaaggtaaatttttttttttttttacaaccttaagtaatctcaataataaaattttctgatctgtattata

SEQ ID NO: 21951 - DNA, 1985 bp, Homo sapiens
  source 1..1985: mol_type = unassigned DNA
agtctgggcgggagggcgagagcgagggcgcctgggagaaacctcgcccagcggcggttgattagtcaggcctcagaaagatggcgtcctcggagcaggcagagcagccgagccagccaagctctactccaggaagtgaaaatgtgctgcctcgagagccgctgattgccacggcagtgaagtttctacagaattcccgggtccgccagagcccacttgcaaccaggagagcattcctaaagaagaaagggctgacagatgaagagattgatatggccttccagcagtcgggcactgctgccgatgagccttcgtccttgggcccagccacacaggtggttcctgtccagccccctcacctcatatctcagccatacagtcccgcaggctcccgatggcgagattacggcgccctggccatcatcatggcaggcattgcatttggctttcaccagctctacaagaaatacctgctccccctcatcctgggcggccgagaggacagaaagcagctggagaggatggaggccggtctctctgagctgagtggcagcgtggcccagacagtgactcagttacagacgaccctcgcctccgtccaggagctgctgattcagcagcagcagaagatccaggagcttgcccacgagctggccgctgccaaggccaccacatccaccaactggatcctggagtcccagaatatcaacgaactcaagtccgaaattaactccttgaaagggcttcttttaaatcggaggcagttccctccatccccatcagccccgaagatcccctcctggcagatcccagtcaagtcaccgtcaccctccagccctgcggccgtgaaccaccacagcagcagcgacatctcacctgtcagcaacgagtccacgtcgtcctcgcctgggaaggagggccacagccccgagggctccacggtcacctaccacttgctgggcccccaggaggaaggcgagggggtggtggacgtcaagggccaggtgcggatggaggtgcaaggcgaggaggagaagagggaggacaaggaggacgaggaggatgaggaggatgatgatgtgagccatgtggacgaggaggactgcctgggggtgcagagggaggaccgccggggcggggatgggcagatcaacgagcaggtggagaagctgcggcggcccgagggcgccagcaacgagagtgagcgggactagggctgcgcctgctgcctccagccctgaggatggcatctagtgtgcccgtgcgtggccataccctgcctccctctctggccctgggagggcagcttggagcccaggtagggggcagagctgtcctcagctgcactgcggcctggtggcagtgtggggagtcacacttctgtccacctggcctcctctcgcctggccgccagccccagccccagccccagccccaggcccagctgcctttggctttgatctcaagtcaggctgaaggcagcgaagcctcggggcccaagcccctccccagccccctctcccggacagacgccttgcccagggtgtgtttgctgagtgtcttgactaccgtgacaccacgcatggccagagctagcgtccctactgcctcccgactcctcagtggaggaggagctgcggtccctctggtgtctgccatccccctccctccctgggcccggccctggacccgtcaggtgcctgtccccagccccaaccccactcatgccccgtcgtcctcccagacaaatgaaaccacgctgcgcttccgatgcccccgcttgccgtgtaatggttcagctaatcccatggcgagatgggggctcactccggaggaggagccaggcagcagggccttcctgaccaacagccagctctgtccttccccccaggaaacacatgttcatttgtgtgatcatgtatagacctcagaacggaagataggactgtatataattgtaataaataccagttgccactatttaa

SEQ ID NO: 21952 - DNA, 1393 bp, Homo sapiens
  source 1..1393: mol_type = unassigned DNA
gtcaggcctcagaaagatggcgtcctcggagcaggcagagcagccgagccagccaagctctactccaggaagtgaaaatgtgctgcctcgagagccgctgggctgacagatgaagagattgatatggccttccagcagtcgggcactgctgccgatgagccttcgtccttgggcccagccacacaggtggttcctgtccagccccctcacctcatatctcagccatacagtcccgcaggctcccgatggcgagattacggcgccctggccatcatcatggcaggcattgcatttggctttcaccagctctacaagaaatacctgctccccctcatcctgggcggccgagaggacagaaagcagctggagaggatggaggccggtctctctgagctgagtggcagcgtggcccagacagtgactcagttacagacgaccctcgcctccgtccaggagctgctgattcagcagcagcagaagatccaggagcttgcccacgagctggccgctgccaaggccaccacatccaccaactggatcctggagtcccagaatatcaacgaactcaagtccgaaattaactccttgaaagggcttcttttaaatcggaggcagttccctccatccccatcagccccgaagatcccctcctggcagatcccagtcaagtcaccgtcaccctccagccctgcggccgtgaaccaccacagcagcagcgacatctcacctgtcagcaacgagtccacgtcgtcctcgcctgggaaggagggccacagccccgagggctccacggtcacctaccacttgctgggcccccaggaggaaggcgagggggtggtggacgtcaagggccaggtgcggatggaggtgcaaggcgaggaggagaagagggaggacaaggaggacgaggaggatgaggaggatgatgatgtgagccatgtggacgaggaggactgcctgggggtgcagagggaggaccgccggggcggggatgggcagatcaacgagcaggtggagaagctgcggcggcccgagggcgccagcaacgagagtgagcgggactagggctgcgcctgctgcctccagccctgaggatggcatctagtgtgcccgtgcgtggccataccctgcctccctctctggccctgggagggcagcttggagcccaggtagggggcagagctgtcctcagctgcactgcggcctggtggcagtgtggggagtcacacttctgtccacctggcctcctctcgcctggccgccagccccagccccagccccagccccaggcccagctgcctttggctttgatctcaagtcaggctgaaggcagcgaagcctcggggcccaagcccctccccagccccctctcccggacagacgccttgcccag

SEQ ID NO: 21953 - DNA, 1479 bp, Homo sapiens
  source 1..1479: mol_type = unassigned DNA
gtcggtgccgagggcaggatggagaagctgcggctcctgggcctccgctaccaggagtacgtgactcgtcacccggccgccacggcccagctggagacagcagtgcggggcttcagttacctgctggcaggtcgattcgccgattcgcacgagctgtcagagctggtgtactctgcctctaacctgcttgtgctgctcaatgacgggatcctacggaaggagcttcggaaaaagttgcctgtgtcgctgtcccagcagaagctgctgacatggctgagcgtgctggagtgcgtggaggtgttcatggagatgggagctgccaaggtgtggggtgaagtgggccgctggcttgtcatcgccctcgtccagctggccaaggctgtactgcggatgctcctgctgctctggttcaaggctggcctccagacttcaccccctatcgttccactggacagagagacccaggcacagcccccggatggtgaccacagccctggcaaccatgagcagtcctacgtggggaagcggtcaaaccgggtggtgcgaaccctccagaacacgccgtccctgcactccaggcactggggagctccccagcagcgggagggacggcagcagcagcatcacgaggagctgagtgcgacccccacccccctggggctgcaggagaccatcgcagagtttttgtacattgcccggccgctgctgcacttgctcagcctgggcctgtggggtcagaggtcgtggaaaccctggctcttggctggtgttgtggacgtgaccagcctgagcctcctgagtgacagaaagggcctgacccggagggagcggcgggagctgcggcgccggaccatcctgctgctctactacctgctgcgctctcctttctatgaccgcttctccgaggccaggatcctcttcctgctccagttgctggccgaccacgtccctggcgttggcctggtcacaacgtcccagcgtgcggcctctccgtgcctaccggccaggccccacacacagccctggtcgccaccagcgttcctcccaggacacccttgactgcgctctcctgtgacgatgccactgcagcccgcaccttgtcactgctgggccaagaagccttcactaggagtgggatccaggctcctctcccacagaaagcggtgacttcacctcatggagcccgggaagctgctcgcctcggcagccataggagcgaacactgctgctctctcgctggcccctggtgaggacaggaagcctgaacccgggtgatggctgaacgctgcccagcgtgtcttctggctggggccctccgtctgccccttctccgcagggccctgtggctctggcagccccaggccatggcgttgccagcctccctgtgacagagcctggtgaacagtgagcctggctcccacgcaagtggcactttaagccctgcatcctcggttgagagtaaaaggcttttctccctta

SEQ ID NO: 21954 - DNA, 1335 bp, Homo sapiens
  source 1..1335: mol_type = unassigned DNA
acttgagggagtagggggccgggtttgggccctcagttgctaagggctacccgagtgggaagcggttcaagagatggggtgaagggtggttcaccggttcttcaagtcctcagccttctggcccgcggaagttaagcaaccaagaggcgggcctaagaccggaagcaggaaggagggcgcaggaagcagggcgccgcagcctgtcgtacggtccttctgtgggtctgtcggtgccgagggcaggatggagaagctgcggctcctgggcctccgctaccaggagtacgtgactcgtcacccggccgccacggcccagctggagacagcagtgcggggcttcagttacctgctggcaggtcgattcgccgattcgcacgagctgtcagagctggtgtactctgcctctaacctgcttgtgctgctcaatgacgggatcctacggaaggagcttcggaaaaagttgcctgtgtcgctgtcccagcagaagctgctgacatggctgagcgtgctggagtgcgtggaggtgttcatggagatgggagctgccaaggtgtggggtgaagtgggccgctggcttgtcatcgccctcgtccagctggccaaggctgtactgcggatgctcctgctgctctggttcaaggctggcctccagacttcaccccctatcgttccactggacagagagacccaggcacagcccccggatggtgaccacagccctggcaaccatgagcagtcctacgtggggaagcggtcaaaccgggtggtgcgaaccctccagaacacgccgtccctgcactccaggcactggggagctccccagcagcgggagggacggcagcagcagcatcacgaggagctgagtgcgacccccacccccctggggctgcaggagaccatcgcagagtttttgtacattgcccggccgctgctgcacttgctcagcctgggcctgtggggtcagaggtcgtggaaaccctggctcttggctggtgttgtggacgtgaccagcctgagcctcctgagtgacagaaagggcctgacccggagggagcggcgggagctgcggcgccggaccatcctgctgctctactacctgctgcgctctcctttctatgaccgcttctccgaggccaggatcctcttcctgctccagttgctggccgaccacgtccctggcgttggcctggtcacaaggccgctcatggattacttgcccacctggcagaaaatctacttctacagttggggctgacagacctcccggaaggagggtgtggggaggggtggggcagggagcccctcttccctaataaaactgactccggcagcgtc

SEQ ID NO: 21955 - DNA, 3661 bp, Homo sapiens
  source 1..3661: mol_type = unassigned DNA
acggcaagtcggaggtagcaagatggccgccgctgaggaaggctgtagtgtcggggccgaagcggacagggaattggaggagcttctggaaagtgctcttgatgatttcgataaagccaaaccctccccagcacccccttctaccaccacggcccctgatgcttcggggccccagaagagatcgccaggagacactgccaaagatgccctcttcgcttcccaagagaagtttttccaggaactattcgacagtgaactggcttcccaagccactgcggagttcgagaaggcaatgaaggagttggctgaggaagaaccccacctggtggagcagttccaaaagctctcagaggctgcagggagagtgggcagtgatatgacctcccaacaagaattcacttcttgcctaaaggaaacactaagtggattagccaaaaatgccactgaccttcagaactccagcatgtcggaagaagagctgaccaaggccatggaggggctaggcatggacgaaggggatggggaagggaacatcctccccatcatgcagagtattatgcagaacctactctccaaggatgtgctgtacccatcactgaaggagatcacagaaaagtatccagaatggttgcagagtcatcgggaatctctacctccagagcagtttgaaaaatatcaggagcagcacagcgtcatgtgcaaaatatgtgagcagtttgaggcagagacccccacagacagtgaaaccactcaaaaggctcgttttgagatggtgctggatcttatgcagcagctacaagatttaggccatcctccaaaagagctggctggagagatgcctcctggcctcaactttgacctggatgccctcaatctttcgggcccaccaggtgccagtggtgaacagtgtctgatcatgtgaaacacaacacgttttcctctctgagtcccagctatggggaacatctggagtcagcagaaccattgggacctgaggcaggagtgtcacctgcgggagaagtctgcccgctgccctctgtcatcccattcaagattgtgccataccagctgaggtttttcctctgtctctctaggaatagggtctgtttcacaggccatttctgtgaaccctactccattgtggtttctgccactatcaaagttccagctacctgcaaggtgaaggaaggcatcccttttggggcatgcactttctttcctttctcaaaataatgttatatgtggccacactgatgttcacctttacgtccagggtctttgtgccttgtctctactccctctcttggatctggggaggaggggcagagacctgggactctgtatttctatagttctcctggcagagcctttgagaatggggagaaacagcctgggctggggctacaggtctgtcactatgctctcttgccttcagacagaccattctgaattctctaaagggaaagggcttttgcatctaatcacaatagagttgaaagagaggccttaggattctcctctctctaggtgctgagccctcacctccctgttccaggctgagaactcaaatggttaccctgcttcttcctacaatgctgtgtgatatgggtgaacccagcccctgaccttcctctatcccctgcccatcctcccttttacctcctctcttttttaaacacctgtttatcccaacctttttgagctcaagctgtgataaagaagggcccatcctatttcccctcatctagtccatttacgattctcactgactccccgtcttcctggcagacacaaataaacccagtgtcaggtctaggaaattaatggctattcttccccagatacattctggcttatttgagatacatgattctcttagaatcctgtcccttggttcaggaaagtagcttggaaaaggagtaggggtatagcttgggtcccttttcctgcaaggccccatggggcagaatataataaatattctgagtgaggagtgtggtctttttctgatcttcctcagcttccgtaagttgcagagtgaggtatattaggagactagttctacacaatattgtaatgctgggttccatcaacacccaccttccacaactcagtctgcacctcagttggcaaaggagactggatggccatctttcctcatgttcccttgagtatttcaatgtagaaagcccttcaagtggtattatattttaaccttttacattattgttattaatgttagtaatatattgttatgttttctaaattatttttctttaagctgacgtggctttttttctgtggctcccagtgggtctacggaccttggctgacatatgttggtaggtactctggtcagctcagctggctgtcctggttcactcagaagataagtctctccaaagcaaattcacatgcattatgagtcgctttgagcttctgacatgtcacttgccccgaggttaaaacttttcaccccttgaagaccttacatgttttatggtattggtgaggaaggaaatgttctcaaggtctcaggctatttgggaaattccaactcctataccttaccagagcatggaagagcccagatctgaatgtaaaacgtctctgttctgccagagatggaaaaaatacaggtatacttgtgatatagtcatggggcttcagtgtcactattttctccttaaagctccagccaaaaactggacaaggatagagaggaggagggaagaacaaaagagcccttctctatgaaccttgtgccttctgtcctaccagttttcttttacagattctcacttctgctagcctagccagggcttactccaggaatctaaatagatgccctagtccactttatctttgttcccaaggcactcatttttattttgattttgattgaatgtgagcaggttgacctcaggtcacactttgttccaaaaacttttggaattattccaggacttgtggtggagttatggtactctagggcagtctttctcaaactatgtatggtaaaggaccaggttttttgttttccagtccttcacttatcaatatgcattcctattgcccatgacaggtatggagttcacactgtgtgctgccgacccggcaagtttgacagcacccaaactggccagactgttctgtaggttaagtccattgatcatgtacttggatatcacagcaacattgaaatgctaaaaagtttttaaacactctcaatttctaattcaccatgtcacagactggtgaaaaaaaaaaaaaggtgttcactgaccagcacaagtctgcagatcatctttgagtagcactgttttggggccctcggtctctctgaagaccctagcagaactgatacctacctgtatctcttgttctctcctatttgagtttcacttccagagaacttgttcttcagcaagaatgtgtcactagtaaggacatctctagcatttctctagccttccttttctgctgctcaaaaataatcgttacaaagcttaggtttaagctgtatatgaaatatttatgcgactctcaaactttaaaggagttgctcctttgttccaaaattaaatgtgttagataaatttgtgattgtatgggtggcttcatgaattaagaattgaattaatacagactttttgataat

SEQ ID NO: 21956 - DNA, 796 bp, Homo sapiens
  source 1..796: mol_type = unassigned DNA
ttatctgcagagatcaggccaaagggagctctagaaggttgttggggagcactaaactggagaataagagaagatagtttaatgccgtaccatggagtctggtgctcttgatgatttcgataaagccaaaccctccccagcacccccttctaccaccacggcccctgatgcttcggggccccagaagagatcgccaggagacactgccaaagatgccctcttcgcttcccaagagaagtttttccaggaactattcgacagtgaactggcttcccaagccactgcggagttcgagaaggcaatgaaggagttggctgaggaagaaccccacctggtggagcagttccaaaagctctcagaggctgcagggagagtgggcagtgatatgacctcccaacaagaattcacttcttgcctaaaggaaacactaagtggattagccaaaaatgccactgaccttcagaactccagcatgtcggaagaagagctgaccaaggccatggaggggctaggcatggacgaaggggatggggaagggaacatcctccccatcatgcagagtattatgcagaacctactctccaaggatgtgctgtacccatcactgaaggagatcacagaaaagtatccagaatggttgcagagtcatcgggaatctctacctccagagcagtttgaaaaatatcaggagcagcacagcgtcatgtgcaaaatatgtgagcagtttgaggcagagacccccacagacagtgaaaccactcaaaaggctcgttttgagatggtgctggatcttatg

SEQ ID NO: 21957 - DNA, 1910 bp, Homo sapiens
  source 1..1910: mol_type = unassigned DNA
atggagtctggtgctcttgatgatttcgataaagccaaaccctccccagcacccccttctaccaccacggcccctgatgcttcggggccccagaagagatcgccaggagacactgccaaagatgccctcttcgcttcccaagagaagtttttccaggaactattcgacagtgaactggcttcccaagccactgcggagttcgagaaggcaatgaaggagttggctgaggaagaaccccacctggtggagcagttccaaaagctctcagaggctgcagggagagtgggcagtgatatgacctcccaacaagaattcacttcttgcctaaaggaaacactaagtggattagccaaaaatgccactgaccttcagaactccagcatgtcggaagaagagctgaccaaggccatggaggggctaggcatggacgaaggggatggggaagggaacatcctccccatcatgcagagtattatgcagaacctactctccaaggatgtgctgtacccatcactgaaggagatcacagaaaagtatccagaatggttgcagagtcatcgggaatctctacctccagagcagtttgaaaaatatcaggagcagcacagcgtcatgtgcaaaatatgtgagcagtttgaggcagagacccccacagacagtgaaaccactcaaaaggctcgttttgagatggtgctggatcttatgcagcagctacaagatttaggccatcctccaaaagagctggctggagagatgcctcctggcctcaactttgacctggatgccctcaatctttcgggcccaccaggtgccagtggtgaacagtgtctgatcatgtgaaacacaacacgttttcctctctgagtcccagctatggggaacatctggagtcagcagaaccattgggacctgaggcaggagtgtcacctgcgggagaagtctgcccgctgccctctgtcatcccattcaagattgtgccataccagctgaggtttttcctctgtctctctaggaatagggtctgtttcacaggccatttctgtgaaccctactccattgtggtttctgccactatcaaagttccagctacctgcaaggtgaaggaaggcatcccttttggggcatgcactttctttcctttctcaaaataatgttatatgtggccacactgatgttcacctttacgtccagggtctttgtgccttgtctctactccctctcttggatctggggaggaggggcagagacctgggactctgtatttctatagttctcctggcagagcctttgagaatggggagaaacagcctgggctggggctacaggtctgtcactatgctctcttgccttcagacagaccattctgaattctctaaagggaaagggcttttgcatctaatcacaatagagttgaaagagaggccttaggattctcctctctctaggtgctgagccctcacctccctgttccaggctgagaactcaaatggttaccctgcttcttcctacaatgctgtgtgatatgggtgaacccagcccctgaccttcctctatcccctgcccatcctcccttttacctcctctcttttttaaacacctgtttatcccaacctttttgagctcaagctgtgataaagaagggcccatcctatttcccctcatctagtccatttacgattctcactgactccccgtcttcctggcagacacaaataaacccagtgtcaggtctaggaaattaatggctattcttccccagatacattctggcttatttgagatacatgattctcttagaatcctgtcccttggttcaggaaagtagcttggaaaaggagtaggggtatagcttgggtcccttttcctgcaaggccccatggggcagaatataataaatattctgagtgagg

SEQ ID NO: 21958 - DNA, 1972 bp, Homo sapiens
  source 1..1972: mol_type = unassigned DNA
agatggccgccgctgaggaaggctgtagtgtcggggccgaagcggacagggaattggaggagcttctggaaagtgctcttgatgatttcgataaagccaaaccctccccagcacccccttctaccaccacggcccctgatgcttcggggccccagaagagatcgccaggagacactgccaaagatgccctcttcgcttcccaagagaagtttttccaggaactattcgacagtgaactggcttcccaagccactgcggagttcgagaaggcaatgaaggagttggctgaggaagaaccccacctggtggagcagttccaaaagctctcagaggctgcagggagagtgggcagtgatatgacctcccaacaagaattcacttcttgcctaaaggaaacactaagtggattagccaaaaatgccactgaccttcagaactccagcatgtcggaagaagagctgaccaaggccatggaggggctaggcatggacgaaggggatggggaagggaacatcctccccatcatgcagagtattatgcagaacctactctccaaggatgtgctgtacccatcactgaaggagatcacagaaaagtatccagaatggttgcagagtcatcgggaatctctacctccagagcagtttgaaaaatatcaggagcagcacagcgtcatgtgcaaaatatgtgagcagtttgaggcagagacccccacagacagtgaaaccactcaaaaggctcgttttgagatggtgctggatcttatgcagcagctacaagatttaggccatcctccaaaagagctggctggagagatgcctcctggcctcaactttgacctggatgccctcaatctttcgggcccaccaggtgccagtggtgaacagtgtctgatcatgtgaaacacaacacgttttcctctctgagtcccagctatggggaacatctggagtcagcagaaccattgggacctgaggcaggagtgtcacctgcgggagaagtctgcccgctgccctctgtcatcccattcaagattgtgccataccagctgaggtttttcctctgtctctctaggaatagggtctgtttcacaggccatttctgtgaaccctactccattgtggtttctgccactatcaaagttccagctacctgcaaggtgaaggaaggcatcccttttggggcatgcactttctttcctttctcaaaataatgttatatgtggccacactgatgttcacctttacgtccagggtctttgtgccttgtctctactccctctcttggatctggggaggaggggcagagacctgggactctgtatttctatagttctcctggcagagcctttgagaatggggagaaacagcctgggctggggctacaggtctgtcactatgctctcttgccttcagacagaccattctgaattctctaaagggaaagggcttttgcatctaatcacaatagagttgaaagagaggccttaggattctcctctctctaggtgctgagccctcacctccctgttccaggctgagaactcaaatggttaccctgcttcttcctacaatgctgtgtgatatgggtgaacccagcccctgaccttcctctatcccctgcccatcctcccttttacctcctctcttttttaaacacctgtttatcccaacctttttgagctcaagctgtgataaagaagggcccatcctatttcccctcatctagtccatttacgattctcactgactccccgtcttcctggcagacacaaataaacccagtgtcaggtctaggaaattaatggctattcttccccagatacattctggcttatttgagatacatgattctcttagaatcctgtcccttggttcaggaaagtagcttggaaaaggagtaggggtatagcttgggtcccttttcctgcaaggccccatggggcagaatataataaatattctgagtgagg

SEQ ID NO: 21959 - DNA, 894 bp, Homo sapiens
  source 1..894: mol_type = unassigned DNA
acggcaagtcggaggtagcaagatggccgccgctgaggaaggctgtagtgtcggggccgaagcggacagggaattggaggagcttctggaaagtgctcttgatgatttcgataaagccaaaccctccccagcacccccttctaccaccacggcccctgatgcttcggggccccagaagagatcgccaggagacactgccaaagatgccctcttcgcttcccaagagaagtttttccaggaactattcgacagtgaactggcttcccaagccactgcggagttcgagaaggcaatgaaggagttggctgaggaagaaccccacctggtggagcagttccaaaagctctcagaggctgcagggagagtggaactccagcatgtcggaagaagagctgaccaaggccatggaggggctaggcatggacgaaggggatggggaagggaacatcctccccatcatgcagagtattatgcagaacctactctccaaggatgtgctgtacccatcactgaaggagatcacagaaaagtatccagaatggttgcagagtcatcgggaatctctacctccagagcagtttgaaaaatatcaggagcagcacagcgtcatgtgcaaaatatgtgagcagtttgaggcagagacccccacagacagtgaaaccactcaaaaggctcgttttgagatggtgctggatcttatgcagcagctacaagatttaggccatcctccaaaagagctggctggagagatgcctcctggcctcaactttgacctggatgccctcaatctttcgggcccaccaggtgccagtggtgaacagtgtctgatcatgtgaaacacaacacgttttcctctctgagtcccagctatggggaacatctggagtcagcaga

SEQ ID NO: 21960 - DNA, 4317 bp, Homo sapiens
  source 1..4317: mol_type = unassigned DNA
tgtcggcgttcgcggttgtttggccatccagtgccttcagcagcgccgctaaagcgcagttctcgttggtgtaactttttcttttttttttcagccacttccggctcctgcgtcgctccggaagcctgcgagttccggaagccttggtaatccagattcggctaggaaaagacaagctttccagagaatgtttcagagaaagttacgtggagcgtgggcgtttcgcagactcctaagtggtctggaacctaacctgcagtgtctctgagcttctggcaagtatgaggcaaggatttcacagaagaacttggagcaaaaattcccactgtcatagctataggctgtccagtcttgagggagctgcaggaacaggaaaaagagaccttcagagaagacatggcttccagaaaagagaatgcgaagagtgcaaacagagtgctaagaataagccagttggatgcacttgaactaaacaaggccctggagcagctagtttggtcccagtttactcagtgctttcatggatttaaacctgggctgttagctcgctttgagccagaggtgaaagcgtgcttatgggttttcttgtggagattcaccatctactccaaaaatgccacagtgggacagtcagttttgaatattaagtacaaaaatgatttttcccctaacctgagatatcagccacccagtaaaaatcaaaaaatctggtatgctgtttgtacaattggtggcaggtggttagaagaacgatgctatgatttgtttcgaaaccatcatttagcatcatttgggaaagtcaagcagtgtgtgaattttgtgattggacttttgaaattaggtgggctgattaattttttgattttccttcagaggggaaagtttgcaactttgacagaacgtctcctaggtattcattctgtattttgcaagcctcaaaacatatgtgaagttggctttgaatacatgaatagggaacttctctggcatggttttgctgaatttctgatttttctcttaccacttatcaatgtccagaagttgaaagccaagctgtcttcatggtgtattcctcttactggtgcacctaatagtgacaatacattagccaccagtggcaaagaatgcgctctatgtggagagtggcccaccatgcctcacaccataggatgtgagcatattttctgttatttctgtgctaagagtagtttcttatttgacgtgtactttacttgtcctaagtgtggcacagaagtacacagtctgcagccactgaaatcaggaatcgagatgtcagaagtaaatgctctttagaaactaaaattgcttcctttgaggaaaaaaatgcaccgtgtttaaattcttaatattagtcatcctaagtataccatttatgtatcctttataaggaatgtgctcctagccactgtcttctcctttccaggcatgactgaaatctaatcactggaaaccatgtgattctaaatatattatgtaaatgttaatgtattatgttttttaaatcattgcattcaatttttaatgtcaagaataatggacagcttttgtcaggtgactactaacaatgctccttcattttactacttcttaaaacaaggttggattctaaagataaagattttggagactctgggatgagtgtgcatttattttcagagttgacataatatgataatgtgacaattatgagactgttttaaaccttaagacctgatgcctcagttgtaacttttttttttttttctgagacggtgtcctgctctgtcacccaggctggagtgcagtggcgcgatctctgctcactgcaacgtccgcctcccgggttcaagcaattctcctgcctcagcctcccgagtagctggcactgcaggtgcatgccaccatgcccgggtaatttttgtatttttagtagagatggggttcactgtgttagccaggatggtctctatctcctgatctggtgatccacctgcgtcagcctcccaaagtgctgagattacagacgtgagccactgtgcttggccgcctcagttgtaatgttatgcttttctctgaagccaatttttaagaagttcagtcctcagctgtctgacccctccacagttggctttatattcagaaagtaaaaattacttaaggcagcttggaagtgaggcctgggaactactgggggcaactagtatgaacagcactatttacaggtctctttctcttgcctttgattcagagctgtcattctcagtaaatattgatagttttattgaaacaaaaggggtctttagcatgggaatagtaacagcagtgcataatcaagataattctgtatccttcactctttttctctgcctttttttacttaaaagtaaattcagactcttaaaatggtatagaattattagcttgaacattgaattatctcgtcttaactagaatgttttttaaaaaacagtttttaaatgtttttaaataaacatcttgctagtatgatggaaatacactgccagttcatttttctcttcacctttcattgaacaagtactcaggtgccaggtactgatgtagccattagaggcacaacagtatattaagcaggaaaaatcaagttaccttcatggagtttacattctgtgattgaatgaactgtaagtttaatttaggttcaatttagtgtaagatactgaagaagttttgtagtttgagttaagagtattttacatcttaagaatttgccttcttttgccttctgtaattttaaaacattattgtagaaaacaccaacaattcaggaaaaaatataaaatcaactttcccacaattttttgagagagatcatcactatattttactatatttgtagatttgttgcacgtacatttcttatttacaaaattattataatgcataaaaaatagcattttttcctatgtataaatattcttcaaaactattttagggctgagcacaatggctcatgcctgtaatcccaggctccctacttagggaggctgagcccaggagtttgagttcgtttctaaaaaaataaaaatatatacaaacgtctttgttttttgtttgtttgtttgtttttggtgagaaagggcctcacccagtcacccaggttggagtgcagtggtgtgatcatggctaaccgcagcctttccctcccagggctcaagcgatcctcccatctgagcctcccaagttgctgggaccacaggcccataccaccatgcctggctaatttttgtagagatgaggtctcactttgttgcccaggctggtcttgaacttctgggctcaagcagtcctcctaccctggcctcccaaagttgtgggattacaggcatgagccactgcacccagccataatatatttttaaaatgctatgtatatgccatcatattcctattcctattattatttaaccaccatcatagagcatttaggttcttttcactttctgttgtgaataatgcaatgttgaatctgagttcattaagtgaagagtccagctgcacactgcaggcccagtctggatgtaggtgctcagatggttctctttgagacaggctttatcctttggctctcatttttttgatgagtgtacatggcatgagggacacagattccgctagaattcaaatcccacttgtgtataacctagggcaatgtgccacatctctgcacatctgttcattgtaaggattacatgtttagtgtatataaagctcttaaaacaatgcctgacacatagtaaatagaatataatagtagtgctttcctttgctgttgtcagtattactctgagtcggtttcattctcacacagaatgatggccgctagaagctcaaggcttataatctgctagctttctgatcccactggcatgagatactcttgcctaatagttacagctaaagtccaggagctcactgttactggtctgccttggattatgtgcacattcctgaaccagccactatagctaggggatggaaaatactgttcctggttacttaaatgtaggtgatgctcctcccatataccacatgaacctaaaggagtcctggaggaggccgttcaccacaggaaactgaggtgttcttagaagggtggatgctggcagatctctactagttagagtctacatttgccttactcatttcaaaagtccacattgcagtctcattttaccagtgatctagcttgataaggacattcataagtaactggatgattctttaacattgcagatttgaaaggattaaataaagtcaacaaaattgttatatcaa

SEQ ID NO: 21961 - DNA, 4386 bp, Homo sapiens
  source 1..4386: mol_type = unassigned DNA
ggaggtaagaactaagacgttcttaaaccctactacgtgctggaatcctgaagtgcctgccatcattcaaacttaagcactaactctctagagagacactgccattcataccacagaacgagaaggcagtggcgatcctcaacggctacatgtcactgcctgccacttccggctcctgcgtcgctccggaagcctgcgagttccggaagccttggtaatccagattcggctaggaaaagacaagctttccagagaatgtttcagagaaagttacgtggagcgtgggcgtttcgcagactcctaaggtcagtgtctgccctagagagccgtgtatgtagcttctggcaagtatgaggcaaggatttcacagaagaacttggagcaaaaattcccactgtcatagctataggctgtccagtcttgagggagctgcaggaacaggaaaaagagaccttcagagaagacatggcttccagaaaagagaatgcgaagagtgcaaacagagtgctaagaataagccagttggatgcacttgaactaaacaaggccctggagcagctagtttggtcccagtttactcagtgctttcatggatttaaacctgggctgttagctcgctttgagccagaggtgaaagcgtgcttatgggttttcttgtggagattcaccatctactccaaaaatgccacagtgggacagtcagttttgaatattaagtacaaaaatgatttttcccctaacctgagatatcagccacccagtaaaaatcaaaaaatctggtatgctgtttgtacaattggtggcaggtggttagaagaacgatgctatgatttgtttcgaaaccatcatttagcatcatttgggaaagtcaagcagtgtgtgaattttgtgattggacttttgaaattaggtgggctgattaattttttgattttccttcagaggggaaagtttgcaactttgacagaacgtctcctaggtattcattctgtattttgcaagcctcaaaacatatgtgaagttggctttgaatacatgaatagggaacttctctggcatggttttgctgaatttctgatttttctcttaccacttatcaatgtccagaagttgaaagccaagctgtcttcatggtgtattcctcttactggtgcacctaatagtgacaatacattagccaccagtggcaaagaatgcgctctatgtggagagtggcccaccatgcctcacaccataggatgtgagcatattttctgttatttctgtgctaagagtagtttcttatttgacgtgtactttacttgtcctaagtgtggcacagaagtacacagtctgcagccactgaaatcaggaatcgagatgtcagaagtaaatgctctttagaaactaaaattgcttcctttgaggaaaaaaatgcaccgtgtttaaattcttaatattagtcatcctaagtataccatttatgtatcctttataaggaatgtgctcctagccactgtcttctcctttccaggcatgactgaaatctaatcactggaaaccatgtgattctaaatatattatgtaaatgttaatgtattatgttttttaaatcattgcattcaatttttaatgtcaagaataatggacagcttttgtcaggtgactactaacaatgctccttcattttactacttcttaaaacaaggttggattctaaagataaagattttggagactctgggatgagtgtgcatttattttcagagttgacataatatgataatgtgacaattatgagactgttttaaaccttaagacctgatgcctcagttgtaacttttttttttttttctgagacggtgtcctgctctgtcacccaggctggagtgcagtggcgcgatctctgctcactgcaacgtccgcctcccgggttcaagcaattctcctgcctcagcctcccgagtagctggcactgcaggtgcatgccaccatgcccgggtaatttttgtatttttagtagagatggggttcactgtgttagccaggatggtctctatctcctgatctggtgatccacctgcgtcagcctcccaaagtgctgagattacagacgtgagccactgtgcttggccgcctcagttgtaatgttatgcttttctctgaagccaatttttaagaagttcagtcctcagctgtctgacccctccacagttggctttatattcagaaagtaaaaattacttaaggcagcttggaagtgaggcctgggaactactgggggcaactagtatgaacagcactatttacaggtctctttctcttgcctttgattcagagctgtcattctcagtaaatattgatagttttattgaaacaaaaggggtctttagcatgggaatagtaacagcagtgcataatcaagataattctgtatccttcactctttttctctgcctttttttacttaaaagtaaattcagactcttaaaatggtatagaattattagcttgaacattgaattatctcgtcttaactagaatgttttttaaaaaacagtttttaaatgtttttaaataaacatcttgctagtatgatggaaatacactgccagttcatttttctcttcacctttcattgaacaagtactcaggtgccaggtactgatgtagccattagaggcacaacagtatattaagcaggaaaaatcaagttaccttcatggagtttacattctgtgattgaatgaactgtaagtttaatttaggttcaatttagtgtaagatactgaagaagttttgtagtttgagttaagagtattttacatcttaagaatttgccttcttttgccttctgtaattttaaaacattattgtagaaaacaccaacaattcaggaaaaaatataaaatcaactttcccacaattttttgagagagatcatcactatattttactatatttgtagatttgttgcacgtacatttcttatttacaaaattattataatgcataaaaaatagcattttttcctatgtataaatattcttcaaaactattttagggctgagcacaatggctcatgcctgtaatcccaggctccctacttagggaggctgagcccaggagtttgagttcgtttctaaaaaaataaaaatatatacaaacgtctttgttttttgtttgtttgtttgtttttggtgagaaagggcctcacccagtcacccaggttggagtgcagtggtgtgatcatggctaaccgcagcctttccctcccagggctcaagcgatcctcccatctgagcctcccaagttgctgggaccacaggcccataccaccatgcctggctaatttttgtagagatgaggtctcactttgttgcccaggctggtcttgaacttctgggctcaagcagtcctcctaccctggcctcccaaagttgtgggattacaggcatgagccactgcacccagccataatatatttttaaaatgctatgtatatgccatcatattcctattcctattattatttaaccaccatcatagagcatttaggttcttttcactttctgttgtgaataatgcaatgttgaatctgagttcattaagtgaagagtccagctgcacactgcaggcccagtctggatgtaggtgctcagatggttctctttgagacaggctttatcctttggctctcatttttttgatgagtgtacatggcatgagggacacagattccgctagaattcaaatcccacttgtgtataacctagggcaatgtgccacatctctgcacatctgttcattgtaaggattacatgtttagtgtatataaagctcttaaaacaatgcctgacacatagtaaatagaatataatagtagtgctttcctttgctgttgtcagtattactctgagtcggtttcattctcacacagaatgatggccgctagaagctcaaggcttataatctgctagctttctgatcccactggcatgagatactcttgcctaatagttacagctaaagtccaggagctcactgttactggtctgccttggattatgtgcacattcctgaaccagccactatagctaggggatggaaaatactgttcctggttacttaaatgtaggtgatgctcctcccatataccacatgaacctaaaggagtcctggaggaggccgttcaccacaggaaactgaggtgttcttagaagggtggatgctggcagatctctactagttagagtctacatttgccttactcatttcaaaagtccacattgcagtctcattttaccagtgatctagcttgataaggacattcataagtaactggatgattctttaacattgcagatttgaaaggattaaataaagtcaacaaaattgttatatcaa

SEQ ID NO: 21962 - DNA, 700 bp, Homo sapiens
  source 1..700: mol_type = unassigned DNA
ggcagtgtggagaatgcactgaaggaggcagaagcttctggcaagtatgaggcaaggatttcacagaagaacttggagcaaaaattcccactgtcatagctataggctgtccagtcttgagggagctgcaggaacaggaaaaagagaccttcagagaagacatggcttccagaaaagagaatgcgaagagtgcaaacagagtgctaagaataagccagttggatgcacttgaactaaacaaggccctggagcagctagtttggtcccagtttactcagtgctttcatggatttaaacctgggctgttagctcgctttgagccagaggtgaaagcgtgcttatgggttttcttgtggagattcaccatctactccaaaaatgccacagtgggacagtcagttttgaatattaagtacaaaaatgatttttcccctaacctgagatatcagccacccagtaaaaatcaaaaaatctggtatgctgtttgtacaattggtggcaggtggttagaagaacgatgctatgatttgtttcgaaaccatcatttagcatcatttgggaaagtcaagcagtgtgtgaattttgtgattggacttttgaaattaggtgggctgattaattttttgattttccttcagaggggaaagtttgcaactttgacagaacgtctcctaggtattcattctgtattttgcaagcc

SEQ ID NO: 21963 - DNA, 473 bp, Homo sapiens
  source 1..473: mol_type = unassigned DNA
ggaggtaagaactaagacgttcttaaaccctactacgtgctggaatcctgaagtgcctgccatcattcaaacttaagcactaactctctagagagacactgccattcataccacagaacgagaaggcagtggcgatcctcaacggctacatgtcactgcctgccacttccggctcctgcgtcgctccggaagcctgcgagttccggaagccttggtaatccagattcggctaggaaaagacaagctttccagagaatgtttcagagaaagttacgtggagcgtgggcgtttcgcagactcctaagtggtctggaacctaacctgcagtgtctctgagcttctggcaagtatgaggcaaggatttcacagaagaacttggagcaaaaattcccactgtcatagctataggctgtccagtcttgagggagctgcaggaacaggaaaaagagaccttcagagaagacatggcttcc

SEQ ID NO: 21964 - DNA, 1470 bp, Homo sapiens
  source 1..1470: mol_type = unassigned DNA
actgccattcataccacagaacgagaaggcagtggcgatcctcaacggctacatgtcactgcctgccacttccggctcctgcgtcgctccggaagcctgcgagttccggaagccttggtaatccagattcggctaggaaaagacaagctttccagagaatgtttcagagaaagttacgtggagcgtgggcgtttcgcagactcctaagagaccttcagagaagacatggcttccagaaaagagaatgcgaagagtgcaaacagagtgctaagaataagccagttggatgcacttgaactaaacaaggccctggagcagctagtttggtcccagtttactcagtgctttcatggatttaaacctgggctgttagctcgctttgagccagaggtgaaagcgtgcttatgggttttcttgtggagattcaccatctactccaaaaatgccacagtgggacagtcagttttgaatattaagtacaaaaatgatttttcccctaacctgagatatcagccacccagtaaaaatcaaaaaatctggtatgctgtttgtacaattggtggcaggtggttagaagaacgatgctatgatttgtttcgaaaccatcatttagcatcatttgggaaagtcaagcagtgtgtgaattttgtgattggacttttgaaattaggtgggctgattaattttttgattttccttcagaggggaaagtttgcaactttgacagaacgtctcctaggtattcattctgtattttgcaagcctcaaaacatatgtgaagttggctttgaatacatgaatagggaacttctctggcatggttttgctgaatttctgatttttctcttaccacttatcaatgtccagaagttgaaagccaagctgtcttcatggtgtattcctcttactggtgcacctaatagtgacaatacattagccaccagtggcaaagaatgcgctctatgtggagagtggcccaccatgcctcacaccataggatgtgagcatattttctgttatttctgtgctaagagtagtttcttatttgacgtgtactttacttgtcctaagtgtggcacagaagtacacagtctgcagccactgaaatcaggaatcgagatgtcagaagtaaatgctctttagaaactaaaattgcttcctttgaggaaaaaaatgcaccgtgtttaaattcttaatattagtcatcctaagtataccatttatgtatcctttataaggaatgtgctcctagccactgtcttctcctttccaggcatgactgaaatctaatcactggaaaccatgtgattctaaatatattatgtaaatgttaatgtattatgttttttaaatcattgcattcaatttttaatgtcaagaataatggacagcttttgtcaggtgactactaacaatgctccttcattttactacttcttaaaacaaggttggattctaaagataaagatt

SEQ ID NO: 21965 - DNA, 1627 bp, Homo sapiens
  source 1..1627: mol_type = unassigned DNA
gggtgtccgcttcggcttttcggcccttcggctcttcggcttgtcggcgttcgcggttgtttggccatccagtgccttcagcagcgccgctaaagcgcagttctcgttggtgtaactttttcttttttttttcagccacttccggctcctgcgtcgctccggaagcctgcgagttccggaagccttggtaatccagattcggctaggaaaagacaagctttccagagaatgtttcagagaaagttacgtggagcgtgggcgtttcgcagactcctaagcttctggcaagtatgaggcaaggatttcacagaagaacttggagcaaaaattcccactgtcatagctataggctgtccagtcttgagggagctgcaggaacaggaaaaagagaccttcagagaagacatggcttccagaaaagagaatgcgaagagtgcaaacagagtgctaagaataagccagttggatgcacttgaactaaacaaggccctggagcagctagtttggtcccagtttactcagtgctttcatggatttaaacctgggctgttagctcgctttgagccagaggtgaaagcgtgcttatgggttttcttgtggagattcaccatctactccaaaaatgccacagtgggacagtcagttttgaatattaagtacaaaaatgatttttcccctaacctgagatatcagccacccagtaaaaatcaaaaaatctggtatgctgtttgtacaattggtggcaggtggttagaagaacgatgctatgatttgtttcgaaaccatcatttagcatcatttgggaaagtcaagcagtgtgtgaattttgtgattggacttttgaaattaggtgggctgattaattttttgattttccttcagaggggaaagtttgcaactttgacagaacgtctcctaggtattcattctgtattttgcaagcctcaaaacatatgtgaagttggctttgaatacatgaatagggaacttctctggcatggttttgctgaatttctgatttttctcttaccacttatcaatgtccagaagttgaaagccaagctgtcttcatggtgtattcctcttactggtgcacctaatagtgacaatacattagccaccagtggcaaagaatgcgctctatgtggagagtggcccaccatgcctcacaccataggatgtgagcatattttctgttatttctgtgctaagagtagtttcttatttgacgtgtactttacttgtcctaagtgtggcacagaagtacacagtctgcagccactgaaatcaggaatcgagatgtcagaagtaaatgctctttagaaactaaaattgcttcctttgaggaaaaaaatgcaccgtgtttaaattcttaatattagtcatcctaagtataccatttatgtatcctttataaggaatgtgctcctagccactgtcttctcctttccaggcatgactgaaatctaatcactggaaaccatgtgattctaaatatattatgtaaatgttaatgtattatgttttttaaatcattgcattcaatttttaatgtcaagaataatggacagcttttgtcaggtgactactaacaatgctccttcattttactacttcttaaaacaag

SEQ ID NO: 21966 - DNA, 4519 bp, Homo sapiens
  source 1..4519: mol_type = unassigned DNA
acagaaggcgatgggccgagagctgaggaactacaactcctagagtactccgcgccgccgggacgccgcgcggctgcggggctgggcgagcgcaaagatgtccgcgcccgctgccgggaggcgaggccaactcgggatatcccggagcctctggggaggcggtcactccgacgtctgaggacctgggccttggacccggactcgttatgaagagcgattcttcgacctctgcagcccccctcagggggctcgggggacccctgcgcagcagcgagccggtgcgcgcggtcccggcccgggcgccggccgtggaccttctggaggaggcggccgacctcctggtggtgcacctggacttccgggcggcgctggagacctgcgagcgggcctggcagagtctggccaaccacgccgtggcagaggaacccgcgggcacctcattggaggtgaagtgctccctgtgtgttgtggggatccaggccctggcagaaatggatcggtggcaagaagtcctctcctgggtccttcagtattaccaggtccctgaaaagctaccccccaaagtcctggagctgtgcattcttttatacagcaaaatgcaagagcctggagctgtgctggatgtggtgggtgcctggctccaagacccagccaatcaaaaccttccagaatatggagccttggcagaatttcacgtgcagcgggtgctgctgcctctgggctgcttatcggaggctgaggagctagtggtgggctctgcagcctttggtgaggagcggcgactggatgtacttcaggccattcacacagcgaggcagcagcagaaacaggaacactcaggctctgaggaggcccagaagccaaacctggaaggctctgtctcccacaagttcctgtcactaccgatgttggttcgccagctttgggactctgcggtgagccacttcttttctctgcccttcaaaaagagtctcctggctgccttgatcctctgtctcctggtggtgagatttgatccagcttccccttcctccctgcacttcctctacaagctggcccagctcttccgctggatccggaaggctgcattttctcgcctctaccagctccgcatccgtgactgagggtccctgcgcaccacagcctctctgctcctcacgtccgtggccacagaagcagagcgacagagcgacacatccacaggcgcccctggggaaatgggaccagcctaatctcgcggagtgcactgtgtcttgctgcctgggtgccctctcctttgcaccctacttcggctggtcgcggtagatgatgtggaaacaaagcaggaccagcaggcacagcacctccagaacagtgccccggatgaccagaggccccttgaaaaggaggggtttggggacagggactgtgtccatgaaacattccatcttcttggtgaaggcaaggggttggttcttcaggtcaggatgttaatggagctggaagttcagaaaaagcctggtgaagtgacccttggcctttcacttcttgagaaacatacttctttgctgggcatggtgactcacgcctgtaatcccagcactttggaagggtgaggtgggtggatcacttgtggccaggagttcaaaacctgcctggccaacatggtgaaaccccatctctactaaaaatacaaaaattagctagatgtggtgcacgcctatagtcctagctacttgggaggctgaggcaggagaatcacttgagccagggaggcaaaagttgcagtgagctgagattgtgctaccgcactctctcaaaacaaacaaaaaaacatgccccacaggacagtaccttaattagctagagtagatctgagagggcctcttcttgcctgcactgtgctccccagagctgatctaattctgtatcaataggctgttcccatggtcttgccatgcgcttgaagctgcaggagccttctcactgttcaggctggggtgtggttttcagaaccaccgggttgactactgaaaaccaagtgagccttacagctcttatcgctgggtaaagtgatcttgcctggtgcctcttggtcttcagctcaattttccaggttgtcctggccaagtcttgctctgttacgctcagtgcctctgcccactctttccccgccagcccttccctcccgccctgcaaacttgtcccttggctgtttcaccaggttctgcctgtatccttgcctccttggtacacaccatttcaggttcttccctttctgtgtcccattgtcctagttatgttctgttgtttgtgtaatgcccaaatttttctgctcgtgtggccttgaaaagtaggccagcctcagaggctgctgagctgaaaatggaactgagtaatcaggtgagctggaagggatgtggggggcggggcagacgggagacatgggttttgaaggcagtgaacaataaaaccttagggaggtggcaccgaggccttagcatttgaggagctgaaatgtttcagtgttgttttctcaccagccacaagcatcttatgagtttctgtgcaaggaagcgtagagcactgctgtgctgtcaggatgaagaagggctttctgcaggggctggcctttctctacccagaggccaagcaggctgccctgcactgtgtccttggtgttgatgcccaaaatagagaaggtgcttgctagcttttccttggtacattttcgggggttgcaaggcaacaagttttcttttgttttgtttgtttgtttgtttgtttgtttttgagatggagtctctgtcacccaggctggagtgcagtggcgtgatctcagctcactgcaagctccgcctcccgggttcatgccattctcctgcctcagcctcccgagtagctgggactacaggtgcccaccacctcgcctggctaatatttttgtatttttagtagagtctgggtttcactgtgttagccgggatggtctcgatctcctgaacttgtgatccacccacctaggcctcccaaagtgctgggattacaggtgtgagccatcgcgcccggccaacttttctttagaaaaatgagtaaagtaggtaaacttcacaggccccttagaattaaatccttagggcatggttcaagtctgtaggaagcaaatctatacttttttatatgggcttttaagtaaagcttagaaccctggggggagaaaagcagtcaggtgaggtttgagattccttctatagaatgatttcttaaaatgaaaatctgggcccacttaactaccctagataaaacgcttcaatggcttcccatggctcactggataacatctaaattcttcatggaattgaaggcccctatgtgctggttttggctaagatctcccctttgatgtgggtcccctgttgattatatgtgcggccttccagctgcccaccatcacagctacagctcgctccccttggcctctgtgccttggctcgcactgttcctactgaaggcctagcacctgctcttggcctggtgagcccctccaccttccaggcttactcaaagaattctttctgcccctccctgtgtcccgggacctgtttcatatcgcttctgtggtcgtgaccccatggtcttgtaattgtgaacttctttgctgccccttcgaagctggggagtgcttgttgcagatgcatccaagaggggtaattgcgtatcaacagtggatttgctggttgtttctacagggttctgaagcatgcaacatagaacagatacctttaaatttaggggcgctaaggaaagcaggaaccagtaatcctcttctgtggtgggatgggagggtgggggagaggggtggaatggagaggaaacaggctattgttggccagccctgggtggaggtgggtgcaagcaggacagatagtgcctgggggtgggggcggagggttcgcctctaggaaggggctagaagggatgaggaaatagttcatagcttcgtgcaggtgatccctattctgcgtgtatgtgtttgcacatgagtgtttgtagaccatagaccattaaaaaatacggaattcaaaagttacaaaaagggtattcttggaaaagaaagttgtttttttttagtcttgctgtgttgcccaggctggacctgaactcctgggcttgagcaagtcttcccctcagcctctggagtagctgggcctacagtgtgtgctgccacacccagctaatacagtctttctactcccgctctctattccccagtttcttgcccagaggcaacccttgccagtctgtttatccctccagatacagtctctgatagtaaacttttctttctcttacacaaatgatagtagtcacatacactacacacactgtgccacgtttaaaaagaaaaaaaacaattctcggctgggcgcggtggcgcatgcctgtaatcccagcactttgggaggccaaggtgggtgaatcacctgaagtcaggagttcgagatcagcatggccaacatggtgaaaccccatctctact

SEQ ID NO: 21967 - DNA, 1672 bp, Homo sapiens
  source 1..1672: mol_type = unassigned DNA
gcgagcgcaaagatgtccgcgcccgctgccgggaggcgaggtgagtctttgatcgtaaccaggagcccggagctgaggcagttcctgcacgtgtcgcggggccggagaagctagggccaggtattccagggatgcaagaatcctgcaaatctgacgtgtaaactgcttccccagcctccaggcgagcccagcttttgcctcagataggccccttccttttccttctcggggaatcgacctcgggaaggggtgtgggcaaagagatgaggactctccctcttcgcccaggccaactcgggatatcccggagcctctggggaggcggtcactccgacgtctgaggacctgggccttggacccggactcgttatgaagagcgattcttcgacctctgcagcccccctcagggggctcgggggacccctgcgcagcagcgagccggtgcgcgcggtcccggcccgggcgccggccgtggaccttctggaggaggcggccgacctcctggtggtgcacctggacttccgggcggcgctggagacctgcgagcgggcctggcagagtctggccaaccacgccgtggcagaggaacccgcgggcacctcattggaggtgaagtgctccctgtgtgttgtggggatccaggccctggcagaaatggatcggtggcaagaagtcctctcctgggtccttcagtattaccaggtccctgaaaagctaccccccaaagtcctggagctgtgcattcttttatacagcaaaatgcaagagcctggagctgtgctggatgtggtgggtgcctggctccaagacccagccaatcaaaaccttccagaatatggagccttggcagaatttcacgtgcagcgggtgctgctgcctctgggctgcttatcggaggctgaggagctagtggtgggctctgcagcctttggtgaggagcggcgactggatgtacttcaggccattcacacagcgaggcagcagcagaaacaggaacactcaggctctgaggaggcccagaagccaaacctggaaggctctgtctcccacaagttcctgtcactaccgatgttggttcgccagctttgggactctgcggtgagccacttcttttctctgcccttcaaaaagagtctcctggctgccttgatcctctgtctcctggtggtgagatttgatccagcttccccttcctccctgcacttcctctacaagctggcccagctcttccgctggatccggaaggctgcattttctcgcctctaccagctccgcatccgtgactgagggtccctgcgcaccacagcctctctgctcctcacgtccgtggccacagaagcagagcgacagagcgacacatccacaggcgcccctggggaaatgggaccagcctaatctcgcggagtgcactgtgtcttgctgcctgggtgccctctcctttgcaccctacttcggctggtcgcggtagatgatgtggaaacaaagcaggaccagcaggcacagcacctccagaacagtgccccggatgaccagaggccccttgaaaaggaggggtttggggacagggactgtgtccatgaaacattccatcttcttggtgaaggcaaggggttggttcttcaggtcaggatgttaatggagctggaagttcagaaaaagcctggtgaagtga

SEQ ID NO: 21968 - DNA, 1098 bp, Homo sapiens
  source 1..1098: mol_type = unassigned DNA
atgaagagcgattcttcgacctctgcagcccccctcagggggctcgggggacccctgcgcagcagcgagccggtgcgcgcggtcccggcccgggcgccggccgtggaccttctggaggaggcggccgacctcctggtggtgcacctggacttccgggcggcgctggagacctgcgagcgggcctggcagagtctggccaaccacgccgtggcagaggaacccgcgggcacctcattggaggtgaagtgctccctgtgtgttgtggggatccaggccctggcagaaatggatcggtggcaagaagtcctctcctgggtccttcagtattaccaggtccctgaaaagctaccccccaaagtcctggagctgtgcattcttttatacagcaaaatgcaagagcctggagctgtgctggatgtggtgggtgcctggctccaagacccagccaatcaaaaccttccagaatatggagccttggcagaatttcacgtgcagcgggtgctgctgcctctgggctgcttatcggaggctgaggagctagtggtgggctctgcagcctttggtgaggagcggcgactggatgtacttcaggccattcacacagcgaggcagcagcagaaacaggaacactcaggctctgaggaggcccagaagccaaacctggaaggctctgtctcccacaagttcctgtcactaccgatgttggttcgccagctttgggactctgcggtgagccacttcttttctctgcccttcaaaaagagtctcctggctgccttgatcctctgtctcctggtggtgagatttgatccagcttccccttcctccctgcacttcctctacaagctggcccagctcttcgctggatccggaaggctgcattttctcgcctctaccagctccgcatccgtgactgagggtccctgcgcaccacagcctctctgctcctcacgtccgtggccacagaagcagagcgacagagcgacacatccacaggcgcccctggggaaatgggaccagcctaatctcgcggagtgcactgtgtcttgctgcctgggtgccctctcctttgcaccctacttcggctggtcgcggtag

SEQ ID NO: 21969 - DNA, 815 bp, Homo sapiens
  source 1..815: mol_type = unassigned DNA
atgaagagcgattcttcgacctctgcagcccccctcagggggctcgggggacccctgcgcagcagcgagccggtgcgcgcggtcccggcccgggcgccggccgtggaccttctggaggaggcggccgacctcctggtggtgcacctggacttccgggcggcgctggagacctgcgagcgggcctggcagagtctggccaaccacgccgtggcagaggaacccgcgggcacctcattggaggtgaagtgctccctgtgtgttgtggggatccaggccctggcagaaatggatcggtggcaagaagtcctctcctgggtccttcagtattaccaggtccctgaaaagctaccccccaaagtcctggagctgtgcattcttttatacagcaaaatgcaagagcctggagctgtgctggatgtggtgggtgcctggctccaagacccagccaatcaaaaccttccagaatatggagccttggcagaatttcacgtgcagcgggtgctgctgcctctgggctgcttatcggaggctgaggagctagtggtgggctctgcagcctttggtgaggagcggcgactggatgtacttcaggccattcacacagcgaggcagcagcagaaacaggaacactcaggctctgaggaggcccagaagccaaacctggaagcttccccttcctccctgcacttcctctacaagctggcccagctcttccgctggatccggaaggctgcattttctcgcctctaccagctccgcatccgtgactgagggtccctgcgcaccacagcctctctgctcctcacgtccgtggc

SEQ ID NO: 21970 - DNA, 2642 bp, Homo sapiens
  source 1..2642: mol_type = unassigned DNA
gaacggacctgggcttgtcggaccagtgagcggcggcggctgcgcggcggcagcggcagaaagcgtagctgctttgctgtagtccacgcccccttgccgctccggtgacagtctctgcggaaagtcacgtttgtgatttcgggagagcacagaacgggacgacggcgctcttgctgggtcatctgggccaggtgacgaagaaacagtttcctggtgaagcagtccctcacccctagtcagcccacacccctagggcctaaagatgctgaggtctgtatggaattttctgaaacgccacaaaaagaaatgcatcttcctgggcacggtccttggagtgctgtccatgcttccaacactgagagaggccttaatgcagcaactgaattccgagagcctcacagctctgctaaaaaacaggccttcaaacaagctagaaatatgggaggatctgaagataataagtttcacaagaagtactgtggctgtatacagtacctgtatgctggttgttcttttgcgggtccagttaaacataattggtggatatatttacctggataatgcagcagttggcaaaaatggcactacaattcttgctcccccagatgtccaacagcagtatttatcaagtattcagcacctacttggagatggcctgacagaattgatcactgtcattaaacaagctgtgcagaaggttttaggaagtgtttctcttaaacattctttgtcccttttggacttggagcaaaaactaaaagaaatcagaaatctcgttgagcagcataagtcttcttcttggattaataaagatggatccaaacctttattatgccattatatgatgccagatgaagaaactccattagcagtgcaggcctgtggactttctcctcgagacattaccactattaaacttctcaatgaaactagagacatgttggaaagcccagattttagtacagttttgaatacctgtttaaaccgaggttttagtagacttctagacaatatggctgagttctttcgacctactgaacaggacctgcaacatggtaactctatgaatagtctttccagtgtcagcctgcctttagctaagataattccaatagtaaacggacagatccattcagtttgcagtgaaacacctagtcattttgttcaggatctgttgacaatggagcaagtgaaagactttgctgctaatgtgtatgaagcttttagtacccctcagcaactggagaaatgatttttccttcaagaaaaactacagtgggattcatttactttttaaaatacactgggtaaatcacctatacttagagtaacagtttgttatcaaaatgcctgataaaatatattcttaataaaagtcttcatttcataatgaaatcaatttatttggcatcttaatatatttttttagattcatcaacagaccagtttttgtgggcatatatatatacacgtgcaaatatcagaattgttaataatttgttacacatggacatttgttccaaactgactaaaaatcaatatagatattttatatacatatatatatataaaaatacaaaattcagtgtactttaccatattaatactgaggaaaaatctgttggagacataggtctaggatgtgtgaagtttggaaaaatatgctatttaattataatgttccctagactgctgtaaacagaagtgaatcagacttttctccagctacctttcaaaataataaattatttgtctcaaatataccttgatggaggacttttttattcttatggaaatagtgaattccaacaactatgatgaactatgttctttgctatttcttcactatattttttaaggttttattaaaaagccttagaaagttacatattggtttagaggctaaaattgtgttgatgctgtttactcacctaattacatagttttaatcatttgtacataattttaaaaacttactttgtattgattttgaatacagtgaaaatcttattgcaataaactattttagtaaaatattattttgttgagttaatatttttcagctattaatttacttatcccatagcatttttgttattatttcggaagagagagcatgctagtttaagtttcattttaattggtcgtgtacttggtgcttttttgttgttgttaacttgttcatttagtaaaaagcaaatagctttactttctgaaaaagaaataattcattatctctagtaatacatctgtaattcttcatttagaagggtaattagggcaaaagtaaataaatcattatatatcattagtatgttgacatatattttcagtaacattgttttatgttcctccagcgtaacatgtagctgaacagtagaaggtagaaaataaattatgacatctcttctaaggcctggctaggcctgaagctcactgccagggagtttgtgtctagaatgtttttaaaaataggtagtggagccatagccctcaccatagacacctctgagcccactggcattgtctctgagcagaagatggctgtgccactcacatatgctaatcttggcaaatctgccaagcatgtcttcaccaagggatatggatttggcttaataaaacctgatttgaaaacaaaa

SEQ ID NO: 21971 - DNA, 1969 bp, Homo sapiens
  source 1..1969: mol_type = unassigned DNA
gaaacagtttcctggtgaagcagtccctcacccctagtcagcccacacccctagggcctaaagatgctgaggtctgtatggaattttctgaaacgccacaaaaagaaatgcatcttcctgggcacggtccttggaggagtatatattctggggaaatatggacagaagaaaatcagagaaatacaggaaagggaggctgcagaatacattgcccaagcacgacgacaatatcattttgaaagtaaccagaggacttgcaatatgacagtgctgtccatgcttccaacactgagagaggccttaatgcagcaactgaattccgagagcctcacagctctgctaaaaaacaggccttcaaacaagctagaaatatgggaggatctgaagataataagtttcacaagaagtactgtggctgtatacagtacctgtatgctggttgttcttttgcgggtccagttaaacataattggtggatatatttacctggataatgcagcagttggcaaaaatggcactacaattcttgctcccccagatgtccaacagcagtatttatcaagtattcagcacctacttggagatggcctgacagaattgatcactgtcattaaacaagctgtgcagaaggttttaggaagtgtttctcttaaacattctttgtcccttttggacttggagcaaaaactaaaagaaatcagaaatctcgttgagcagcataagtcttcttcttggattaataaagatggatccaaacctttattatgccattatatgatgccagatgaagaaactccattagcagtgcaggcctgtggactttctcctcgagacattaccactattaaacttctcaatgaaactagagacatgttggaaagcccagattttagtacagttttgaatacctgtttaaaccgaggttttagtagacttctagacaatatggctgagttctttcgacctactgaacaggacctgcaacatggtaactctatgaatagtctttccagtgtcagcctgcctttagctaagataattccaatagtaaacggacagatccattcagtttgcagtgaaacacctagtcattttgttcaggatctgttgacaatggagcaagtgaaagactttgctgctaatgtgtatgaagcttttagtacccctcagcaactggagaaatgatttttccttcaagaaaaactacagtgggattcatttactttttaaaatacactgggtaaatcacctatacttagagtaacagtttgttatcaaaatgcctgataaaatatattcttaataaaagtcttcatttcataatgaaatcaatttatttggcatcttaatatatttttttagattcatcaacagaccagtttttgtgggcatatatatatacacgtgcaaatatcagaattgttaataatttgttacacatggacatttgttccaaactgactaaaaatcaatatagatattttatatacatatatatatataaaaatacaaaattcagtgtactttaccatattaatactgaggaaaaatctgttggagacataggtctaggatgtgtgaagtttggaaaaatatgctatttaattataatgttccctagactgctgtaaacagaagtgaatcagacttttctccagctacctttcaaaataataaattatttgtctcaaatataccttgatggaggacttttttattcttatggaaatagtgaattccaacaactatgatgaactatgttctttgctatttcttcactatattttttaaggttttattaaaaagccttagaaagttacatattggtttagaggctaaaattgtgttgatgctgtttactcacctaattacatagttttaatcatttgtacataattttaaaaacttactttgtattgattttgaatacagtgaaaatcttattgcaataaactattttagtaaaata

SEQ ID NO: 21972 - DNA, 784 bp, Homo sapiens
  source 1..784: mol_type = unassigned DNA
tgagcggcggcggctgcgcggcggcagcggcagaaagcgtagctgctttgctgtagtccacgcccccttgccgctccggtgacagtctctgcggaaagtcacgtttgtgatttcgggagagcacagaacgggacgacggcgctcttgctgggtcatctgggccaggtgacgaagaaacagtttcctggtgaagcagtccctcacccctagtcagcccacacccctagggcctaaagatgctgaggtctgtatggaattttctgaaacgccacaaaaagaaatgcatcttcctgggcacggtccttggagtgctgtccatgcttccaacactgagagaggccttaatgcagcaactgaattccgagagcctcacagctctgctaaaaaacaggccttcaaacaagctagaaatatgggaggatctgaagataataagtttcacaagaagtactgtggctgtatacagtacctgtatgctggttgttcttttgcgggtccagttaaacataattggtggatatatttacctggataatgcagcagttggcaaaaatggcactacaattcttgctcccccagatgtccaacagcagtatttatcaagtattcagcacctacttggagatggcctgacagaattgatcactgtcattaaacaagctgtgcagaaggttttaggaagtgtttctcttaaacattctttgtcccttttggacttggagcaaaaactaaaagaaatcagaaatctcgttgagcagcataagtcttcttcttggattaataa

SEQ ID NO: 21973 - DNA, 3252 bp, Homo sapiens
  source 1..3252: mol_type = unassigned DNA
cttaaggccccgccttttcagacagcttccgctgggcctgggccgctgcggggcggtcacggcccctttaagcctgagccccgccccctggctccccgccccctcttctcccctcccccaagccagcacctggtgccccggcgggtcgtgcggcgcggcgctccgcgagagctggcggtcaccatggcaatgcgggagctggtggaggccgaatgcgggggtgccaacccgctcatgaagctcgccgggcacttcacccaggacaaggcccttcggcaggagggattgaggcctggcccctggccccccggagccccggcctctgaggcagcctccaagcctttgggagtagcttctgaagatgagttggtggctgaattcctgcaggaccagaatgcaccccttgtgtcccgtgcccctcagaccttcaagatggatgacctcctggctgagatgcagcagattgagcagtcaaacttccgccaggctccccagagagcccctggtgtggcagacttggccttgtctgagaactgggcccaggagtttcttgcagctggagatgctgtggatgtaactcaggattataatgagactgactggtcccaagaattcatctctgaagttacagaccccttgtctgtgtcccctgcccgctgggctgaggaatatttggagcaatcagaggagaagctgtggctgggagaacctgagggaacagccaccgatcgctggtatgatgaatatcatcctgaggaggatctgcagcacacggccagtgactttgtggccaaagtggatgaccccaaattggctaattctgagggtacatcagatgcctgggttgaccagttcacaagaccagtaaacacatctgcccttgatatggagtttgaacgagccaagtcagctatagagtctgatgtcgatttctgggacaagttgcaggcagagttggaggagatggcaaaacgggatgctgaggcccacccctggctttctgactatgatgaccttacgtcagctacctatgataaggggtaccagtttgaggaggagaaccccttgcgtgatcaccctcagccttttgaagaagggctgcggcgccttcaggagggggacctgccaaatgctgtgctgctttttgaggcagctgtgcagcaggatcctaagcacatggaagcttggcagtatctgggtaccacccaggcagagaatgaacaagaactattagccatcagtgcattgcggaggtgtctggagctaaagccagataaccagacagcactgatggcgctggctgtgagcttcaccaacgagtccctgcagcgacaggcctgtgaaaccctacgagactggctgcggtacacaccagcctatgcccatctggtgacacctgctgaagaaggggctggtggggcaggactgggccccagcaagcgtatcctgggatctctcttgtctgactccctgtttcttgaagtgaaagagctcttcctggcagctgtgcggctggaccctacctccattgaccctgatgtgcagtgtggcttgggagtccttttcaacctgagtggggagtatgacaaggccgtggactgcttcacagctgccctcagcgttcgtcccaatgactatttgctgtggaataagctaggcgccaccctggccaatggaaaccagagtgaagaagcagtagctgcgtaccgccgggccctcgagctccagcctggctatatccggtcccgctataacctgggcatcagctgcatcaacctcggggctcaccgggaggctgtggagcactttctggaggccctgaacatgcagaggaaaagccggggcccccggggtgaaggaggtgccatgtcggagaacatctggagcaccctgcgtttggcattgtctatgttaggccagagcgatgcctatggggcagccgacgcgcgggatctgtccaccctcctaactatgtttggcctgccccagtgacagtgggacgggctgccctgtgagtgtccacctggagggatccccgctttggatgtgattccctctccccaaatgggcctaccaagggggcgggctgatgaccataagcggtacggcctttcaggagctgcctcaacgtaggggtgggtagtctgtgttctagttcctacataattgtaggaaaatgagctgtgtcatctctgagtcccttggtaattcaagggctgtacatccagctacagatctctctgctcatcatgccctttcttggtgctgctttttgggtaggaccccacgatttagggtaactgttatcatcagctgccatttctgatagggtctaccacatctgtaatgtctgtcctttcccccacttttactgggaattgatagtccagcttccttgggcagtgtaagtaggaggttcatctgctgtgcgcctctaatgtctgtctggatgggatgtgttaggagttggcctgttgggttgaattgttgatttggctgagcagagctgagttttggtaggagtgctcatggttctgtcattcttggacctctcctggctgagctctgattccctgtgagcacgatgctgatgcaatagtcctgtgtcatcactgcagcggtcctcaggagctgccagggccaattgctacagagtgtctgggtgtgtggcataggaggaaggtttgcttgtgaaatgaggctgggtgggagcggggagggactagatcagaagagatcaagggctctattcaggaacgttggtgggaggacagagcaagtgggaagggggtatggtgagtgcggcaatccctcatcctcttagaagcacctgtgaatgggaattgagccaactgttatagaaaattggttcagaaagtgcaatcttgccagatttctagcaaataggttcagtgttaccataagcctttgctgtacttcttgaaatgtttctaggggagagcattggaaaatccccttcccccatctagatcgaaggaagatgagggagcagcttggattcttctcagttgtcccctgcatggggagatacactaacccccagaaatgactgctaagcctcttgccttgtctttagtagctaatgatcagagagattttttttttaaactaccatggtcccaggattccatcctgaaatttatttttctttgtatgaatatgtgtaaatgatttaaaaataaaactgtaaaatatttgtacgaagaataaatggaactgatgtgggtatga

SEQ ID NO: 21974 - DNA, 3170 bp, Homo sapiens
  source 1..3170: mol_type = unassigned DNA
gagagctggcggtcaccatggcaatgcgggagctggtggaggccgaatgcgggggtgccaacccgctcatgaagctcgccgggcacttcacccaggacaaggcccttcggcaggagggattgaggcctggcccctggccccccggagccccggcctctgaggcagcctccaagcctttgggagtagcttctgaagatgagttggtggctgaattcctgcaggaccagaatgcaccccttgtgtcccgtgcccctcagaccttcaagatggatgacctcctggctgagatgcagcagattgagcagtcaaacttccgccaggctccccagagagcccctggtgtggcagacttggccttgtctgagaactgggcccaggagtttcttgcagctggagatgctgtggatgtaactcaggattataatgagactgactggtcccaagaattcatctctgaagttacagaccccttgtctgtgtcccctgcccgctgggctgaggaatatttggagcaatcagaggagaagctgtggctgggagaacctgagggaacagccaccgatcgctggtatgatgaatatcatcctgaggaggatctgcagcacacggccagtgactttgtggccaaagtggatgaccccaaattggctaattctgagttcctgaaattcgtgcggcagattggcgaagggcaggtgtccctggagtccggtgcagggtcgggccgagctcaggcagaacagtgggcagcagagtttatacagcagcagggtacatcagatgcctgggttgaccagttcacaagaccagtaaacacatctgcccttgatatggagtttgaacgagccaagtcagctatagagttgcaggcagagttggaggagatggcaaaacgggatgctgaggcccacccctggctttctgactatgatgaccttacgtcagctacctatgataaggggtaccagtttgaggaggagaaccccttgcgtgatcaccctcagccttttgaagaagggctgcggcgccttcaggagggggacctgccaaatgctgtgctgctttttgaggcagctgtgcagcaggatcctaagcacatggaagcttggcagtatctgggtaccacccaggcagagaatgaacaagaactattagccatcagtgcattgcggaggtgtctggagctaaagccagataaccagacagcactgatggcgctggctgtgagcttcaccaacgagtccctgcagcgacaggcctgtgaaaccctacgagactggctgcggtacacaccagcctatgcccatctggtgacacctgctgaagaaggggctggtggggcaggactgggccccagcaagcgtatcctgggatctctcttgtctgactccctgtttcttgaagtgaaagagctcttcctggcagctgtgcggctggaccctacctccattgaccctgatgtgcagtgtggcttgggagtccttttcaacctgagtggggagtatgacaaggccgtggactgcttcacagctgccctcagcgttcgtcccaatgactatttgctgtggaataagctaggcgccaccctggccaatggaaaccagagtgaagaagcagtagctgcgtaccgccgggccctcgagctccagcctggctatatccggtcccgctataacctgggcatcagctgcatcaacctcggggctcaccgggaggctgtggagcactttctggaggccctgaacatgcagaggaaaagccggggcccccggggtgaaggaggtgccatgtcggagaacatctggagcaccctgcgtttggcattgtctatgttaggccagagcgatgcctatggggcagccgacgcgcgggatctgtccaccctcctaactatgtttggcctgccccagtgacagtgggacgggctgccctgtgagtgtccacctggagggatccccgctttggatgtgattccctctccccaaatgggcctaccaagggggcgggctgatgaccataagcggtacggcctttcaggagctgcctcaacgtaggggtgggtagtctgtgttctagttcctacataattgtaggaaaatgagctgtgtcatctctgagtcccttggtaattcaagggctgtacatccagctacagatctctctgctcatcatgccctttcttggtgctgctttttgggtaggaccccacgatttagggtaactgttatcatcagctgccatttctgatagggtctaccacatctgtaatgtctgtcctttcccccacttttactgggaattgatagtccagcttccttgggcagtgtaagtaggaggttcatctgctgtgcgcctctaatgtctgtctggatgggatgtgttaggagttggcctgttgggttgaattgttgatttggctgagcagagctgagttttggtaggagtgctcatggttctgtcattcttggacctctcctggctgagctctgattccctgtgagcacgatgctgatgcaatagtcctgtgtcatcactgcagcggtcctcaggagctgccagggccaattgctacagagtgtctgggtgtgtggcataggaggaaggtttgcttgtgaaatgaggctgggtgggagcggggagggactagatcagaagagatcaagggctctattcaggaacgttggtgggaggacagagcaagtgggaagggggtatggtgagtgcggcaatccctcatcctcttagaagcacctgtgaatgggaattgagccaactgttatagaaaattggttcagaaagtgcaatcttgccagatttctagcaaataggttcagtgttaccataagcctttgctgtacttcttgaaatgtttctaggggagagcattggaaaatccccttcccccatctagatcgaaggaagatgagggagcagcttggattcttctcagttgtcccctgcatggggagatacactaacccccagaaatgactgctaagcctcttgccttgtctttagtagctaatgatcagagagattttttttttaaactaccatggtcccaggattccatcctgaaatttatttttctttgtatgaatatgtgtaaatgatttaaaaataaaactgtaaaatatttgtacgaagaataaatggaactgatgtgggta

SEQ ID NO: 21975 - DNA, 1508 bp, Homo sapiens
  source 1..1508: mol_type = unassigned DNA
gcgtgctggggctgcgcggggctaggtatggtcgggctgttttcccactgtcccttcttcgggcagtgtcgccgtccagcctggttgttgaagcgtccccgtggtcccccggggtccaggcccctttgtggaggcagctgctggcccccagcccatgggaccgtagtcgcggaggcctctgcagaggcgcaggctggaagcggtggcctttgaggggggcggcaggagagagtaccgacctccctcgaactcctggcagagagagctggcggtcaccatggcaatgcgggagctggtggaggccgaatgcgggggtgccaacccgctcatgaagctcgccgggcacttcacccaggacaaggcccttcggcaggagggattgaggcctggcccctggccccccggagccccggcctctgaggcagtgagtgttcttgaggtggaaagcccaggtgcagcctctgaggcagcctccaagcctttgggagtagcttctgaagatgagttggtggctgaattcctgcaggaccagaatgcaccccttgtgtcccgtgcccctcagaccttcaagatggatgacctcctggctgagatgcagcagattgagcagtcaaacttccgccaggctccccagagagcccctggtgtggcagacttggccttgtctgagaactgggcccaggagtttcttgcagctggagatgctgtggatgtaactcaggattataatgagactgactggtcccaagaattcatctctgaagttacagaccccttgtctgtgtcccctgcccgctgggctgaggaatatttggagcaatcagaggagaagctgtggctgggagaacctgagggaacagccaccgatcgctggtatgatgaatatcatcctgaggaggatctgcagcacacggccagtgactttgtggccaaagtggatgaccccaaattggctaattctgagggtacatcagatgcctgggttgaccagttcacaagaccagtaaacacatctgcccttgatatggagtttgaacgagccaagtcagctatagagttgcaggcagagttggaggagatggcaaaacgggatgctgaggcccacccctggctttctgactatgatgaccttacgtcagctacctatgataaggggtaccagtttgaggaggagaaccccttgcgtgatcaccctcagccttttgaagaagggctgcggcgccttcaggagggggacctgccaaatgctgtgctgctttttgaggcagctgtgcagcaggatcctaagcacatggaagcttggcagtatctgggtaccacccaggcagagaatgaacaagaactattagccatcagtgcattgcggaggtgtctggagctaaagccagataaccagacagcactgatggcgctggctgtgagcttcaccaacgagtccctgcagcgacaggcctgtgaaaccctacgagactggctgcggtacacaccagcctatgcccatctggtga

SEQ ID NO: 21976 - DNA, 2105 bp, Homo sapiens
  source 1..2105: mol_type = unassigned DNA
ggcagcagggccggggagatgggcggtggggagcgcgggagggaccgggccgagccgggggaagggctccggtgacttaaggggagggaatgctcctctgccgtgctcaccgcgtgctggggctgcgcggggctagagagctggcggtcaccatggcaatgcgggagctggtggaggccgaatgcgggggtgccaacccgctcatgaagctcgccgggcacttcacccaggacaaggcccttcggcaggagggattgaggcctggcccctggccccccggagccccggcctctgaggcagcctccaagcctttgggagtagcttctgaagatgagttggtggctgaattcctgcaggaccagaatgcaccccttgtgtcccgtgcccctcagaccttcaagatggatgacctcctggctgagatgcagcagattgagcagtcaaacttccgccaggctccccagagagcccctggtgtggcagacttggccttgtctgagaactgggcccaggagtttcttgcagctggagatgctgtggatgtaactcaggattataatgagactgactggtcccaagaattcatctctgaagttacagaccccttgtctgtgtcccctgcccgctgggctgaggaatatttggagcaatcagaggagaagctgtggctgggagaacctgagggaacagccaccgatcgctggtatgatgaatatcatcctgaggaggatctgcagcacacggccagtgactttgtggccaaagtggatgaccccaaattggctaattctgagttcctgaaattcgtgcggcagattggcgaagggcaggtgtccctggagtccggtgcagggtcgggccgagctcaggcagaacagtgggcagcagagtttatacagcagcagggtacatcagatgcctgggttgaccagttcacaagaccagtaaacacatctgcccttgatatggagtttgaacgagccaagtcagctatagagtctgatgtcgatttctgggacaagttgcaggcagagttggaggagatggcaaaacgggatgctgaggcccacccctggctttctgactatgatgaccttacgtcagctacctatgataaggggtaccagtttgaggaggagaaccccttgcgtgatcaccctcagccttttgaagaagggctgcggcgccttcaggagggggacctgccaaatgctgtgctgctttttgaggcagctgtgcagcaggatcctaagcacatggaagcttggcagtatctgggtaccacccaggcagagaatgaacaagaactattagccatcagtgcattgcggaggtgtctggagctaaagccagataaccagacagcactgatggcgctggctgtgagcttcaccaacgagtccctgcagcgacaggcctgtgaaaccctacgagactggctgcggtacacaccagcctatgcccatctggtgacacctgctgaagaaggggctggtggggcaggactgggccccagcaagcgtatcctgggatctctcttgtctgactccctgtttcttgaagtgaaagagctcttcctggcagctgtgcggctggaccctacctccattgaccctgatgtgcagtgtggcttgggagtccttttcaacctgagtggggagtatgacaaggccgtggactgcttcacagctgccctcagcgttcgtcccaatgactatttgctgtggaataagctaggcgccaccctggccaatggaaaccagagtgaagaagcagtagctgcgtaccgccgggccctcgagctccagcctggctatatccggtcccgctataacctgggcatcagctgcatcaacctcggggctcaccgggaggctgtggagcactttctggaggccctgaacatgcagaggaaaagccggggcccccggggtgaaggaggtgccatgtcggagaacatctggagcaccctgcgtttggcattgtctatgttaggccagagcgatgcctatggggcagccgacgcgcgggatctgtccaccctcctaactatgtttggcctgccccagtgacagtgggacgggctgccctgtgagtgtccacct

SEQ ID NO: 21977 - DNA, 2477 bp, Homo sapiens
  source 1..2477: mol_type = unassigned DNA
ggtgccccggcgggtcgtgcggcgcggcgctccgcggtgagcgcctgaccccgagggggcccggggccgcgtccctgggccctccccacccttgcggtggcctcgcgggtcccaggggcggggctggagcggcagcagggccggggagatgggcggtggggagcgcgggagggaccgggccgagccgggggaagggctccggtgacttaaggggagggaatgctcctctgccgtgctcaccgcgtgctggggctgcgcggggctaggtatggtcgggctgttttcccactgtcccttcttcgggcagtgtcgccgtccagcctggttgttgaagcgtccccgtggtcccccggggtccaggcccctttgtggaggcagctgctggcccccagcccatgggaccgtagtcgcggaggcctctgcagaggcgcaggctggaagcggtggcctttgaggggggcggcaggagagagtaccgacctccctcgaactcctggcagagagagctggcggtcaccatggcaatgcgggagctggtggaggccgaatgcgggggtgccaacccgctcatgaagctcgccgggcacttcacccaggacaaggcccttcggcaggagggattgaggcctggcccctggccccccggagccccggcctctgaggcagcctccaagcctttgggagtagcttctgaagatgagttggtggctgaattcctgcaggaccagaatgcaccccttgtgtcccgtgcccctcagaccttcaagatggatgacctcctggctgagatgcagcagattgagcagtcaaacttccgccaggctccccagagagcccctggtgtggcagacttggccttgtctgagaactgggcccaggagtttcttgcagctggagatgctgtggatgtaactcaggattataatgagactgactggtcccaagaattcatctctgaagttacagaccccttgtctgtgtcccctgcccgctgggctgaggaatatttggagcaatcagaggagaagctgtggctgggagaacctgagggaacagccaccgatcgctggtatgatgaatatcatcctgaggaggatctgcagcacacggccagtgactttgtggccaaagtggatgaccccaaattggctaattctgagttcctgaaattcgtgcggcagattggcgaagggcaggtgtccctggagtccggtgcagggtcgggccgagctcaggcagaacagtgggcagcagagtttatacagcagcagggtacatcagatgcctgggttgaccagttcacaagaccagtaaacacatctgcccttgatatggagtttgaacgagccaagtcagctatagagtctgatgtcgatttctgggacaagttgcaggcagagttggaggagatggcaaaacgggatgctgaggcccacccctggctttctgactatgatgaccttacgtcagctacctatgataaggggtaccagtttgaggaggagaaccccttgcgtgatcaccctcagccttttgaagaagggctgcggcgccttcaggagggggacctgccaaatgctgtgctgctttttgaggcagctgtgcagcaggatcctaagcacatggaagcttggcagtatctgggtaccacccaggcagagaatgaacaagaactattagccatcagtgcattgcggaggtgtctggagctaaagccagataaccagacagcactgatggcgctggctgtgagcttcaccaacgagtccctgcagcgacaggcctgtgaaaccctacgagactggctgcggtacacaccagcctatgcccatctggtgacacctgctgaagaaggggctggtggggcaggactgggccccagcaagcgtatcctgggatctctcttgtctgactccctgtttcttgaagtgaaagagctcttcctggcagctgtgcggctggaccctacctccattgaccctgatgtgcagtgtggcttgggagtccttttcaacctgagtggggagtatgacaaggccgtggactgcttcacagctgccctcagcgttcgtcccaatgactatttgctgtggaataagctaggcgccaccctggccaatggaaaccagagtgaagaagcagtagctgcgtaccgccgggccctcgagctccagcctggctatatccggtcccgctataacctgggcatcagctgcatcaacctcggggctcaccgggaggctgtggagcactttctggaggccctgaacatgcagaggaaaagccggggcccccggggtgaaggaggtgccatgtcggagaacatctggagcaccctgcgtttggcattgtctatgttaggccagagcgatgcctatggggcagccgacgcgcgggatctgtccaccctcctaactatgtttggcctgccccagtgacagtgggacgggctgccctgtgagtgtccacctggaggg

SEQ ID NO: 21978 - DNA, 2253 bp, Homo sapiens
  source 1..2253: mol_type = unassigned DNA
tcttctcccctcccccaagccagcacctggtgccccggcgggtcgtgcggcgcggcgctccgcgagagctggcggtcaccatggcaatgcgggagctggtggaggccgaatgcgggggtgccaacccgctcatgaagctcgccgggcacttcacccaggacaaggcccttcggcaggagggattgaggcctggcccctggccccccggagccccggcctctgaggcagtgagtgttcttgaggtggaaagcccaggtgcagcctctgaggcagcctccaagcctttgggagtagcttctgaagatgagttggtggctgaattcctgcaggaccagaatgcaccccttgtgtcccgtgcccctcagaccttcaagatggatgacctcctggctgagatgcagcagattgagcagtcaaacttccgccaggctccccagagagcccctggtgtggcagacttggccttgtctgagaactgggcccaggagtttcttgcagctggagatgctgtggatgtaactcaggattataatgagactgactggtcccaagaattcatctctgaagttacagaccccttgtctgtgtcccctgcccgctgggctgaggaatatttggagcaatcagaggagaagctgtggctgggagaacctgagggaacagccaccgatcgctggtatgatgaatatcatcctgaggaggatctgcagcacacggccagtgactttgtggccaaagtggatgaccccaaattggctaattctgagttcctgaaattcgtgcggcagattggcgaagggcaggtgtccctggagtccggtgcagggtcgggccgagctcaggcagaacagtgggcagcagagtttatacagcagcagggtacatcagatgcctgggttgaccagttcacaagaccagtaaacacatctgcccttgatatggagtttgaacgagccaagtcagctatagagtctgatgtcgatttctgggacaagttgcaggcagagttggaggagatggcaaaacgggatgctgaggcccacccctggctttctgactatgatgaccttacgtcagctacctatgataaggggtaccagtttgaggaggagaaccccttgcgtgatcaccctcagccttttgaagaagggctgcggcgccttcaggagggggacctgccaaatgctgtgctgctttttgaggcagctgtgcagcaggatcctaagcacatggaagcttggcagtatctgggtaccacccaggcagagaatgaacaagaactattagccatcagtgcattgcggaggtgtctggagctaaagccagataaccagacagcactgatggcgctggctgtgagcttcaccaacgagtccctgcagcgacaggcctgtgaaaccctacgagactggctgcggtacacaccagcctatgcccatctggtgacacctgctgaagaaggggctggtggggcaggactgggccccagcaagcgtatcctgggatctctcttgtctgactccctgtttcttgaagtgaaagagctcttcctggcagctgtgcggctggaccctacctccattgaccctgatgtgcagtgtggcttgggagtccttttcaacctgagtggggagtatgacaaggccgtggactgcttcacagctgccctcagcgttcgtcccaatgactatttgctgtggaataagctaggcgccaccctggccaatggaaaccagagtgaagaagcagtagctgcgtaccgccgggccctcgagctccagcctggctatatccggtcccgctataacctgggcatcagctgcatcaacctcggggctcaccgggaggctgtggagcactttctggaggccctgaacatgcagaggaaaagccggggcccccggggtgaaggaggtgccatgtcggagaacatctggagcaccctgcgtttggcattgtctatgttaggccagagcgatgcctatggggcagccgacgcgcgggatctgtccaccctcctaactatgtttggcctgccccagtgacagtgggacgggctgccctgtgagtgtccacctggagggatccccgctttggatgtgattccctctccccaaatgggcctaccaagggggcgggctgatgaccataagcggtacggcctttcaggagctgcctcaacgtaggggtgggtagtctgtgttctagttcctacataattgtaggaaaatgagctgtgtcatctctgagtcc

SEQ ID NO: 21979 - DNA, 2689 bp, Homo sapiens
  source 1..2689: mol_type = unassigned DNA
gacgctaccccgctaggggttatttggaagcggggcaggcctaggaggctgaagaaggcttcggactggactccccagcccctggtgttagggcttttctctttcttgggcttgggaacattagccagccccattttagaggggaaaactgaggctcagaaagggcactgaatccccttaggtcacaatgcgcccaagggaagaggcaggatcgactgagcctaggatctcgcgtcttcggctttcccccagagcctgggaagcccttcttagctccactcttctttgagctttccgtcaaacaaatcctagggcccgtggccttttcgagcgctcctaaaggcgactctccaagacccgctctctaagtgtcgccgtccagcctggttgttgaagcgtccccgtggtcccccggggtccaggcccctttgtggaggcagctgctggcccccagcccatgggaccgtagtcgcggaggcctctgcagaggcgcaggctggaagcggtggcctttgaggggggcggcaggagagagtaccgacctccctcgaactcctggcagagagagctggcggtcaccatggcaatgcgggagctggtggaggccgaatgcgggggtgccaacccgctcatgaagctcgccgggcacttcacccaggacaaggcccttcggcaggagggattgaggcctggcccctggccccccggagccccggcctctgaggcagcctccaagcctttgggagtagcttctgaagatgagttggtggctgaattcctgcaggaccagaatgcaccccttgtgtcccgtgcccctcagaccttcaagatggatgacctcctggctgagatgcagcagattgagcagtcaaacttccgccaggctccccagagagcccctggtgtggcagacttggccttgtctgagaactgggcccaggagtttcttgcagctggagatgctgtggatgtaactcaggattataatgagactgactggtcccaagaattcatctctgaagttacagaccccttgtctgtgtcccctgcccgctgggctgaggaatatttggagcaatcagaggagaagctgtggctgggagaacctgagggaacagccaccgatcgctggtatgatgaatatcatcctgaggaggatctgcagcacacggccagtgactttgtggccaaagtggatgaccccaaattggctaattctgagttcctgaaattcgtgcggcagattggcgaagggcaggtgtccctggagtccggtgcagggtcgggccgagctcaggcagaacagtgggcagcagagtttatacagcagcagggtacatcagatgcctgggttgaccagttcacaagaccagtaaacacatctgcccttgatatggagtttgaacgagccaagtcagctatagagtctgatgtcgatttctgggacaagttgcaggcagagttggaggagatggcaaaacgggatgctgaggcccacccctggctttctgactatgatgaccttacgtcagctacctatgataaggggtaccagtttgaggaggagaaccccttgcgtgatcaccctcagccttttgaagaagggctgcggcgccttcaggagggggacctgccaaatgctgtgctgctttttgaggcagctgtgcagcaggatcctaagcacatggaagcttggcagtatctgggtaccacccaggcagagaatgaacaagaactattagccatcagtgcattgcggaggtgtctggagctaaagccagataaccagacagcactgatggcgctggctgtgagcttcaccaacgagtccctgcagcgacaggcctgtgaaaccctacgagactggctgcggtacacaccagcctatgcccatctggtgacacctgctgaagaaggggctggtggggcaggactgggccccagcaagcgtatcctgggatctctcttgtctgactccctgtttcttgaagtgaaagagctcttcctggcagctgtgcggctggaccctacctccattgaccctgatgtgcagtgtggcttgggagtccttttcaacctgagtggggagtatgacaaggccgtggactgcttcacagctgccctcagcgttcgtcccaatgactatttgctgtggaataagctaggcgccaccctggccaatggaaaccagagtgaagaagcagtagctgcgtaccgccgggccctcgagctccagcctggctatatccggtcccgctataacctgggcatcagctgcatcaacctcggggctcaccgggaggctgtggagcactttctggaggccctgaacatgcagaggaaaagccggggcccccggggtgaaggaggtgccatgtcggagaacatctggagcaccctgcgtttggcattgtctatgttaggccagagcgatgcctatggggcagccgacgcgcgggatctgtccaccctcctaactatgtttggcctgccccagtgacagtgggacgggctgccctaaatatacagcctctgcagacactgcttctgaatgaacgggctggagtttccttgggatcctgaactcatattggattctctacctaccatcttggacaattcatgtaggaaaacaaatcctcatttgttcaaacaatagatgaaaattattaaagttttgacacatatt

SEQ ID NO: 21980 - DNA, 567 bp, Homo sapiens
  source 1..567: mol_type = unassigned DNA
aagcggtggcctttgaggggggcggcaggagagagtaccgacctccctcgaactcctggcagaggtgggggtcgcagcaaaagcactggggtggagggcggccagtgtggggcagacgcctgtgtgccttcctcagatacgggcagagttgtggatgtgagaagggtctggcttgggtacctcagttccaaacctcctgtgtccatcagagagctggcggtcaccatggcaatgcgggagctggtggaggccgaatgcgggggtgccaacccgctcatgaagctcgccgggcacttcacccaggacaaggcccttcggcaggagggattgaggcctggcccctggccccccggagccccggcctctgaggcagcctccaagcctttgggagtagcttctgaagatgagttggtggctgaattcctgcaggaccagaatgcaccccttgtgtcccgtgcccctcagaccttcaagatggatgacctcctggctgagatgcagcagattgagcagtcaaacttccgccaggctccccagagagcccctggtgtggcagacttggccttg

SEQ ID NO: 21981 - DNA, 641 bp, Homo sapiens
  source 1..641: mol_type = unassigned DNA
gaagaaggcttcggactggactccccagcccctggtgttagggcttttctctttcttgggcttgggaacattagccagccccattttagaggggaaaactgaggctcagaaagggcactgaatccccttaggtcacaatgcgcccaagggaagaggcaggatcgactgagcctaggatctcgcgtcttcggctttcccccagagcctgggaagcccttcttagctccactcttctttgagctttccgtcaaacaaatcctagggcccgtggccttttcgagcgctcctaaaggcgactctccaagacccgctctctaagagagctggcggtcaccatggcaatgcgggagctggtggaggccgaatgcgggggtgccaacccgctcatgaagctcgccgggcacttcacccaggacaaggcccttcggcaggagggattgaggcctggcccctggccccccggagccccggcctctgaggcagcctccaagcctttgggagtagcttctgaagatgagttggtggctgaattcctgcaggaccagaatgcaccccttgtgtcccgtgcccctcagaccttcaagatggatgacctcctggctgagatgcagcagattgagcagtcaaacttccgccaggct

SEQ ID NO: 21982 - DNA, 848 bp, Homo sapiens
  source 1..848: mol_type = unassigned DNA
attattgcccttggtcatttaccggcagccctgggcccctccttgctcttctccatgacactaggactcccttggtcttgaagctggagagctggcggtcaccatggcaatgcgggagctggtggaggccgaatgcgggggtgccaacccgctcatgaagctcgccgggcacttcacccaggacaaggcccttcggcaggagggattgaggcctggcccctggccccccggagccccggcctctgaggcagcctccaagcctttgggagtagcttctgaagatgagttggtggctgaattcctgcaggaccagaatgcaccccttgtgtcccgtgcccctcagaccttcaagatggatgacctcctggctgagatgcagcagattgagcagtcaaacttccgccaggctccccagagagcccctggtgtggcagacttggccttgtctgagaactgggcccaggagtttcttgcagctggagatgctgtggatgtaactcaggattataatgagactgactggtcccaagaattcatctctgaagttacagaccccttgtctgtgtcccctgcccgctgggctgaggaatatttggagcaatcagaggagaagctgtggctgggagaacctgagggaacagccaccgatcgctggtatgatgaatatcatcctgaggaggatctgcagcacacggccagtgactttgtggccaaagtggatgaccccaaattggctaattctgagttcctgaaattcgtgcggcagattggcgaagggcaggtgtccctggagtccggtgcagggtcgggccgagctcaggcagaacagtgggcagcagagtttatac

SEQ ID NO: 21983 - DNA, 579 bp, Homo sapiens
  source 1..579: mol_type = unassigned DNA
tcccccaagccagcacctggtgccccggcgggtcgtgcggcgcggcgctccgcgtgtcgccgtccagcctggttgttgaagcgtccccgtggtcccccggggtccaggcccctttgtggaggcagctgctggcccccagcccatgggaccgtagtcgcggaggcctctgcagaggcgcaggctggaagcggtggcctttgaggggggcggcaggagagagtaccgacctccctcgaactcctggcagagagagctggcggtcaccatggcaatgcgggagctggtggaggccgaatgcgggggtgccaacccgctcatgaagctcgccgggcacttcacccaggacaaggcccttcggcaggagggattgaggcctggcccctggccccccggagccccggcctctgaggcagcctccaagcctttgggagtagcttctgaagatgagttggtggctgaattcctgcaggaccagaatgcaccccttgtgtcccgtgcccctcagaccttcaagatggatgacctcctggctgagatgcagcagattgagcagtcaaacttccgccaggctccccagag

SEQ ID NO: 21984 - DNA, 2818 bp, Homo sapiens
  source 1..2818: mol_type = unassigned DNA
cagcgctgccgagtggccgccggccggccgagtacccggagctccagggggctcaggagcaccctctgagaacccgctgtgcacccaccttttcccctcttttggtgggcaagtaagcacgggggaaaagcatccggtggcctcagggagccctgaagaaaccgaagcagaatgtaccagggacacatgcaggtagtaggtgtaaccttgaagaaaaagtggcactgtcttcaaaaaagtgacctgaccctggctttgggaaaaggctctagggcggcagataaggctgttgccatggtgatgaaggagataccgagggaggagtctgctgaagaaaagcccctccttactatgacatcacagctggtgaatgagcaacaagaaagcagacccctcctgagtccctccatcgatgactttctctgtgaaaccaaatcggaagcaatagcaaggccagtaacatccaatacagctgtattgaccactggcttagatctcctcgacctgagtgaaccagtctctcaaacccaaaccaaagccaagaagtcagagccctcatcaaaaacctcatccctcaagaaaaaggccgatggatctgacctcatcagcacggatgctgagcagagaggccagcctctcagagtcccggagacttcatccttagatctagacattcaaacacaactggaaaaatgggacgatgttaagtttcatggagatcgaaataccaagggacatccaatggcagagagaaaatcatcctcatctagaactggatcaaaagagctcttatggtcctcagaacacagatctcaaccagaactgagtggtggaaaaagcgccctcaactctgagtcggcttcagaattggaattagtggctccgactcaggctcgactgaccaaagaacatcgctggggaagcgcattactttctagaaaccactccttagaagaagagtttgaaagggcaaaagcagcagtggagtcagatacagagttttgggataagatgcaagcagaatgggaagaaatggctcggaggaactggatatctgagaaccaagaagcccagaaccaagtaaccatctcggctagtgagaagggatattactttcacactgaaaaccccttcaaggactggcctggagcatttgaagaaggcttaaaaaggctgaaggaaggggatctgccagtcaccatcctgttcatggaagcagcaattcttcaggaccctggagatgcagaggcatggcagttcctcgggataacccaggcggagaatgaaaatgaacaagcagctattgtcgccctccagaggtgcttagaattacagcccaacaacttaaaagctttgatggccttggctgtgagttatactaacactggccatcagcaggatgcctgtgacgctctgaagaattggattaagcaaaatccaaagtacaaataccttgtgaaaagcaagaagggatctccaggcctcacccggcggatgtctaagtccccagttgatagctctgttctggaaggggtgaaggaattatatctggaagctgcccaccaaaatggagatatgatcgacccagacctgcagacaggtctaggggttctgttccacctgagtggagaatttaatagagcaatagatgcatttaacgctgccttaactgttcggccagaggactattcactatggaaccgcctcggggcgaccttggcgaacggagaccgcagcgaggaagccgtggaggcctatacgcgagcactggagattcagccaggattcatccggtccagatacaacctaggaataagctgcatcaacctgggcgcctacagagaagcggtcagcaattttctcactgccctcagtttgcaaagaaagagcaggaatcagcagcaagttcctcatcctgcaatctctgggaatatctgggctgccctcagaattgcgctctctctgatggaccaaccagaactcttccaggcggctaatcttggtgacctggatgtcctcttaagagctttcaacttggatccttgaagaaagaataataccagtactaataatccctgatctgtgtgattgtactgaaaaatcaaaaactattttattatgaatttcaaaaggataaatcaaatattcaaaaggccatggtcatatagcccaaggaaattaattcctgtggacaatgcccagtctctgttcagatccaaaagcacaaaatgttgtatatagagtcaaagtcaggctcaaaagaagaattaagagactcaagacaaaccaagataaagtaactgtgtgttgaatactctttccacaagttgcaagcatattgcaacacatgttctttgggttttttgtctccccttgcagctgatgacacatctgaggaacttgttcatgggaaacatggaaaaagcactgcctcagattgggaaattctgactgtttctgaactgtcttcttttgcaagactgaacatagtttgggccattggtgcatgcacatatattaacttgtgactaaagacagacattgcttaaacctgttccaattttaacttttactgtagccctttgattccagagagggagctttgctggcaaaagcagtttttgcactagaaatttttgctgttcccaatctaaacttttctggtattgtatatatgcactttaatatcttatttatgccttgctggagttttgttttgttgctccaatttttaacttgggggtgaaagatttaagaactcagcctcactagatcaacggaccaaataaacaattcctgaagacagtttttcatagtg

SEQ ID NO: 21985 - DNA, 2637 bp, Homo sapiens
  source 1..2637: mol_type = unassigned DNA
atgcaccaaaacggatctcaagtagtaggtgtaaccttgaagaaaaagtggcactgtcttcaaaaaagtgacctgaccctggctttgggaaaaggctctagggcggcagataaggctgttgccatggtgatgaaggagataccgagggaggagtctgctgaagaaaagcccctccttactatgacatcacagctggtgaatgagcaacaagaaagcagacccctcctgagtccctccatcgatgactttctctgtgaaaccaaatcggaagcaatagcaaggccagtaacatccaatacagctgtattgaccactggcttagatctcctcgacctgagtgaaccagtctctcaaacccaaaccaaagccaagaagtcagagccctcatcaaaaacctcatccctcaagaaaaaggccgatggatctgacctcatcagcacggatgctgagcagagaggccagcctctcagagtcccggagacttcatccttagatctagacattcaaacacaactggaaaaatgggacgatgttaagtttcatggagatcgaaataccaagggacatccaatggcagagagaaaatcatcctcatctagaactggatcaaaagagctcttatggtcctcagaacacagatctcaaccagaactgagtggtggaaaaagcgccctcaactctgagtcggcttcagaattggaattagtggctccgactcaggctcgactgaccaaagaacatcgctggggaagcgcattactttctagaaaccactccttagaagaagagtttgaaagggcaaaagcagcagtggagtcagatacagagttttgggataagatgcaagcagaatgggaagaaatggctcggaggaactggatatctgagaaccaagaagcccagaaccaagtaaccatctcggctagtgagaagggatattactttcacactgaaaaccccttcaaggactggcctggagcatttgaagaaggcttaaaaaggctgaaggaaggggatctgccagtcaccatcctgttcatggaagcagcaattcttcaggaccctggagatgcagaggcatggcagttcctcgggataacccaggcggagaatgaaaatgaacaagcagctattgtcgccctccagaggtgcttagaattacagcccaacaacttaaaagctttgatggccttggctgtgagttatactaacactggccatcagcaggatgcctgtgacgctctgaagaattggattaagcaaaatccaaagtacaaataccttgtgaaaagcaagaagggatctccaggcctcacccggcggatgtctaagtccccagttgatagctctgttctggaaggggtgaaggaattatatctggaagctgcccaccaaaatggagatatgatcgacccagacctgcagacaggtctaggggttctgttccacctgagtggagaatttaatagagcaatagatgcatttaacgctgccttaactgttcggccagaggactattcactatggaaccgcctcggggcgaccttggcgaacggagaccgcagcgaggaagccgtggaggcctatacgcgagcactggagattcagccaggattcatccggtccagatacaacctaggaataagctgcatcaacctgggcgcctacagagaagcggtcagcaattttctcactgccctcagtttgcaaagaaagagcaggaatcagcagcaagttcctcatcctgcaatctctgggaatatctgggctgccctcagaattgcgctctctctgatggaccaaccagaactcttccaggcggctaatcttggtgacctggatgtcctcttaagagctttcaacttggatccttgaagaaagaataataccagtactaataatccctgatctgtgtgattgtactgaaaaatcaaaaactattttattatgaatttcaaaaggataaatcaaatattcaaaaggccatggtcatatagcccaaggaaattaattcctgtggacaatgcccagtctctgttcagatccaaaagcacaaaatgttgtatatagagtcaaagtcaggctcaaaagaagaattaagagactcaagacaaaccaagataaagtaactgtgtgttgaatactctttccacaagttgcaagcatattgcaacacatgttctttgggttttttgtctccccttgcagctgatgacacatctgaggaacttgttcatgggaaacatggaaaaagcactgcctcagattgggaaattctgactgtttctgaactgtcttcttttgcaagactgaacatagtttgggccattggtgcatgcacatatattaacttgtgactaaagacagacattgcttaaacctgttccaattttaacttttactgtagccctttgattccagagagggagctttgctggcaaaagcagtttttgcactagaaatttttgctgttcccaatctaaacttttctggtattgtatatatgcactttaatatcttatttatgccttgctggagttttgttttgttgctccaatttttaacttgggggtgaaagatttaagaactcagcctcactagatcaacggaccaaataaacaattcctgaagacagtt

SEQ ID NO: 21986 - DNA, 2319 bp, Homo sapiens
  source 1..2319: mol_type = unassigned DNA
atggtgatgaaggagataccgagggaggagtctgctgaagaaaagcccctccttactatgacatcacagctggtgaatgagcaacaagaaagcagacccctcctgagtccctccatcgatgactttctctgtgaaaccaaatcggaagcaatagcaaggccagtaacatccaatacagctgacattcaaacacaactggaaaaatgggacgatgttaagtttcatggagatcgaaataccaagggacatccaatggcagagagaaaatcatcctcatctagaactggatcaaaagagctcttatggtcctcagaacacagatctcaaccagaactgagtggtggaaaaagcgccctcaactctgagtcggcttcagaattggaattagtggctccgactcaggctcgactgaccaaagaacatcgctggggaagcgcattactttctagaaaccactccttagaagaagagtttgaaagggcaaaagcagcagtggagtcagatacagagttttgggataagatgcaagcagaatgggaagaaatggctcggaggaactggatatctgagaaccaagaagcccagaaccaagtaaccatctcggctagtgagaagggatattactttcacactgaaaaccccttcaaggactggcctggagcatttgaagaaggcttaaaaaggctgaaggaaggggatctgccagtcaccatcctgttcatggaagcagcaattcttcaggaccctggagatgcagaggcatggcagttcctcgggataacccaggcggagaatgaaaatgaacaagcagctattgtcgccctccagaggtgcttagaattacagcccaacaacttaaaagctttgatggccttggctgtgagttatactaacactggccatcagcaggatgcctgtgacgctctgaagaattggattaagcaaaatccaaagtacaaataccttgtgaaaagcaagaagggatctccaggcctcacccggcggatgtctaagtccccagttgatagctctgttctggaaggggtgaaggaattatatctggaagctgcccaccaaaatggagatatgatcgacccagacctgcagacaggtctaggggttctgttccacctgagtggagaatttaatagagcaatagatgcatttaacgctgccttaactgttcggccagaggactattcactatggaaccgcctcggggcgaccttggcgaacggagaccgcagcgaggaagccgtggaggcctatacgcgagcactggagattcagccaggattcatccggtccagatacaacctaggaataagctgcatcaacctgggcgcctacagagaagcggtcagcaattttctcactgccctcagtttgcaaagaaagagcaggaatcagcagcaagttcctcatcctgcaatctctgggaatatctgggctgccctcagaattgcgctctctctgatggaccaaccagaactcttccaggcggctaatcttggtgacctggatgtcctcttaagagctttcaacttggatccttgaagaaagaataataccagtactaataatccctgatctgtgtgattgtactgaaaaatcaaaaactattttattatgaatttcaaaaggataaatcaaatattcaaaaggccatggtcatatagcccaaggaaattaattcctgtggacaatgcccagtctctgttcagatccaaaagcacaaaatgttgtatatagagtcaaagtcaggctcaaaagaagaattaagagactcaagacaaaccaagataaagtaactgtgtgttgaatactctttccacaagttgcaagcatattgcaacacatgttctttgggttttttgtctccccttgcagctgatgacacatctgaggaacttgttcatgggaaacatggaaaaagcactgcctcagattgggaaattctgactgtttctgaactgtcttcttttgcaagactgaacatagtttgggccattggtgcatgcacatatattaacttgtgactaaagacagacattgcttaaacctgttccaattttaacttttactgtagccctttgattccagagagggagctttgctggcaaaagcagtttttgcactagaaatttttgctgttcccaatctaaacttttctggtattgtatatatgcactttaatatcttatttatgccttgctggagttttgttttgttgctccaatttttaacttgggggtgaaagatttaagaactcagcctcactagatcaacggaccaaataaacaattcctgaagacagtt

SEQ ID NO: 21987 - DNA, 2147 bp, Homo sapiens
  source 1..2147: mol_type = unassigned DNA
aagagttcggcgaagaaggagtgagttctagagacgccccgcgagcaggacccgcgcctgcaggagagcctggccgacccggctcctcgccttctctgcgcgctctcccgcgtccgctttcagcaccccgagcggagaacagttcccggcagcccgcagcgctgccgagtggccgccggccggccgagtacccggagctccagggggctcaggagcaccctctgagaacccgctgtgcacccaccttttcccctcttttggtgggcaagtaagcacgggggaaaagcatccggtggcctcagggagccctgaagaaaccgaagcagaatgtaccagggacacatgcagggaaaaggctctagggcggcagataaggctgttgccatggtgatgaaggagataccgagggaggagtctgctgaagaaaagcccctccttactatgacatcacagctggtgaatgagcaacaagaaagcagacccctcctgagtccctccatcgatgactttctctgtgaaaccaaatcggaagcaatagcaaggccagtaacatccaatacagctgtattgaccactggcttagatctcctcgacctgagtgaaccagtctctcaaacccaaaccaaagccaagaagtcagagccctcatcaaaaacctcatccctcaagaaaaaggccgatggatctgacctcatcagcacggatgctgagcagagaggccagcctctcagagtcccggagacttcatccttagatctagacattcaaacacaactggaaaaatgggacgatgttaagtttcatggagatcgaaataccaagggacatccaatggcagagagaaaatcatcctcatctagaactggatcaaaagagctcttatggtcctcagaacacagatctcaaccagaactgagtggtggaaaaagcgccctcaactctgagtcggcttcagaattggaattagtggctccgactcaggctcgactgaccaaagaacatcgctggggaagcgcattactttctagaaaccactccttagaagaagagtttgaaagggcaaaagcagcagtggagtcagatacagagttttgggataagatgcaagcagaatgggaagaaatggctcggaggaactggatatctgagaaccaagaagcccagaaccaagtaaccatctcggctagtgagaagggatattactttcacactgaaaaccccttcaaggactggcctggagcatttgaagaaggcttaaaaaggctgaaggaaggggatctgccagtcaccatcctgttcatggaagcagcaattcttcaggaccctggagatgcagaggcatggcagttcctcgggataacccaggcggagaatgaaaatgaacaagcagctattgtcgccctccagaggtgcttagaattacagcccaacaacttaaaagctttgatggccttggctgtgagttatactaacactggccatcagcaggatgcctgtgacgctctgaagaattggattaagcaaaatccaaagtacaaataccttgtgaaaagcaagaagggatctccaggcctcacccggcggatgtctaagtccccagttgatagctctgttctggaaggggtgaaggaattatatctggaagctgcccaccaaaatggagatatgatcgacccagacctgcagacaggtctaggggttctgttccacctgagtggagaatttaatagagcaatagatgcatttaacgctgccttaactgttcggccagaggactattcactatggaaccgcctcggggcgaccttggcgaacggagaccgcagcgaggaagccgtggaggcctatacgcgagcactggagattcagccaggattcatccggtccagatacaacctaggaataagctgcatcaacctgggcgcctacagagaagcggtcagcaattttctcactgccctcagtttgcaaagaaagagcaggaatcagcagcaagttcctcatcctgcaatctctgggaatatctgggctgccctcagaattgcgctctctctgatggaccaaccagaactcttccaggcggctaatcttggtgacctggatgtcctcttaagagctttcaacttggatccttgaagaaagaataa

SEQ ID NO: 21988 - DNA, 1739 bp, Homo sapiens
  source 1..1739: mol_type = unassigned DNA
agtgctaaccagaacatgtcatctttgagtctgaagccactggtccaggtctcagtaggagcttttgtccagctggtgaatgagcaacaagaaagcagacccctcctgagtccctccatcgatgactttctctgtgaaaccaaatcggaagcaatagcaaggccagtaacatccaatacagctgacattcaaacacaactggaaaaatgggacgatgttaagtttcatggagatcgaaataccaagggacatccaatggcagagagaaaatcatcctcatctagaactggatcaaaagagctcttatggtcctcagaacacagatctcaaccagaactgagtggtggaaaaagcgccctcaactctgagtcggcttcagaattggaattagtggctccgactcaggctcgactgaccaaagaacatcgctggggaagcgcattactttctagaaaccactccttagaagaagagtttgaaagggcaaaagcagcagtggagtcagatacagagttttgggataagatgcaagcagaatgggaagaaatggctcggaggaactggatatctgagaaccaagaagcccagaaccaagtaaccatctcggctagtgagaagggatattactttcacactgaaaaccccttcaaggactggcctggagcatttgaagaaggcttaaaaaggctgaaggaaggggatctgccagtcaccatcctgttcatggaagcagcaattcttcaggaccctggagatgcagaggcatggcagttcctcgggataacccaggcggagaatgaaaatgaacaagcagctattgtcgccctccagaggtgcttagaattacagcccaacaacttaaaagctttgatggccttggctgtgagttatactaacactggccatcagcaggatgcctgtgacgctctgaagaattggattaagcaaaatccaaagtacaaataccttgtgaaaagcaagaagggatctccaggcctcacccggcggatgtctaagtccccagttgatagctctgttctggaaggggtgaaggaattatatctggaagctgcccaccaaaatggagatatgatcgacccagacctgcagacaggtctaggggttctgttccacctgagtggagaatttaatagagcaatagatgcatttaacgctgccttaactgttcggccagaggactattcactatggaaccgcctcggggcgaccttggcgaacggagaccgcagcgaggaagccgtggaggcctatacgcgagcactggagattcagccaggattcatccggtccagatacaacctaggaataagctgcatcaacctgggcgcctacagagaagcggtcagcaattttctcactgccctcagtttgcaaagaaagagcaggaatcagcagcaagttcctcatcctgcaatctctgggaatatctgggctgccctcagaattgcgctctctctgatggaccaaccagaactcttccaggcggctaatcttggtgacctggatgtcctcttaagagctttcaacttggatccttgaagaaagaataataccagtactaataatccctgatctgtgtgattgtactgaaaaatcaaaaactattttattatgaatttcaaaaggataaatcaaatattcaaaaggccatggtcatatagcccaaggaaattaattcctgtggacaatgcccagtctctgttcagatccaaaagcac

SEQ ID NO: 21989 - DNA, 9082 bp, Homo sapiens
  source 1..9082: mol_type = unassigned DNA
gagaaagagttcggcgaagaaggagtgagttctagagacgccccgcgagcaggacccgcgcctgcaggagagcctggccgacccggctcctcgccttctctgcgcgctctcccgcgtccgctttcagcaccccgagcggagaacagttcccggcagcccgcagcgctgccgagtggccgccggccggccgagtacccggagctccagggggctcaggagcaccctctgagaacccgctgtgcacccaccttttcccctcttttggtgggcaagtaagcacgggggaaaagcatccggtggcctcagggagccctgaagaaaccgaagcagaatgtaccagggacacatgcagaaaagtaaagaacaaggatatggaaaactaagcagtgatgaagacctcgaaataattgttgatcaaaagcagggaaaaggctctagggcggcagataaggctgttgccatggtgatgaaggagataccgagggaggagtctgctgaagaaaagcccctccttactatgacatcacagctggtgaatgagcaacaagaaagcagacccctcctgagtccctccatcgatgactttctctgtgaaaccaaatcggaagcaatagcaaggccagtaacatccaatacagctgtattgaccactggcttagatctcctcgacctgagtgaaccagtctctcaaacccaaaccaaagccaagaagtcagagccctcatcaaaaacctcatccctcaagaaaaaggccgatggatctgacctcatcagcacggatgctgagcagagaggccagcctctcagagtcccggagacttcatccttagatctagacattcaaacacaactggaaaaatgggacgatgttaagtttcatggagatcgaaataccaagggacatccaatggcagagagaaaatcatcctcatctagaactggatcaaaagagctcttatggtcctcagaacacagatctcaaccagaactgagtggtggaaaaagcgccctcaactctgagtcggcttcagaattggaattagtggctccgactcaggctcgactgaccaaagaacatcgctggggaagcgcattactttctagaaaccactccttagaagaagagtttgaaagggcaaaagcagcagtggagtcagatacagagttttgggataagatgcaagcagaatgggaagaaatggctcggaggaactggatatctgagaaccaagaagcccagaaccaagtaaccatctcggctagtgagaagggatattactttcacactgaaaaccccttcaaggactggcctggagcatttgaagaaggcttaaaaaggctgaaggaaggggatctgccagtcaccatcctgttcatggaagcagcaattcttcaggaccctggagatgcagaggcatggcagttcctcgggataacccaggcggagaatgaaaatgaacaagcagctattgtcgccctccagaggtgcttagaattacagcccaacaacttaaaagctttgatggccttggctgtgagttatactaacactggccatcagcaggatgcctgtgacgctctgaagaattggattaagcaaaatccaaagtacaaataccttgtgaaaagcaagaagggatctccaggcctcacccggcggatgtctaagtccccagttgatagctctgttctggaaggggtgaaggaattatatctggaagctgcccaccaaaatggagatatgatcgacccagacctgcagacaggtctaggggttctgttccacctgagtggagaatttaatagagcaatagatgcatttaacgctgccttaactgttcggccagaggactattcactatggaaccgcctcggggcgaccttggcgaacggagaccgcagcgaggaagccgtggaggcctatacgcgagcactggagattcagccaggattcatccggtccagatacaacctaggaataagctgcatcaacctgggcgcctacagagaagcggtcagcaattttctcactgccctcagtttgcaaagaaagagcaggaatcagcagcaagttcctcatcctgcaatctctgggaatatctgggctgccctcagaattgcgctctctctgatggaccaaccagaactcttccaggcggctaatcttggtgacctggatgtcctcttaagagctttcaacttggatccttgaagaaagaataataccagtactaataatccctgatctgtgtgattgtactgaaaaatcaaaaactattttattatgaatttcaaaaggataaatcaaatattcaaaaggccatggtcatatagcccaaggaaattaattcctgtggacaatgcccagtctctgttcagatccaaaagcacaaaatgttgtatatagagtcaaagtcaggctcaaaagaagaattaagagactcaagacaaaccaagataaagtaactgtgtgttgaatactctttccacaagttgcaagcatattgcaacacatgttctttgggttttttgtctccccttgcagctgatgacacatctgaggaacttgttcatgggaaacatggaaaaagcactgcctcagattgggaaattctgactgtttctgaactgtcttcttttgcaagactgaacatagtttgggccattggtgcatgcacatatattaacttgtgactaaagacagacattgcttaaacctgttccaattttaacttttactgtagccctttgattccagagagggagctttgctggcaaaagcagtttttgcactagaaatttttgctgttcccaatctaaacttttctggtattgtatatatgcactttaatatcttatttatgccttgctggagttttgttttgttgctccaatttttaacttgggggtgaaagatttaagaactcagcctcactagatcaacggaccaaataaacaattcctgaagacagtttttcatagtgtaggattttgaagaagtgtttttcttaaagcagatacgatgacataaggcgtaaatatggcaaacagatcttttcattcacgtgctttctgggtctgtatgaacataagtaagacacaaggtactgtctcttcatgcattctctgcaggaagaaagtttgatggtatcgtgatttctattgagttcaaattaacttgcttaagtgtcatactttactggctttgccctgcacaccaatattccttttaaaccataaatattttaaataatatttcttaagagtgataaataacattttttcctaaaaattatgttttcttagtttcataataatctgcactgttcatccccttgcattctaagtgatagaagagcaacactttcaaaccaaatctcactgaatgccagtgatttcatatgaaagatgcatgcctctttggctctttgaacatttagcaagtattgggaattttctattagcagtggtgttttaattggttgaattccacttagttctccacagtgttttgtatgtgtttggggcttggtgattattttgaaagatacattttttaaagaattaggaacattttttgcaaaatgctaatcagaatataattttcccaatgtcaggtatagaagttatcccattcttctttacctggtctccttccttcgtctagaaccttccccacagtagctaatcctaacaactttttatttatgttctttgataataatagctcatcccgctcatgattatagctacccacaaaaaataaaacaacaacaacaaaaaagactccacagaattgggatcaaaacagtctaattggctggggaataagcttctactgaggagtaaatgtgcacacgtgcttatcaattgaatgcgaggtacaggaataaaatcctctcctctgttacatctgaagtccttgggttgtgagagggcctcaagttaacagaaaccacaagtccttgaggcttacatatgttataacctattctagtttataaagacaaaaagctgaggccactgtgaggagtgccaggttttgatagtcattgtcaaagttgacttgggccaggtggtagctccagctggtcagcagaaggcagaggcattcaggcactcatcatgggtagcagcgaccacccagtctcagaccgtgcttctctacagtctcagcagcaaagtaaagctcaacaatgctttcaagaatggtattgtaagaattgtagaattcgagaaacccagtctggtaaggactcttggggccagcctccaagccatggcagggcctgcttgaatatgcctgattaagcatcctttccttccctgctccttcctcctgccatctctgtaccttgaccagaaagtcggcatgaatagttcatggacaaaggattgaatagcctctgaacaaaggattcaaagcaaactttgtaagtgttctgtgatgccattctatactttgagcagcagctgaatctgcagcctggatttaaagcctgaaactagtataaatgtcaaataattaatttgttgctaaatggtggcaaattttgtggcccaagttttattttgctattggaacacaaactccaaggagctgttttagggaagactaaacaatcttccattcttaccattatttggcaatttgcagagcatttagtagtactttctctagtgtatgtagtatctgtcagatctaagatttttataggctgtcaagaagtccagaattacggcccaagaggaaaagagttgcatttttcaataatattttttataaaattaagttaaaaccattattaaaacatgagtgacaggccaggtgcggtggctcacgcctgtaatcctagcactttgggaggcagaggcgggcagaccacgaggtcaggagttcgagaccagcctgaccaacatggtgaaaccccgtctttattaagaatacaaaaattagccgggtgtagtggtatgcacctgtaataccagctactcaggaggctgaggcaggagaatcacttgaaccagggaggcggaggttgcagtgagccgagattgcaccgctgcactccagtctgggtgacagagcgagactccgtctcaaaaaaaacaaaaaagtgacagtttataggaatagagcaccaccaagaaatcagtagcaagactttagaacagtctttttgtataaatcatatacagtaaatgttttgtttcttagaagtgcatctactttattttttggcagaacaatttttggcatcttatcttcatggcatgaaattgtcatttaaattactctttccgtttgaaaggggagggtatccttatttcccttctgaggtactctgagaaggctttgagtttcctttttcatgtattaatgtataacagcctaacagctcctagaagagggtattcttactagaatggctacatacgggtgacttcagttacatacaggtgacttccagggactgacttcgcctgtagattggatgaaaataaagagaaagccagtgattattgctgagtttcaaaatataaccatttctagtaggctacttctacatgctgttgtaccttcctggtgaggaggagacagagggataggggagaggaggaggaataaaaatccctctcactgggccaatcatactgattcattccctttacttcctccaaaactcactccccatgactcctgaaaaatgggtagatctcgtccaccaggaaattttaatagaatactatgcaccgtgctttctcagtcaatctggattcctactagaacagaaaagtaaggaaacataactgggtaggaatgtccacttacgtttcacaaactcacttttagagtttcatgccactttcctcattcttctctttaagatactattatattgaacgtgggacccatgtctaaatacttgtatagataaatatttcttgtatattcttcccatacaagcaagacttgaatacagttgtagctagtcccacttttataataaaagcttccaaactctttatcataaactttgtctgtgagcttgggaatacagagaaagcaagttgatcattctgagacccttcctcatttgccctgaatcagttccccaagattggactgtactttaagctagttgttgtagcagtggtggttgttgttttatatcttgagatacttctagaacattctagaaacagggtattctaaaggcttactttatatgccatcctttttgaaccctcttattttagaaattattacacgtgcacacttatgatttcaaccttgtaaaataatttcaaattcatttcgtatccacattttactgcagtttccctatcatcatctcaatagttatagaactggttgaaattaaactgttttgaactaagaagtagatatatatatatatatatatatatatttttttttttttttttaaagagtgttcatagataaactctggcataaagtttgtaaaaaagcaattttttaaaagcaaaacgtataacctcaggtacaaaaatattgcatgcattagtattgcaaatttgcctactcaaatattaaccaaagcatgcaagataacttgactgaatttaaatttacacagtgcatgattaagtctcataggttagcctgttgttccttgcctctatacaagggagcatttttatgaactttgtgttacagtttttctatttgcttttcttatcctatccttgagattgttttcatgctatcacactgaactttacagatattcacacatctggtttctacagtgttaccagtgccaaactaatcctctgaagaatctgggacatctaaacactttttcaaaaaccagttgaggcacaacagatcccaaacttaaacaaatccaagtgtctgaatgctactaaactaaatcatgttgactgcctcagcacataaaggtttcgactttaaattcttaataatgcatttcaaaatttttctaaaagtttgggaataaattagaaaaactgatattctaaataaggcgaggaggttggggtaatgtcaggcacatcaaaatcatcacacaacgaagtagatatggggccttaattttcataaatgtcacatagcaagtgtgtggggtatcacaacattgttctgatacagccctgtttgtatggtagttgagctgcttgggctaaatgtcccttgagaaactggacttgatcaacaggtctaaaaacactgatatttagggagtgatgaggtgatttcacggtcactcagaaccaactctgaaatcttctcactgccttttcccataacccctattttatgaggagaccagaaagggagagagcaaagctcagtgagaccatgtggtcttacattagtaacagctttgttactcactccatataccccggtaccctcacacacataccatgaactcaaagacagaattctacacataacacacatagcaaagacgattgtggggaggcattaaacagttaagaggaaaaaaaaaaacacagaaaattaaactgtgaggtttaacaacctctcatgtggtattttgccttgaacgaagtttccactacctgcagcttctgcagaaataccaaaataacacagtctagagacaagtgtcccaatgtcagaactgttttctcaggaccttctctataagagaaaactaacttgcaatgctgcagaatgtcagagcaaaaccctgatgagctccgtgggatacttaatagaagcctgcactcaaaataatattaagatggaaacaacaacaacaattaggcagttctttgctcaactataaaatgtgtatcattcattgggggagggggaggggtcgtgttctttggatttcttggaaagggaaatggtataacacaaaaagactaagaggtatacacactcagctcggtaattcgagcatttggcattttcactgagatatatagcatttctgcatggataccatacaagaattctgccatgtgagaaatgtgttcatgatggactacattaccagtagttaagggaaatacagcaaacttaagtttttaccaacttcctttcatgttccctatatatcatctaacccaaactttcaatttacattgcccaaatttgtttacattggttgaaaaaaaactgattaatttattaaactttttacaaactgtaacaaacatttaactatttagaaaagacatttctacatattttatatatctatgaatattgcatctctaatctaatctaaaaatgttgttttgagacaattcttctgtgatgcttcctcctcatgctcataaatgtttaaagtcttgggatttcattttcaggctgaaatagataacaagaaaaaaatttaagtttaaatgtttacattgcgttactaaattaataccaattcaaattaagtgacctatagtaaattaatggcaatgggggggaggggattttaaagtgattggcatattatgtgatactgtatcagtgatttagtgaaataatatgtatcatagcacaactctgttgggtattaaggcttcatcttagtatttccctgcgttgctctttgaaataaaattactaccataaaaataacctcttatcatattgatgtgtttaatttactcagttggcttctaatttgcgtaacaagattaaggtagtatttttgtactattattggaagcatgccttccctttttcacattattaaattgtatttatatttgtgcaattttaaactatgttttcaaataaactttgtctgcggcttcgaggtcttttcaggaatctttcaaaatgggatttggggatcagaactccttctgatcaaatggaatccaatttgtactactggctaaaggtccttttattaaatattgaatatcactacatatgattttgcatgagctatctggaaatcaggaatgcatttttggatataaaacaaaactttaaaaatcttcctcctttgttaattttttaagactaaaatattatttaacctgaaattgaattttgtgattctttttagaataaaaatattaaaataaa

SEQ ID NO: 21990 - DNA, 2361 bp, Homo sapiens
  source 1..2361: mol_type = unassigned DNA
ctttggctactgtgaaagaccacgcagaagctgtggacttgctttttgtgcttgacaaaagtgcatagatagaagacagggattcccggctgggaggagggaggagagctgaagatccctgcctgggctggctgagctaagcaaagtgggaagctgagtgcttgaaagaggattatgctcgcactagaaataagcaaaaagtaaagaacaaggatatggaaaactaagcagtgatgaagacctcgaaataattgttgatcaaaagcagggaaaaggctctagggcggcagataaggctgttgccatggtgatgaaggagataccgagggaggagtctgctgaagaaaagcccctccttactatgacatcacagctggtgaatgagcaacaagaaagcagacccctcctgagtccctccatcgatgactttctctgtgaaaccaaatcggaagcaatagcaaggccagtaacatccaatacagctgtattgaccactggcttagatctcctcgacctgagtgaaccagtctctcaaacccaaaccaaagccaagaagtcagagccctcatcaaaaacctcatccctcaagaaaaaggccgatggatctgacctcatcagcacggatgctgagcagagaggccagcctctcagagtcccggagacttcatccttagatctagacattcaaacacaactggaaaaatgggacgatgttaagtttcatggagatcgaaataccaagggacatccaatggcagagagaaaatcatcctcatctagaactggatcaaaagagctcttatggtcctcagaacacagatctcaaccagaactgagtggtggaaaaagcgccctcaactctgagtcggcttcagaattggaattagtggctccgactcaggctcgactgaccaaagaacatcgctggggaagcgcattactttctagaaaccactccttagaagaagagtttgaaagggcaaaagcagcagtggagtcagatacagagttttgggataagatgcaagcagaatgggaagaaatggctcggaggaactggatatctgagaaccaagaagcccagaaccaagtaaccatctcggctagtgagaagggatattactttcacactgaaaaccccttcaaggactggcctggagcatttgaagaaggcttaaaaaggctgaaggaaggggatctgccagtcaccatcctgttcatggaagcagcaattcttcaggaccctggagatgcagaggcatggcagttcctcgggataacccaggcggagaatgaaaatgaacaagcagctattgtcgccctccagaggtgcttagaattacagcccaacaacttaaaagctttgatggccttggctgtgagttatactaacactggccatcagcaggatgcctgtgacgctctgaagaattggattaagcaaaatccaaagtacaaataccttgtgaaaagcaagaagggatctccaggcctcacccggcggatgtctaagtccccagttgatagctctgttctggaaggggtgaaggaattatatctggaagctgcccaccaaaatggagatatgatcgacccagacctgcagacaggtctaggggttctgttccacctgagtggagaatttaatagagcaatagatgcatttaacgctgccttaactgttcggccagaggactattcactatggaaccgcctcggggcgaccttggcgaacggagaccgcagcgaggaagccgtggaggcctatacgcgagcactggagattcagccaggattcatccggtccagatacaacctaggaataagctgcatcaacctgggcgcctacagagaagcggtcagcaattttctcactgccctcagtttgcaaagaaagagcaggaatcagcagcaagttcctcatcctgcaatctctgggaatatctgggctgccctcagaattgcgctctctctgatggaccaaccagaactcttccaggcggctaatcttggtgacctggatgtcctcttaagagctttcaacttggatccttgaagaaagaataataccagtactaataatccctgatctgtgtgattgtactgaaaaatcaaaaactattttattatgaatttcaaaaggataaatcaaatattcaaaaggccatggtcatatagcccaaggaaattaattcctgtggacaatgcccagtctctgttcagatccaaaagcacaaaatgttgtatatagagtcaaagtcaggctcaaaagaagaattaagagactcaagacaaaccaagataaagtaactgtgtgttgaatactctttccacaagttgcaagcatattgcaacacatgt

SEQ ID NO: 21991 - DNA, 2992 bp, Homo sapiens
  source 1..2992: mol_type = unassigned DNA
gagaacggcgcgcgccccgctcggcagctgcggcggcggctggtgtaggcgctcacgtcagggctgggaggagggggttcgcagctcagagagagagagacatgaggcaacctggcaggaagcgagaaagagttcggcgaagaaggagtgagttctagagacgccccgcgagcaggacccgcgcctgcaggagagcctggccgacccggctcctcgccttctctgcgcgctctcccgcgtccgctttcagcaccccgagcggagaacagttcccggcagcccgcagcgctgccgagtggccgccggccggccgagtacccggagctccagggggctcaggagcaccctctgagaacccgctgtgcacccaccttttcccctcttttggtgggcaagtaagcacgggggaaaagcatccggtggcctcagggagccctgaagaaaccgaagcagaatgtaccagggacacatgcagaaaagtaaagaacaaggatatggaaaactaagcagtgatgaagacctcgaaataattgttgatcaaaagcagctggtgaatgagcaacaagaaagcagacccctcctgagtccctccatcgatgactttctctgtgaaaccaaatcggaagcaatagcaaggccagtaacatccaatacagctgtattgaccactggcttagatctcctcgacctgagtgaaccagtctctcaaacccaaaccaaagccaagaagtcagagccctcatcaaaaacctcatccctcaagaaaaaggccgatggatctgacctcatcagcacggatgctgagcagagaggccagcctctcagagtcccggagacttcatccttagatctagacattcaaacacaactggaaaaatgggacgatgttaagtttcatggagatcgaaataccaagggacatccaatggcagagagaaaatcatcctcatctagaactggatcaaaagagctcttatggtcctcagaacacagatctcaaccagaactgagtggtggaaaaagcgccctcaactctgagtcggcttcagaattggaattagtggctccgactcaggctcgactgaccaaagaacatcgctggggaagcgcattactttctagaaaccactccttagaagaagagtttgaaagggcaaaagcagcagtggagtcagatacagagttttgggataagatgcaagcagaatgggaagaaatggctcggaggaactggatatctgagaaccaagaagcccagaaccaagtaaccatctcggctagtgagaagggatattactttcacactgaaaaccccttcaaggactggcctggagcatttgaagaaggcttaaaaaggctgaaggaaggggatctgccagtcaccatcctgttcatggaagcagcaattcttcaggaccctggagatgcagaggcatggcagttcctcgggataacccaggcggagaatgaaaatgaacaagcagctattgtcgccctccagaggtgcttagaattacagcccaacaacttaaaagctttgatggccttggctgtgagttatactaacactggccatcagcaggatgcctgtgacgctctgaagaattggattaagcaaaatccaaagtacaaataccttgtgaaaagcaagaagggatctccaggcctcacccggcggatgtctaagtccccagttgatagctctgttctggaaggggtgaaggaattatatctggaagctgcccaccaaaatggagatatgatcgacccagacctgcagacaggtctaggggttctgttccacctgagtggagaatttaatagagcaatagatgcatttaacgctgccttaactgttcggccagaggactattcactatggaaccgcctcggggcgaccttggcgaacggagaccgcagcgaggaagccgtggaggcctatacgcgagcactggagattcagccaggattcatccggtccagatacaacctaggaataagctgcatcaacctgggcgcctacagagaagcggtcagcaattttctcactgccctcagtttgcaaagaaagagcaggaatcagcagcaagttcctcatcctgcaatctctgggaatatctgggctgccctcagaattgcgctctctctgatggaccaaccagaactcttccaggcggctaatcttggtgacctggatgtcctcttaagagctttcaacttggatccttgaagaaagaataataccagtactaataatccctgatctgtgtgattgtactgaaaaatcaaaaactattttattatgaatttcaaaaggataaatcaaatattcaaaaggccatggtcatatagcccaaggaaattaattcctgtggacaatgcccagtctctgttcagatccaaaagcacaaaatgttgtatatagagtcaaagtcaggctcaaaagaagaattaagagactcaagacaaaccaagataaagtaactgtgtgttgaatactctttccacaagttgcaagcatattgcaacacatgttctttgggttttttgtctccccttgcagctgatgacacatctgaggaacttgttcatgggaaacatggaaaaagcactgcctcagattgggaaattctgactgtttctgaactgtcttcttttgcaagactgaacatagtttgggccattggtgcatgcacatatattaacttgtgactaaagacagacattgcttaaacctgttccaattttaacttttactgtagccctttgattccagagagggagctttgctggcaaaagcagtttttgcactagaaatttttgctgttcccaatctaaacttttctggtattgtatatatgcactttaatatcttatttatgccttgctggagttttgttttgttgctccaatttttaacttgggggtgaaagatttaagaactcagcctcactagatcaacggaccaaataaacaattcctgaagacagtt

SEQ ID NO: 21992 - DNA, 2696 bp, Homo sapiens
  source 1..2696: mol_type = unassigned DNA
atggcgctggctgtcttgcgggtcctggagccctttccgaccgagacacccccgttggcagtgctgctgccacccgggggcccgtggccggcggcggagctgggcctggtgctggccctgaggcctgcaggggagagcccggcagggccggcgctgctggtggcagccctggaggggccggacgcgggcaccgaagagcagggtcccgggccgccgcagctactggttagccgcgcgctgctgcggctcctggcactgggctccggggcctgggtgcgggcgcgggcggtgcggcggcccccggcgctaggttgggcactgcttggcacctcgctggggcctgggctcggaccgcgagtcgggccgctgctggtgaggcgcggagagaccctcccagtgcccggaccgcgggtgctggagacgcggccggcgttgcaagggctgctgggcccagggactcggctggctgtgactgagctccgcgggcgggccagactgtgtccagagtctggggacagcagtcggcccccacccccgcccgtggtgtcctcctttgcggtttctggcacagtgcggcgactccagggagttctgggagggactggagattcactaggggtgagccggagctgtctccgtggccttggcctcttccagggcgaatgggtgtgggtggcccaggccagagagtcatcgaacacttcacagccgcacttggctagggtgcaggtcctagaacctcgctgggacctctctgatagactgggacccggctctggaccgctgggagagcccctcgctgacggactggcgcttgtccctgccactttggcttttaatcttggctgtgaccccctggaaatgggagagctcagaattcagaggtacttggaaggctccatcgcccctgaagacaaaggaagctgctcattgctgcctgggcctccatttgccagagagttacacatcgaaattgtgtcttctccccactacagcactaatggaaattatgacggtgttctttaccggcactttcagatacccagggtagtccaggaaggggatgttctatgtgtgccaacaattgggcaagtagagatcctggaaggaagtccagagaaactgcccaggtggcgggaaatgttttttaaagtgaagaaaacagttggggaagctccagatggaccagccagtgcctacttggccgacaccacccatacctccttgtacatggtgggttctaccctgagccctgttccatggctcccttcagaggaatccactctctggagcagtttgtctcctccaggcctggaggccttggtgtctgaactctgtgctgtcctgaagcctcgcctccagccagggggtgccctgctgacaggaactagcagtgtccttctacggggccccccaggctgtgggaagaccacagtagttgctgctgcctgtagtcaccttgggctccacttactgaaggtgccctgctccagcctctgtgcagaaagtagtggggctgtggagacaaaactgcaggccatcttctcccgggcccgccgttgccggcctgcagtcctgttgctcacagctgtggaccttctgggccgggaccgtgatgggctgggtgaggatgcccgtgtgatggctgtgctgcgtcacctcctcctcaatgaggaccccctcaacagctgccctcccctcatggttgtggccaccacaagccgggcccaggacctgcctgctgatgtgcagacagcatttcctcatgagctcgaggtgcctgctctgtcagaggggcagcggctcagcatcctgcgggccctcactgcccaccttcccctgggccaggaggtgaacttggcacagctagcacggcggtgtgcaggctttgtggtaggggatctctatgcccttctgacccacagcagccgggcagcctgcaccaggatcaagaactcaggtttggcaggtggcttgactgaggaggatgagggggagctgtgtgctgccggctttcctctcctggctgaggactttgggcaggcactggagcaactgcagacagctcactcccaggccgttggagcccccaaggtggagaccaagtccttggagtgtttgccagggccagggctgcagctccatgcattatcttctttgatgaactggactctttggccccaagccgggggcgaagtggagattctggaggagtgatggacagggtggtgtctcagctccttgccgagctagatgggctgcacagcactcaggatgtgtttgtgattggagccaccaacagaccagatctcctggaccctgcccttctgcggcctggcagatttgacaagctggtgtttgtgggggcaaatgaggaccgggcctcccagctacgcgttctaagtgccatcacacgcaaattcaagctagagccatctgtgagcctggtaaacgtgctagattgctgccctccccagctgacgggcgcggacctctactctctctgctctgatgctatgacagctgccctcaaacgcagggttcatgacctggaggaagggctggagccaggtagctcagcactgatgctcaccatggaggacttgctgcaggctgccgcccggctgcaaccctcagtcagtgagcaggagctgctccggtacaagcgcatccagcgcaagtttgctgcctgctag

SEQ ID NO: 21993 - DNA, 3478 bp, Homo sapiens
  source 1..3478: mol_type = unassigned DNA
acactagtcgtctggctctctggctccggaagctgcgctccttcaccctcctcgttggtgtcctgtcaccatggcgctggctgtcttgcgggtcctggagccctttccgaccgagacacccccgttggcagtgctgctgccacccgggggcccgtggccggcggcggagctgggcctggtgctggccctgaggcctgcaggggagagcccggcagggccggcgctgctggtggcagccctggaggggccggacgcgggcaccgaagagcagggtcccgggccgccgcagctactggttagccgcgcgctgctgcggctcctggcactgggctccggggcctgggtgcgggcgcgggcggtgcggcggcccccggcgctaggttgggcactgcttggcacctcgctggggcctgggctcggaccgcgagtcgggccgctgctggtgaggcgcggagagaccctcccagtgcccggaccgcgggtgctggagacgcggccggcgttgcaagggctgctgggcccagggactcggctggctgtgactgagctccgcgggcgggccagactgtgtccagagtctggggacagcagtcggcccccacccccgcccgtggtgtcctcctttgcggtttctggcacagtgcggcgactccagggagttctgggagggactggagattcactaggggtgagccggagctgtctccgtggccttggcctcttccagggcgaatgggtgtgggtggcccaggccagagagtcatcgaacacttcacagccgcacttggctagggtgcaggtcctagaacctcgctgggacctctctgatagactgggacccggctctggaccgctgggagagcccctcgctgacggactggcgcttgtccctgccactttggcttttaatcttggctgtgaccccctggaaatgggagagctcagaattcagaggtacttggaaggctccatcgcccctgaagacaaaggaagctgctcattgctgcctgggcctccatttgccagagagttacacatcgaaattgtgtcttctccccactacagcactaatggaaattatgacggtgttctttaccggcactttcagatacccagggtagtccaggaaggggatgttctatgtgtgccaacaattgggcaagtagagatcctggaaggaagtccagagaaactgcccaggtggcgggaaatgttttttaaagtgaagaaaacagttggggaagctccagatggaccagccagtgcctacttggccgacaccacccatacctccttgtacatggtgggttctaccctgagccctgttccatggctcccttcagaggaatccactctctggagcagtttgtctcctccaggcctggaggccttggtgtctgaactctgtgctgtcctgaagcctcgcctccagccagggggtgccctgctgacaggaactagcagtgtccttctacggggccccccaggctgtgggaagaccacagtagttgctgctgcctgtagtcaccttgggctccacttactgaaggtgccctgctccagcctctgtgcagaaagtagtggggctgtggagacaaaactgcaggccatcttctcccgggcccgccgttgccggcctgcagtcctgttgctcacagctgtggaccttctgggccgggaccgtgatgggctgggtgaggatgcccgtgtgatggctgtgctgcgtcacctcctcctcaatgaggaccccctcaacagctgccctcccctcatggttgtggccaccacaagccgggcccaggacctgcctgctgatgtgcagacagcatttcctcatgagctcgaggtgcctgctctgtcagaggggcagcggctcagcatcctgcgggccctcactgcccaccttcccctgggccaggaggtgaacttggcacagctagcacggcggtgtgcaggctttgtggtaggggatctctatgcccttctgacccacagcagccgggcagcctgcaccaggatcaagaactcaggtttggcaggtggcttgactgaggaggatgagggggagctgtgtgctgccggctttcctctcctggctgaggactttgggcaggcactggagcaactgcagacagctcactcccaggccgttggagcccccaagatcccctcagtgtcctggcatgatgtgggtgggctgcaggaggtgaagaaggagatcctggagaccattcagctccccctggagcaccctgagctactgagcctgggcctgagacgctcaggccttctgctccatgggccccctggcaccggcaagacccttctggccaaggcagtagccactgagtgcagccttaccttcctcagcgtgaaggggccagagctcattaacatgtatgtgggccaaagtgaggagaatgtgcgggaagtgtttgccagggccagggctgcagctccatgcattatcttctttgatgaactggactctttggccccaagccgggggcgaagtggagattctggaggagtgatggacagggtggtgtctcagctccttgccgagctagatgggctgcacagcactcaggatgtgtttgtgattggagccaccaacagaccagatctcctggaccctgcccttctgcggcctggcagatttgacaagctggtgtttgtgggggcaaatgaggaccgggcctcccagctacgcgttctaagtgccatcacacgcaaattcaagctagagccatctgtgagcctggtaaacgtgctagattgctgccctccccagctgacgggcgcggacctctactctctctgctctgatgctatgacagctgccctcaaacgcagggttcatgacctggaggaagggctggagccaggtagctcagcactgatgctcaccatggaggacttgctgcaggctgccgcccggctgcaaccctcagtcagtgagcaggagctgctccggtacaagcgcatccagcgcaagtttgctgcctgctaggagccccccagggtctgggaccccgctcagcatggctgcaggtaccttgatagcccacagagagatctgggaaggaagggctcctcctcaggctgctgccaacccacctggaggccacctccctccaggagatcccagggtgcaaagtggcattgagacagcagcaacagctcaagagatatctcctgcctacttgcccctccttccaggccggctctaagagaaaggcccatctactcaggaagagggccagggccttgggttctggggattgggccctgagagggctagttctgtggctgaaaataaagcatgtcccgccccctactggtgttgtggcatgaaaggttggagtgagaaagagcagggttgtgggaggagtaagccctgggagagggtgggggggtgggcagcatgggagcctgatccttctgacataaataaacacaatgcatgcaggaactg

SEQ ID NO: 21994 - DNA, 1448 bp, Homo sapiens
  source 1..1448: mol_type = unassigned DNA
tctctctaaccgcgccagtgtgcctccgactcggaacggcttccgcggccggggcagcgagggccgggggcggcgggcgggatgagtgcggtgtgcggtggagcggcgcggatgctgcggacgccgggacgccacggctacgccgccgagttctccccgtacctgccgggccgcctggcctgcgccaccgcgcagcactacggcatcgcgggctgtggaaccctactaatattggatccagatgaagctgggctaaggctttttagaagctttgactggaatgatggtttgtttgatgtgacttggagtgagaacaacgaacatgtcctcatcacctgtagtggcgatggctcgctgcagctctgggacactgccaaagctgcagggccactgcaagtctataaagaacacgctcaggaggtgtatagtgttgattggagccaaaccagaggtgaacagcttgtggtgtctggctcatgggatcaaactgtcaaattgtgggatccaactgttggaaagtctctgtgcacctttagaggccatgaaagtattatttatagcacaatctggtctccccacatccctggttgttttgcttcagcctcaggtgatcagactctgagaatatgggatgtgaaggcagcaggagtaagaatcgtgattcctgcacatcaggcagaaatcttgagttgtgactggtgtaaatacaatgagaatttgctggtgaccggggcggttgactgtagtttgagaggctgggacttaaggaatgtacgacaaccagtgtttgaacttcttggtcatacctatgctattaggagggtgaaattttcaccatttcatgcttctgtgctggcctcttgctcgtatgattttactgtaagattctggaacttttcaaagcctgactctcttcttgaaacagtggagcatcatacagagtttacttgtggtttagacttcagtcttcagagccccactcaggtggctgactgttcttgggatgaaacaataaagatctatgaccctgcttgtcttactattcctgcttgagatacactactttggtcagaaacagaggatgttggctgaagaactgcctaacagcaaataaattaactatggaaaacatagacattatgcttttatatgctattcagatttcaaatctttccaatttaccctggaatcagttttgagggagctgataaagactttagctgactcgttaagcctgatacataagccatatttaaaattctaagaaataattaatgttatgatatatcttgtagtatctattaaaatgtctctgggtcataaaatggattaaaatatgggagatcagtaggttatacttatatagatagtgatatatttcatttttaatttgtcatttttgatgtaaaatataatcactgctgtgataaataaactatctattgatc

SEQ ID NO: 21995 - DNA, 680 bp, Homo sapiens
  source 1..680: mol_type = unassigned DNA
gcctggtctctctaaccgcgccagtgtgcctccgactcggaacggcttccgcggccggggcagcgagggccgggggcggcgggcgggatgagtgcggtgtgcggtggagcggcgcggatgctgcggacgccgggacgccacggctacgccgccgagttctccccgtacctgccgggccgcctggcctgcgccaccgcgcagcactacggcatcgcgggctgtggaaccctactaatattggatccagatgaagctgggctaaggctttttagaagctttgactggaatgatggtttgtttgatgtgacttggagtgagaacaacgaacatgtcctcatcacctgtagtggcgatggctcgctgcagctctgggacactgccaaagctgcagggccactgcaagtctataaagaacacgctcaggagtatgttcagggaagctgtgttgtgaaatagaagagcaactaatgggtcattttcttctgtggaagagagtatataataaagacgtatagcatggttttagtcaatcttggatttgaatcccagctttgtaagttacctgttgtgagaccttgcgtatgtcacatatttttcctaaacttgagtgtttttatttgcaaactaagtttattagtagtctgtatcacagaccagcattgaataaatatgagctagta

SEQ ID NO: 21996 - DNA, 1539 bp, Homo sapiens
  source 1..1539: mol_type = unassigned DNA
cctggtctctctaaccgcgccagtgtgcctccgactcggaacggcttccgcggccggggcagcgagggccgggggcggcgggcgggatgagtgcggtgtgcggtggagcggcgcggatgctgcggacgccgggacgccacggctacgccgccgagttctccccgtacctgccgggccgcctggcctgcgccaccgcgcagcactacggcatcgcgggctgtggaaccctactaatattggatccagatgaagctgggctaaggctttttagaagctttgactggaatgatggtttgtttgatgtgacttggagtgagaacaacgaacatgtcctcatcacctgtagtggcgatggctcgctgcagctctgggacactgccaaagctgcagggccactgcaagtctataaagaacacgctcaggaggtgtatagtgttgattggagccaaaccagaggtgaacagcttgtggtgtctggctcatgggatcaaactgtcaaattgtgggatccaactgttggaaagtctctgtgcacctttagaggccatgaaagtattatttatagcacaatctggtctccccacatccctggttgttttgcttcagcctcaggtgatcagactctgagaatatgggatgtgaaggcagcaggagtaagaatcgtgattcctgcacatcaggcagaaatcttgagttgtgactggtgtaaatacaatgagaatttgctggtgaccggggcggttgactgtagtttgagaggctgggacttaaggaatgtacgacaaccagtgtttgaacttcttggtcatacctatgctattaggagggtgaaaatggagtcttgccctgtcacccagacacgatctcagctcactgcaacctctgccttctgggttcaagctgttctcctgcctcagcctactgagtagctgggactacagttttcaccatttcatgcttctgtgctggcctcttgctcgtatgattttactgtaagattctggaacttttcaaagcctgactctcttcttgaaacagtggagcatcatacagagtttacttgtggtttagacttcagtcttcagagccccactcaggtggctgactgttcttgggatgaaacaataaagatctatgaccctgcttgtcttactattcctgcttgagatacactactttggtcagaaacagaggatgttggctgaagaactgcctaacagcaaataaattaactatggaaaacatagacattatgcttttatatgctattcagatttcaaatctttccaatttaccctggaatcagttttgagggagctgataaagactttagctgactcgttaagcctgatacataagccatatttaaaattctaagaaataattaatgttatgatatatcttgtagtatctattaaaatgtctctgggtcataaaatggattaaaatatgggagatcagtaggttatacttatatagatagtgatatatttcatttttaatttgtcatttttgatgtaaaatataatcactgctgtg

SEQ ID NO: 21997 - DNA, 1853 bp, Homo sapiens
  source 1..1853: mol_type = unassigned DNA
tccgcccgcccgcctcgaatgtccctgagacccagaagggcctgcgctcagctgctctggcaccccgctgcagggatggcctcctgggctaagggcaggagctacctggcgcctggtttgctgcagggccaagtggccatcgtcaccggcggggccacgggcatcggaaaagccatcgtgaaggagctcctggagctggggagtaatgtggtcattgcatcccgtaagttggagagattgaagtctgcggcagatgaactgcaggccaacctacctcccacaaagcaggcacgagtcattcccatacaatgcaacatccggaatgaggaggaggtgaataatttggtcaaatctaccttagatacttttggtaagatcaatttcttggtgaacaatggaggaggccagtttctttcccctgctgaacacatcagttctaagggatggcacgctgtgcttgagaccaacctgacgggtaccttctacatgtgcaaagcagtttacagctcctggatgaaagagcatggaggatctatcgtcaatatcattgtccctactaaagctggatttccattagctgtgcattctggagctgcaagagcaggtgtttacaacctcaccaaatctttagctttggaatgggcctgcagtggaatacggatcaattgtgttgcccctggagttatttattcccagactgctgtggagaactatggttcctggggacaaagcttctttgaagggtcttttcagaaaatccccgctaaacgaattggtgttcctgaggaggtctcctctgtggtctgcttcctactgtctcctgcagcttccttcatcactggacagtcggtggatgtggatgggggccggagtctctatactcactcgtatgaggtaccagatcatgacaactggcccaagggagcaggggacctttctgttgtcaaaaagatgaaggagacctttaaggagaaagctaagctctgagctgaggaaacaaggtgtcctccatcccccagtgccttcacatcttgaggatatgcttctgtactttttaaaagcttatagttggtatggaaaacatttttcttatttttaagtgttattaattatatctatggaaaaactattcctgaaatatatacagtcttatgtcccaatcagagtcttttaacctatgatttaaaaatgtataagtaacagaaattaacatattttaatgactttactttttatttctaagaaaagtatttgaaaaatggaataattttaaatcaatgataattctagggatcatgaactcccagaagattttattatttaattgtaaaggtagaggccagacgcagtggctcacgcctgtaattccagcactttgggaggccgaggtaggcgggtcagttgaggtcaggagttcaagaccaggctggccaacatggtaaaaccctgtctctactgaaaaacaacaaaaacaaaaacacaaattagtcgggtgtggtggcacacacctgtagtcccaggtacttgggaggctgaggcaggaggatcgcttgaacccaggaagcagaggttgcagtgagctgagatcatgctactgcagtccagcctgggctacagagtgagactgcatctcaaaaaaaacccaaaaaacaaaaacaaacaacaacaacaaaattataaaggtagaaaataaacctaaattgtgtcgtaattaagattattaaaattagaattatacaatgacttatttttggtggcaaatactttaggagcaataatgccttatggtaattattgatgtatagtttcttttgtttatgaagtcaaatttgtataaattctcttaattcaaa

SEQ ID NO: 21998 - DNA, 9965 bp, Homo sapiens
  source 1..9965: mol_type = unassigned DNA
gcgccgcctccttcggcgttcgccccacggaccggcaggcggcggaccgcggcccaggctgaagctcagggccctgtctgctctgtggactcaacagtttgtggcaagacaagctcagaactgagaagctgtcaccacagtagcttggagctcggcggcacaaccagcaccatctggtcgcgatggtggacacggaaagcccactctgccccctctccccactcgaggccggcgatctagagagcccgttatctgaagagttcctgcaagaaatgggaaacatccaagagatttcgcaatccatcggcgaggatagttctggaagctttggctttacggaataccagtatttaggaagctgtcctggctcagatggctcggtcatcacggacacgctttcaccagcttcgagcccctcctcggtgacttatcctgtggtccccggcagcgtggacgagtctcccagtggagcattgaacatcgaatgtagaatctgcggggacaaggcctcaggctatcattacggagtccacgcgtgtgaaggctgcaagggcttctttcggcgaacgattcgactcaagctggtgtatgacaagtgcgaccgcagctgcaagatccagaaaaagaacagaaacaaatgccagtattgtcgatttcacaagtgcctttctgtcgggatgtcacacaacgcgattcgttttggacgaatgccaagatctgagaaagcaaaactgaaagcagaaattcttacctgtgaacatgacatagaagattctgaaactgcagatctcaaatctctggccaagagaatctacgaggcctacttgaagaacttcaacatgaacaaggtcaaagcccgggtcatcctctcaggaaaggccagtaacaatccaccttttgtcatacatgatatggagacactgtgtatggctgagaagacgctggtggccaagctggtggccaatggcatccagaacaaggaggcggaggtccgcatctttcactgctgccagtgcacgtcagtggagaccgtcacggagctcacggaattcgccaaggccatcccaggcttcgcaaacttggacctgaacgatcaagtgacattgctaaaatacggagtttatgaggccatattcgccatgctgtcttctgtgatgaacaaagacgggatgctggtagcgtatggaaatgggtttataactcgtgaattcctaaaaagcctaaggaaaccgttctgtgatatcatggaacccaagtttgattttgccatgaagttcaatgcactggaactggatgacagtgatatctccctttttgtggctgctatcatttgctgtggagatcgtcctggccttctaaacgtaggacacattgaaaaaatgcaggagggtattgtacatgtgctcagactccacctgcagagcaaccacccggacgatatctttctcttcccaaaacttcttcaaaaaatggcagacctccggcagctggtgacggagcatgcgcagctggtgcagatcatcaagaagacggagtcggatgctgcgctgcacccgctactgcaggagatctacagggacatgtactgagttccttcagatcagccacaccttttccaggagttctgaagctgacagcactacaaaggagacgggggagcagcacgattttgcacaaatatccaccactttaaccttagagcttggacagtctgagctgtaggtaaccggcatattattccatatctttgttttaaccagtacttctaagagcatagaactcaaatgctgggggtaggtggctaatctcaggactgggaagattacggcgaattatgctcaatggtctgattttaactcacccgatgttaatcaatgcacattgctttagatcacattcgtgatttaccatttaattaactggtaacctcaaaattcgtggcctgtcttcccattcaccccgcttttgactattgtgctcctttataattctgaaaactaatcagcactttttaacaatgtttataatcctataagtctagatgtatccaaaggtgaagtatgtaaaaagcagcaaaatatttatttcaaagacttcacttctgtttcctgaatctaaagaaagacaacatgctgctttttaatcataggatggagaattttaaagaactgtttgggccaggcacagtcgctcatacttgtaatcccagcactttgggaggccgaggcgggtggatcacaaggtcagcagatcgagaccatcctggccaacatggtgaaaccctgtctctactaaaaatacaaaaattagccgggtgtggtggcacatgcctgtaatcccagctactcgggaagctgaggcaggagaattgcttgaaccagggagttggaggttgcagtgagctaagactgcaccactgcactccagcctggtgacagaacgagactctgtcttaaaaacaaacaaacaaaaaaaaaatctgttagataagctatcaaaatgcagctgttgttttgtttttggctcactgttttcgtggttgtaactaatatgtggaaaggcccatttccaggtttgcgtagaagagcccagaaaacagagtctcaagacccccgctctggactgtcataagctagcacccgtggtaagcgggacgagacaagctcccgaagcccgccagcttcctgctccactcagctccgtccagtcaacctgaacccacccagtccagctgtctgtgggaatggtggtgttcttagggacagactgacaccttacttgtcagtgttcctccgggccccatttggcagctcccgtatcttttgttatgttgcttttaaagatatgatgttttattgttttaactcttggtgacagtagatgctctctggagcgcagacgaggcacatgtgtcttcatagcctgggctgggtgggagccagtcaccctgcggatcgagagagggggtagagtcttcttcaaatggcagttttacttcaaatggcagatttcacaagagttggttattttttacaatggtttaggttgttaagtctcctttgtatgtaaggtagttttttcaacatctaaaatttttgttttagccttcaaaaccaacttaccaacctcagtccagctgggaaggcagcgttgattatggtagtttgtcaagaatatatggacctggaaacactttctctctctgtccacctggtagataaattgtcctgttgagaatttttagatctggactggaactgccaggaccaccgcctccagggagtcgctgggcacctggaggtatcgtcgatgcctctcccccatctttagaaaatttggctcttctgaggtcattattattttaagaatgattaggattgataagggtcccatgaccagcattatgaaaatgcgagagtgggaaggacacagtgtgagacttccactagaaaaaagtgaaagttagggttaggacatccttttttaaaaattacaaatttagtccgttttggtttttgtaatcaggctaggcacagtggctcacacatggaatcccagcactttgggaggccgaggtgggaggatcacttgagcccaggagttcgagaccagcctaggcaacatagcaagaccctgtctgtacacaaaatttaaaaattagttcatcggggtggcacacatcagtagtcccagctactctgcaggctgaggtgggaggattgcttgaacccaggaggtcgaggctgcagtgagctgtgatctcaccactgcattccagcctgggtgacagagttagattccaccctctcccaccccggcaaaaaaaaaaaaaaaagatgcaatcaaaggggctgttggccagcaatggcagcagcagcggcgggcagtctgcccaagtgtcttaggaaccaaaagcaaataaaagtgtttccatatatgccaccagccaagtggccatcctaattcagaaagaagctagcctttgagtgtctgtcatggtgcatccgtttcagtattatttcctaaaatgagaagcccctgtgtcaacaagatccaggggctggagcccaatgccaagcctgtgttgtccccagcgaccctgcagctgctcgctctgatgtaccctgtgccattcaaggagatgtggtccaggaaagtgagcctcatggttttcagagaagtcattgttctgtttacattttcataaaacctgtttaaaatagctccccgtctcaggctttcagcagtaacagtgagctgactggcaagttcgatgttagctcccgggacactcagcagcgatggtgagcattttggtttccttaaggcccagcaagacttccagggacatctctggtgaagccagaatggagacacccgtgacctcaggctgaaagtcactcgacattggtctcttgtgttgatagggaaggaaatcaggcattcctatttctttaaataacaaaaccactaattgccactcaatgctggaatattttgggtcacctaatcatagatttctcagggcatcaatactcaaatataggctgattatgccccagttcaaatgggaactattaacagagtgcatttcttgcttgctgggtttcaacagacatcagccaaaagaacaaaagagatgtcaggacagattccaggagtgtcggagcacatgtgtggcacccgctccctctggcagcgaatgtaggaagtcgccaaatttacccactcttcaacaagtcattgtttaaacacggtttttcattttctcaacttttaatagcaaaaagtgccaaagtcctcagagacctaacagccttggtctaccgtgctgaccagggtgaaggcacggcgagggactcctcccagacgtgcctcttgtgtgccagctggctgtggctcgggagcagacgcaggcctctccattgtccaggggagcctggcggcgcatccctcctctcccacctcctggcacttccagctgggtgtcccacatgttggattccgtccccaccacacttccagagaccggagaactgtgcagggcctaaggccgtttggatgaattgtcaaaacaagatgcttccagttacagcggcaggagcgggactgggagcacgggctgacggctgctggtgcctttcttcccacctcgcttgcctgtttccgcttgacccttcctccagctccgatgagaagagtataaagcatcttcctaacgggtgtgtttgctatacgaacataatggacgtgaagtggggcagaaacccagaactcagcattcaaggatgcccaggagagctgtccctgttttaaagagctgtgttttgttttgtttcgcatttagagagcagacaaggcacccttctgctgcgctgatacgtttcttacactgggccattttagacccccagggaaacagccttcctggagcgttgtctggaggttccagggacagggcagcctcccagagccgagcaagagctcaaggtacaaatgagagatttgctataccgtgagaagtcaacaacttagccaccacttccccgcaatggaccatgtaacaaatacctcagcaggccctgcaaaaggccatgctagagctgaggcgcacagcctgtggcctctgtagttagggcaggtgggatggagactccttgagtgcacacacctgagcctgcccacacacaggggagcagcatctcgtatgacgtctggaaggaacttcggttgtgtaaagggagccttgaagatacgtgcaaaaggtgctaccccaatttggtgaaactgacattgggcacgtcttgggcttaggagaagcggccgatggtcccggcctgcagtgacaaacccccctccccgcaccgcccccagcaccccctctcctcttcacctcttcctgctggccacgaggaagccacttcctcagagagaccctaccagatgcggatggaaacagatgcaccaaagcaagccctgatgaaaccgcgacttcctaaggtctgtctcctctgaacttgcacctgggcctctctgtgtttggttccaagcacttcccacctcaaactcccattttcaaaccactgtatctctgcgcacatctgctacttaccagccgcatacatgatggagggttttttggtcctgatccagtggccacacctgtctttgaaatgtctcactgaactccagttttaaaatagattcattgcttcaacacagcaagcccaatgcacccagctaagactggcttgaccgacagcctggcctttggtggggggcttcctggggcctggggaaagctggccaccttcaacagctggtacctcttcaacagtgtggcctttcaaaatgcagatgccaccaggagaacatgcccacagctcaccacctatggatgccatggctctgggcagctttcaaagcaggttcctgtggtctcctcagctgtttgagggggtaacagcaaatcagcctccattttaaaatgaaaacaccagcctccagatgtagggcctgctgggtgttgctagccgctggtccccaggcacggtgcactttctccacctcctgcagcctccctgttgtttctagactcttgcacctggtgagtgcaaggataggtgacccaggggcctgcagccttgtcctcagctcccatctcctggactgccagcctcaccctctgcagttagcatggttggcctgatgcagggatcccgagggattactttttagaccttctttcacattcagaaaagtagtatagattcaggagaggcaagaaaattatgctgtccatagaagtcacccatgaagactgatgccaccacctgaaggctcatgattgttaaaaatgtccacgggaacctctcgtccacaggaggtttgtctcaacacttcccatttttacggcattggcattgccaagcatggggaagtatctgctcttctcatgttaaaagtggcccagcttttcttaactcagtccaagctgacttgtttagctgcactggaatttcttaccaaccaaatatttgcatcgagcaaagggggctgtgtgcacctccctaatggcagcgatgatggctgctgtcattcaagcccatcttcagacgtcacagtctggaagtgaaatgtccacaaacatctgtggcagaaaaggctatacggaccacccagttgtgctgcagctttacagagcaaggaagggttgtggcaaataaatgattaacctgcctcgactgtgctgagggcaacaaaggccatctcaccaaaggattattcgatgccattaaatcatcccgtgaccttcctgcttccgagtccatggcctttgcccagggcatgtactcccctgagaggccttctgcctagaaagatctatgactgggttccaaagttgaggcctaggtttttgctgggatttagatattttcaggcaccattttgacagcattcaggaaaacggttattgaccccatagactagggtaagaataaaggcaataaatttggtctgactcagaatataggagatccatatatttctctggaaaccacagtgtacactaaaatgtgaaattgaaggttttgttaaaaagaaaaagataatgagcttcatgctttgtttaattacataatgatttccattacgctatttctgtgaaatgcagcaggttcttaaacgttatttcagtggcatgggctggaagcttatcacaaaaagccatgtgtgtggccttatcagaacagaaagagacaggctggtgcccaaggctgctgcctgctccaccttttgccagctctggacatctgaggacgtcccggcagatctggaatggggccctcaactgaccatttgcttctcagaatttcagtttgagacatgagaggtataatcagttacttttctccccccagagaaacccttttgtgaggggagaggagctatggtatgtggttcagctgaaacacatacaactgcatccttttggagtcctttgccaacaaaaacagaccaacagaccagatggtgtccatgttcaatatcatgtcttgatggacgcagctgatgacctcaaatacttgagtggtctcatggctgttagatggattatttgaaaaaaaaaaaaaaaaaagagagaaaaaataattgatttttacatcagagatagcaaactaagacctggggaggggggtcagcttttattttattttattttttttaagtttgctagttgggtcaaatgtgaggaggagggagtctacctgccacctcttctcttgcccctcttctgcccacacatccagcatccaaaatccattcatttaatgaattgataaagtgccgtgcaaactggtgcacaaacaggcccccagtccacgcagcctggctcctaggaaaagtggtgaccgggcgtgggggggcatgccgcagccctgggacacagtcgggcaccttccccggacccccaggccttggctgtgcctcaagtcagagagggtcagccttcaggccccggagacgagtgactggccgatcatttcacaataaaatcactcacttttggcaacttcactttttttaaggcacagtcagttccttttctcatgtacctcacaaaagatgaagaccatgtagtactctttttggtaaagttacagtgttcatgttaaatatcacttttttctacattgtgtggtaaaaagaactacgttaatagctatatcttaaatactgtgatttgactttttgaaaaatatcctaatacaaatattttactaacttacaatcactcatttaataagaaacatttggattcttttgaaatcagtgttaattgactcatattcttaaaagcctggctcttgaccctattggaaacacaaaggaagctgaaatcaaacatctaaaatacactgcgtacacgtgtgcgtgcacacacacacacacacacacacacacacagctcttcatttctcctgagccatgcagaatttactttcaatgtggaaatctgttccctttaccacactgtatatgcacagagcacaagagaggctatctctagtcacttccaccagcgaggccttagactccgtattagaggccaccgatttcatacaacagtgtttcgctaaagacccttcactattcttgtttagtaaatagctgtctgctcttcagggaactgttacctatgggttattaccaaagaacgctggcaattggaaatgtcctgatggaaattctttgcacgtgccggttctctggcatcctccaggtggcccaacccaaagcagaaagcagaaaccacagaccccgtgagtctccccataccttgtttccaataacttggcaaaacttcttggtgcatattggttacaccctctgggattcataatgccattaggctaaaaccctaagagagagggttgacagaaacacacgcgagaatgaggcagatcccagagcaaggactgggcccagactctccacatgtgctctactagtgagtgccttatactctcagtattttggggcttacagcttcttatttgtgctaaaaaggtgcagttccaaagtaggaactgccacacaggccccagcatcctctctccaacttcatacctctctcctggtggggggagcgggcatccaggacctccggaatcaaggatgtgcagagaagagcgaaagtaatttttctagtcacatgaactgattggttccaggcaattagaaaatggctataaaataaccttaattttaaaaaaaaatcttgggtcttcgttttcctattaggagactgaactgaccacatgtattgatttatatcctgaatatatgggaacttctgtgtttgggatgtcctactgtaagactgatgaatgtacagagttaatttcagggtacagttttgccttaatggttttaaaaaataaactattttttaaaatttt

SEQ ID NO: 21999 - DNA, 10048 bp, Homo sapiens
  source 1..10048: mol_type = unassigned DNA
gcgccgcctccttcggcgttcgccccacggaccggcaggcggcggaccgcggcccaggctgaagctcagggccctgtctgctctgtggactcaacagtttgtggcaagacaagctcagaactgagaagctgtcaccacaggtaaatagaaggtttaatttactgtttccagatggaaatatttaagtgttttcagtgtttacttctgttgcactacagaccagtagcttggagctcggcggcacaaccagcaccatctggtcgcgatggtggacacggaaagcccactctgccccctctccccactcgaggccggcgatctagagagcccgttatctgaagagttcctgcaagaaatgggaaacatccaagagatttcgcaatccatcggcgaggatagttctggaagctttggctttacggaataccagtatttaggaagctgtcctggctcagatggctcggtcatcacggacacgctttcaccagcttcgagcccctcctcggtgacttatcctgtggtccccggcagcgtggacgagtctcccagtggagcattgaacatcgaatgtagaatctgcggggacaaggcctcaggctatcattacggagtccacgcgtgtgaaggctgcaagggcttctttcggcgaacgattcgactcaagctggtgtatgacaagtgcgaccgcagctgcaagatccagaaaaagaacagaaacaaatgccagtattgtcgatttcacaagtgcctttctgtcgggatgtcacacaacgcgattcgttttggacgaatgccaagatctgagaaagcaaaactgaaagcagaaattcttacctgtgaacatgacatagaagattctgaaactgcagatctcaaatctctggccaagagaatctacgaggcctacttgaagaacttcaacatgaacaaggtcaaagcccgggtcatcctctcaggaaaggccagtaacaatccaccttttgtcatacatgatatggagacactgtgtatggctgagaagacgctggtggccaagctggtggccaatggcatccagaacaaggaggcggaggtccgcatctttcactgctgccagtgcacgtcagtggagaccgtcacggagctcacggaattcgccaaggccatcccaggcttcgcaaacttggacctgaacgatcaagtgacattgctaaaatacggagtttatgaggccatattcgccatgctgtcttctgtgatgaacaaagacgggatgctggtagcgtatggaaatgggtttataactcgtgaattcctaaaaagcctaaggaaaccgttctgtgatatcatggaacccaagtttgattttgccatgaagttcaatgcactggaactggatgacagtgatatctccctttttgtggctgctatcatttgctgtggagatcgtcctggccttctaaacgtaggacacattgaaaaaatgcaggagggtattgtacatgtgctcagactccacctgcagagcaaccacccggacgatatctttctcttcccaaaacttcttcaaaaaatggcagacctccggcagctggtgacggagcatgcgcagctggtgcagatcatcaagaagacggagtcggatgctgcgctgcacccgctactgcaggagatctacagggacatgtactgagttccttcagatcagccacaccttttccaggagttctgaagctgacagcactacaaaggagacgggggagcagcacgattttgcacaaatatccaccactttaaccttagagcttggacagtctgagctgtaggtaaccggcatattattccatatctttgttttaaccagtacttctaagagcatagaactcaaatgctgggggtaggtggctaatctcaggactgggaagattacggcgaattatgctcaatggtctgattttaactcacccgatgttaatcaatgcacattgctttagatcacattcgtgatttaccatttaattaactggtaacctcaaaattcgtggcctgtcttcccattcaccccgcttttgactattgtgctcctttataattctgaaaactaatcagcactttttaacaatgtttataatcctataagtctagatgtatccaaaggtgaagtatgtaaaaagcagcaaaatatttatttcaaagacttcacttctgtttcctgaatctaaagaaagacaacatgctgctttttaatcataggatggagaattttaaagaactgtttgggccaggcacagtcgctcatacttgtaatcccagcactttgggaggccgaggcgggtggatcacaaggtcagcagatcgagaccatcctggccaacatggtgaaaccctgtctctactaaaaatacaaaaattagccgggtgtggtggcacatgcctgtaatcccagctactcgggaagctgaggcaggagaattgcttgaaccagggagttggaggttgcagtgagctaagactgcaccactgcactccagcctggtgacagaacgagactctgtcttaaaaacaaacaaacaaaaaaaaaatctgttagataagctatcaaaatgcagctgttgttttgtttttggctcactgttttcgtggttgtaactaatatgtggaaaggcccatttccaggtttgcgtagaagagcccagaaaacagagtctcaagacccccgctctggactgtcataagctagcacccgtggtaagcgggacgagacaagctcccgaagcccgccagcttcctgctccactcagctccgtccagtcaacctgaacccacccagtccagctgtctgtgggaatggtggtgttcttagggacagactgacaccttacttgtcagtgttcctccgggccccatttggcagctcccgtatcttttgttatgttgcttttaaagatatgatgttttattgttttaactcttggtgacagtagatgctctctggagcgcagacgaggcacatgtgtcttcatagcctgggctgggtgggagccagtcaccctgcggatcgagagagggggtagagtcttcttcaaatggcagttttacttcaaatggcagatttcacaagagttggttattttttacaatggtttaggttgttaagtctcctttgtatgtaaggtagttttttcaacatctaaaatttttgttttagccttcaaaaccaacttaccaacctcagtccagctgggaaggcagcgttgattatggtagtttgtcaagaatatatggacctggaaacactttctctctctgtccacctggtagataaattgtcctgttgagaatttttagatctggactggaactgccaggaccaccgcctccagggagtcgctgggcacctggaggtatcgtcgatgcctctcccccatctttagaaaatttggctcttctgaggtcattattattttaagaatgattaggattgataagggtcccatgaccagcattatgaaaatgcgagagtgggaaggacacagtgtgagacttccactagaaaaaagtgaaagttagggttaggacatccttttttaaaaattacaaatttagtccgttttggtttttgtaatcaggctaggcacagtggctcacacatggaatcccagcactttgggaggccgaggtgggaggatcacttgagcccaggagttcgagaccagcctaggcaacatagcaagaccctgtctgtacacaaaatttaaaaattagttcatcggggtggcacacatcagtagtcccagctactctgcaggctgaggtgggaggattgcttgaacccaggaggtcgaggctgcagtgagctgtgatctcaccactgcattccagcctgggtgacagagttagattccaccctctcccaccccggcaaaaaaaaaaaaaaaagatgcaatcaaaggggctgttggccagcaatggcagcagcagcggcgggcagtctgcccaagtgtcttaggaaccaaaagcaaataaaagtgtttccatatatgccaccagccaagtggccatcctaattcagaaagaagctagcctttgagtgtctgtcatggtgcatccgtttcagtattatttcctaaaatgagaagcccctgtgtcaacaagatccaggggctggagcccaatgccaagcctgtgttgtccccagcgaccctgcagctgctcgctctgatgtaccctgtgccattcaaggagatgtggtccaggaaagtgagcctcatggttttcagagaagtcattgttctgtttacattttcataaaacctgtttaaaatagctccccgtctcaggctttcagcagtaacagtgagctgactggcaagttcgatgttagctcccgggacactcagcagcgatggtgagcattttggtttccttaaggcccagcaagacttccagggacatctctggtgaagccagaatggagacacccgtgacctcaggctgaaagtcactcgacattggtctcttgtgttgatagggaaggaaatcaggcattcctatttctttaaataacaaaaccactaattgccactcaatgctggaatattttgggtcacctaatcatagatttctcagggcatcaatactcaaatataggctgattatgccccagttcaaatgggaactattaacagagtgcatttcttgcttgctgggtttcaacagacatcagccaaaagaacaaaagagatgtcaggacagattccaggagtgtcggagcacatgtgtggcacccgctccctctggcagcgaatgtaggaagtcgccaaatttacccactcttcaacaagtcattgtttaaacacggtttttcattttctcaacttttaatagcaaaaagtgccaaagtcctcagagacctaacagccttggtctaccgtgctgaccagggtgaaggcacggcgagggactcctcccagacgtgcctcttgtgtgccagctggctgtggctcgggagcagacgcaggcctctccattgtccaggggagcctggcggcgcatccctcctctcccacctcctggcacttccagctgggtgtcccacatgttggattccgtccccaccacacttccagagaccggagaactgtgcagggcctaaggccgtttggatgaattgtcaaaacaagatgcttccagttacagcggcaggagcgggactgggagcacgggctgacggctgctggtgcctttcttcccacctcgcttgcctgtttccgcttgacccttcctccagctccgatgagaagagtataaagcatcttcctaacgggtgtgtttgctatacgaacataatggacgtgaagtggggcagaaacccagaactcagcattcaaggatgcccaggagagctgtccctgttttaaagagctgtgttttgttttgtttcgcatttagagagcagacaaggcacccttctgctgcgctgatacgtttcttacactgggccattttagacccccagggaaacagccttcctggagcgttgtctggaggttccagggacagggcagcctcccagagccgagcaagagctcaaggtacaaatgagagatttgctataccgtgagaagtcaacaacttagccaccacttccccgcaatggaccatgtaacaaatacctcagcaggccctgcaaaaggccatgctagagctgaggcgcacagcctgtggcctctgtagttagggcaggtgggatggagactccttgagtgcacacacctgagcctgcccacacacaggggagcagcatctcgtatgacgtctggaaggaacttcggttgtgtaaagggagccttgaagatacgtgcaaaaggtgctaccccaatttggtgaaactgacattgggcacgtcttgggcttaggagaagcggccgatggtcccggcctgcagtgacaaacccccctccccgcaccgcccccagcaccccctctcctcttcacctcttcctgctggccacgaggaagccacttcctcagagagaccctaccagatgcggatggaaacagatgcaccaaagcaagccctgatgaaaccgcgacttcctaaggtctgtctcctctgaacttgcacctgggcctctctgtgtttggttccaagcacttcccacctcaaactcccattttcaaaccactgtatctctgcgcacatctgctacttaccagccgcatacatgatggagggttttttggtcctgatccagtggccacacctgtctttgaaatgtctcactgaactccagttttaaaatagattcattgcttcaacacagcaagcccaatgcacccagctaagactggcttgaccgacagcctggcctttggtggggggcttcctggggcctggggaaagctggccaccttcaacagctggtacctcttcaacagtgtggcctttcaaaatgcagatgccaccaggagaacatgcccacagctcaccacctatggatgccatggctctgggcagctttcaaagcaggttcctgtggtctcctcagctgtttgagggggtaacagcaaatcagcctccattttaaaatgaaaacaccagcctccagatgtagggcctgctgggtgttgctagccgctggtccccaggcacggtgcactttctccacctcctgcagcctccctgttgtttctagactcttgcacctggtgagtgcaaggataggtgacccaggggcctgcagccttgtcctcagctcccatctcctggactgccagcctcaccctctgcagttagcatggttggcctgatgcagggatcccgagggattactttttagaccttctttcacattcagaaaagtagtatagattcaggagaggcaagaaaattatgctgtccatagaagtcacccatgaagactgatgccaccacctgaaggctcatgattgttaaaaatgtccacgggaacctctcgtccacaggaggtttgtctcaacacttcccatttttacggcattggcattgccaagcatggggaagtatctgctcttctcatgttaaaagtggcccagcttttcttaactcagtccaagctgacttgtttagctgcactggaatttcttaccaaccaaatatttgcatcgagcaaagggggctgtgtgcacctccctaatggcagcgatgatggctgctgtcattcaagcccatcttcagacgtcacagtctggaagtgaaatgtccacaaacatctgtggcagaaaaggctatacggaccacccagttgtgctgcagctttacagagcaaggaagggttgtggcaaataaatgattaacctgcctcgactgtgctgagggcaacaaaggccatctcaccaaaggattattcgatgccattaaatcatcccgtgaccttcctgcttccgagtccatggcctttgcccagggcatgtactcccctgagaggccttctgcctagaaagatctatgactgggttccaaagttgaggcctaggtttttgctgggatttagatattttcaggcaccattttgacagcattcaggaaaacggttattgaccccatagactagggtaagaataaaggcaataaatttggtctgactcagaatataggagatccatatatttctctggaaaccacagtgtacactaaaatgtgaaattgaaggttttgttaaaaagaaaaagataatgagcttcatgctttgtttaattacataatgatttccattacgctatttctgtgaaatgcagcaggttcttaaacgttatttcagtggcatgggctggaagcttatcacaaaaagccatgtgtgtggccttatcagaacagaaagagacaggctggtgcccaaggctgctgcctgctccaccttttgccagctctggacatctgaggacgtcccggcagatctggaatggggccctcaactgaccatttgcttctcagaatttcagtttgagacatgagaggtataatcagttacttttctccccccagagaaacccttttgtgaggggagaggagctatggtatgtggttcagctgaaacacatacaactgcatccttttggagtcctttgccaacaaaaacagaccaacagaccagatggtgtccatgttcaatatcatgtcttgatggacgcagctgatgacctcaaatacttgagtggtctcatggctgttagatggattatttgaaaaaaaaaaaaaaaaaagagagaaaaaataattgatttttacatcagagatagcaaactaagacctggggaggggggtcagcttttattttattttattttttttaagtttgctagttgggtcaaatgtgaggaggagggagtctacctgccacctcttctcttgcccctcttctgcccacacatccagcatccaaaatccattcatttaatgaattgataaagtgccgtgcaaactggtgcacaaacaggcccccagtccacgcagcctggctcctaggaaaagtggtgaccgggcgtgggggggcatgccgcagccctgggacacagtcgggcaccttccccggacccccaggccttggctgtgcctcaagtcagagagggtcagccttcaggccccggagacgagtgactggccgatcatttcacaataaaatcactcacttttggcaacttcactttttttaaggcacagtcagttccttttctcatgtacctcacaaaagatgaagaccatgtagtactctttttggtaaagttacagtgttcatgttaaatatcacttttttctacattgtgtggtaaaaagaactacgttaatagctatatcttaaatactgtgatttgactttttgaaaaatatcctaatacaaatattttactaacttacaatcactcatttaataagaaacatttggattcttttgaaatcagtgttaattgactcatattcttaaaagcctggctcttgaccctattggaaacacaaaggaagctgaaatcaaacatctaaaatacactgcgtacacgtgtgcgtgcacacacacacacacacacacacacacacagctcttcatttctcctgagccatgcagaatttactttcaatgtggaaatctgttccctttaccacactgtatatgcacagagcacaagagaggctatctctagtcacttccaccagcgaggccttagactccgtattagaggccaccgatttcatacaacagtgtttcgctaaagacccttcactattcttgtttagtaaatagctgtctgctcttcagggaactgttacctatgggttattaccaaagaacgctggcaattggaaatgtcctgatggaaattctttgcacgtgccggttctctggcatcctccaggtggcccaacccaaagcagaaagcagaaaccacagaccccgtgagtctccccataccttgtttccaataacttggcaaaacttcttggtgcatattggttacaccctctgggattcataatgccattaggctaaaaccctaagagagagggttgacagaaacacacgcgagaatgaggcagatcccagagcaaggactgggcccagactctccacatgtgctctactagtgagtgccttatactctcagtattttggggcttacagcttcttatttgtgctaaaaaggtgcagttccaaagtaggaactgccacacaggccccagcatcctctctccaacttcatacctctctcctggtggggggagcgggcatccaggacctccggaatcaaggatgtgcagagaagagcgaaagtaatttttctagtcacatgaactgattggttccaggcaattagaaaatggctataaaataaccttaattttaaaaaaaaatcttgggtcttcgttttcctattaggagactgaactgaccacatgtattgatttatatcctgaatatatgggaacttctgtgtttgggatgtcctactgtaagactgatgaatgtacagagttaatttcagggtacagttttgccttaatggttttaaaaaataaactattttttaaaatttt

SEQ ID NO: 22000 - DNA, 1558 bp, Homo sapiens
  source 1..1558: mol_type = unassigned DNA
cacagttctggaggctgggaagttcaagatcaaagtgccagcagattcagtgtcatgtgaggacgtgcttcctgcttcatagataagagcttggagctcggcggcacaaccagcaccatctggtcgcgatggtggacacggaaagcccactctgccccctctccccactcgaggccggcgatctagagagcccgttatctgaagagttcctgcaagaaatgggaaacatccaagagatttcgcaatccatcggcgaggatagttctggaagctttggctttacggaataccagtatttaggaagctgtcctggctcagatggctcggtcatcacggacacgctttcaccagcttcgagcccctcctcggtgacttatcctgtggtccccggcagcgtggacgagtctcccagtggagcattgaacatcgaatgtagaatctgcggggacaaggcctcaggctatcattacggagtccacgcgtgtgaaggctgcaagggcttctttcggcgaacgattcgactcaagctggtgtatgacaagtgcgaccgcagctgcaagatccagaaaaagaacagaaacaaatgccagtattgtcgatttcacaagtgcctttctgtcgggatgtcacacaacgcgattcgttttggacgaatgccaagatctgagaaagcaaaactgaaagcagaaattcttacctgtgaacatgacatagaagattctgaaactgcagatctcaaatctctggccaagagaatctacgaggcctacttgaagaacttcaacatgaacaaggtcaaagcccgggtcatcctctcaggaaaggccagtaacaatccaccttttgtcatacatgatatggagacactgtgtatggctgagaagacgctggtggccaagctggtggccaatggcatccagaacaaggaggcggaggtccgcatctttcactgctgccagtgcacgtcagtggagaccgtcacggagctcacggaattcgccaaggccatcccaggcttcgcaaacttggacctgaacgatcaagtgacattgctaaaatacggagtttatgaggccatattcgccatgctgtcttctgtgatgaacaaagacgggatgctggtagcgtatggaaatgggtttataactcgtgaattcctaaaaagcctaaggaaaccgttctgtgatatcatggaacccaagtttgattttgccatgaagttcaatgcactggaactggatgacagtgatatctccctttttgtggctgctatcatttgctgtggagatcgtcctggccttctaaacgtaggacacattgaaaaaatgcaggagggtattgtacatgtgctcagactccacctgcagagcaaccacccggacgatatctttctcttcccaaaacttcttcaaaaaatggcagacctccggcagctggtgacggagcatgcgcagctggtgcagatcatcaagaagacggagtcggatgctgcgctgcacccgctactgcaggagatctacagggacatgtactgagttccttcagatcagccacacct

SEQ ID NO: 22001 - DNA, 9995 bp, Homo sapiens
  source 1..9995: mol_type = unassigned DNA
ccaggctgaagctcagggccctgtctgctctgtggactcaacagtttgtggcaagacaagctcagaactgagaagctgtcaccacagttctggaggctgggaagttcaagatcaaagtgccagcagattcagtgtcatgtgaggacgtgcttcctgcttcatagataagagtagcttggagctcggcggcacaaccagcaccatctggtcgcgatggtggacacggaaagcccactctgccccctctccccactcgaggccggcgatctagagagcccgttatctgaagagttcctgcaagaaatgggaaacatccaagagatttcgcaatccatcggcgaggatagttctggaagctttggctttacggaataccagtatttaggaagctgtcctggctcagatggctcggtcatcacggacacgctttcaccagcttcgagcccctcctcggtgacttatcctgtggtccccggcagcgtggacgagtctcccagtggagcattgaacatcgaatgtagaatctgcggggacaaggcctcaggctatcattacggagtccacgcgtgtgaaggctgcaagggcttctttcggcgaacgattcgactcaagctggtgtatgacaagtgcgaccgcagctgcaagatccagaaaaagaacagaaacaaatgccagtattgtcgatttcacaagtgcctttctgtcgggatgtcacacaacgcgattcgttttggacgaatgccaagatctgagaaagcaaaactgaaagcagaaattcttacctgtgaacatgacatagaagattctgaaactgcagatctcaaatctctggccaagagaatctacgaggcctacttgaagaacttcaacatgaacaaggtcaaagcccgggtcatcctctcaggaaaggccagtaacaatccaccttttgtcatacatgatatggagacactgtgtatggctgagaagacgctggtggccaagctggtggccaatggcatccagaacaaggaggcggaggtccgcatctttcactgctgccagtgcacgtcagtggagaccgtcacggagctcacggaattcgccaaggccatcccaggcttcgcaaacttggacctgaacgatcaagtgacattgctaaaatacggagtttatgaggccatattcgccatgctgtcttctgtgatgaacaaagacgggatgctggtagcgtatggaaatgggtttataactcgtgaattcctaaaaagcctaaggaaaccgttctgtgatatcatggaacccaagtttgattttgccatgaagttcaatgcactggaactggatgacagtgatatctccctttttgtggctgctatcatttgctgtggagatcgtcctggccttctaaacgtaggacacattgaaaaaatgcaggagggtattgtacatgtgctcagactccacctgcagagcaaccacccggacgatatctttctcttcccaaaacttcttcaaaaaatggcagacctccggcagctggtgacggagcatgcgcagctggtgcagatcatcaagaagacggagtcggatgctgcgctgcacccgctactgcaggagatctacagggacatgtactgagttccttcagatcagccacaccttttccaggagttctgaagctgacagcactacaaaggagacgggggagcagcacgattttgcacaaatatccaccactttaaccttagagcttggacagtctgagctgtaggtaaccggcatattattccatatctttgttttaaccagtacttctaagagcatagaactcaaatgctgggggtaggtggctaatctcaggactgggaagattacggcgaattatgctcaatggtctgattttaactcacccgatgttaatcaatgcacattgctttagatcacattcgtgatttaccatttaattaactggtaacctcaaaattcgtggcctgtcttcccattcaccccgcttttgactattgtgctcctttataattctgaaaactaatcagcactttttaacaatgtttataatcctataagtctagatgtatccaaaggtgaagtatgtaaaaagcagcaaaatatttatttcaaagacttcacttctgtttcctgaatctaaagaaagacaacatgctgctttttaatcataggatggagaattttaaagaactgtttgggccaggcacagtcgctcatacttgtaatcccagcactttgggaggccgaggcgggtggatcacaaggtcagcagatcgagaccatcctggccaacatggtgaaaccctgtctctactaaaaatacaaaaattagccgggtgtggtggcacatgcctgtaatcccagctactcgggaagctgaggcaggagaattgcttgaaccagggagttggaggttgcagtgagctaagactgcaccactgcactccagcctggtgacagaacgagactctgtcttaaaaacaaacaaacaaaaaaaaaatctgttagataagctatcaaaatgcagctgttgttttgtttttggctcactgttttcgtggttgtaactaatatgtggaaaggcccatttccaggtttgcgtagaagagcccagaaaacagagtctcaagacccccgctctggactgtcataagctagcacccgtggtaagcgggacgagacaagctcccgaagcccgccagcttcctgctccactcagctccgtccagtcaacctgaacccacccagtccagctgtctgtgggaatggtggtgttcttagggacagactgacaccttacttgtcagtgttcctccgggccccatttggcagctcccgtatcttttgttatgttgcttttaaagatatgatgttttattgttttaactcttggtgacagtagatgctctctggagcgcagacgaggcacatgtgtcttcatagcctgggctgggtgggagccagtcaccctgcggatcgagagagggggtagagtcttcttcaaatggcagttttacttcaaatggcagatttcacaagagttggttattttttacaatggtttaggttgttaagtctcctttgtatgtaaggtagttttttcaacatctaaaatttttgttttagccttcaaaaccaacttaccaacctcagtccagctgggaaggcagcgttgattatggtagtttgtcaagaatatatggacctggaaacactttctctctctgtccacctggtagataaattgtcctgttgagaatttttagatctggactggaactgccaggaccaccgcctccagggagtcgctgggcacctggaggtatcgtcgatgcctctcccccatctttagaaaatttggctcttctgaggtcattattattttaagaatgattaggattgataagggtcccatgaccagcattatgaaaatgcgagagtgggaaggacacagtgtgagacttccactagaaaaaagtgaaagttagggttaggacatccttttttaaaaattacaaatttagtccgttttggtttttgtaatcaggctaggcacagtggctcacacatggaatcccagcactttgggaggccgaggtgggaggatcacttgagcccaggagttcgagaccagcctaggcaacatagcaagaccctgtctgtacacaaaatttaaaaattagttcatcggggtggcacacatcagtagtcccagctactctgcaggctgaggtgggaggattgcttgaacccaggaggtcgaggctgcagtgagctgtgatctcaccactgcattccagcctgggtgacagagttagattccaccctctcccaccccggcaaaaaaaaaaaaaaaagatgcaatcaaaggggctgttggccagcaatggcagcagcagcggcgggcagtctgcccaagtgtcttaggaaccaaaagcaaataaaagtgtttccatatatgccaccagccaagtggccatcctaattcagaaagaagctagcctttgagtgtctgtcatggtgcatccgtttcagtattatttcctaaaatgagaagcccctgtgtcaacaagatccaggggctggagcccaatgccaagcctgtgttgtccccagcgaccctgcagctgctcgctctgatgtaccctgtgccattcaaggagatgtggtccaggaaagtgagcctcatggttttcagagaagtcattgttctgtttacattttcataaaacctgtttaaaatagctccccgtctcaggctttcagcagtaacagtgagctgactggcaagttcgatgttagctcccgggacactcagcagcgatggtgagcattttggtttccttaaggcccagcaagacttccagggacatctctggtgaagccagaatggagacacccgtgacctcaggctgaaagtcactcgacattggtctcttgtgttgatagggaaggaaatcaggcattcctatttctttaaataacaaaaccactaattgccactcaatgctggaatattttgggtcacctaatcatagatttctcagggcatcaatactcaaatataggctgattatgccccagttcaaatgggaactattaacagagtgcatttcttgcttgctgggtttcaacagacatcagccaaaagaacaaaagagatgtcaggacagattccaggagtgtcggagcacatgtgtggcacccgctccctctggcagcgaatgtaggaagtcgccaaatttacccactcttcaacaagtcattgtttaaacacggtttttcattttctcaacttttaatagcaaaaagtgccaaagtcctcagagacctaacagccttggtctaccgtgctgaccagggtgaaggcacggcgagggactcctcccagacgtgcctcttgtgtgccagctggctgtggctcgggagcagacgcaggcctctccattgtccaggggagcctggcggcgcatccctcctctcccacctcctggcacttccagctgggtgtcccacatgttggattccgtccccaccacacttccagagaccggagaactgtgcagggcctaaggccgtttggatgaattgtcaaaacaagatgcttccagttacagcggcaggagcgggactgggagcacgggctgacggctgctggtgcctttcttcccacctcgcttgcctgtttccgcttgacccttcctccagctccgatgagaagagtataaagcatcttcctaacgggtgtgtttgctatacgaacataatggacgtgaagtggggcagaaacccagaactcagcattcaaggatgcccaggagagctgtccctgttttaaagagctgtgttttgttttgtttcgcatttagagagcagacaaggcacccttctgctgcgctgatacgtttcttacactgggccattttagacccccagggaaacagccttcctggagcgttgtctggaggttccagggacagggcagcctcccagagccgagcaagagctcaaggtacaaatgagagatttgctataccgtgagaagtcaacaacttagccaccacttccccgcaatggaccatgtaacaaatacctcagcaggccctgcaaaaggccatgctagagctgaggcgcacagcctgtggcctctgtagttagggcaggtgggatggagactccttgagtgcacacacctgagcctgcccacacacaggggagcagcatctcgtatgacgtctggaaggaacttcggttgtgtaaagggagccttgaagatacgtgcaaaaggtgctaccccaatttggtgaaactgacattgggcacgtcttgggcttaggagaagcggccgatggtcccggcctgcagtgacaaacccccctccccgcaccgcccccagcaccccctctcctcttcacctcttcctgctggccacgaggaagccacttcctcagagagaccctaccagatgcggatggaaacagatgcaccaaagcaagccctgatgaaaccgcgacttcctaaggtctgtctcctctgaacttgcacctgggcctctctgtgtttggttccaagcacttcccacctcaaactcccattttcaaaccactgtatctctgcgcacatctgctacttaccagccgcatacatgatggagggttttttggtcctgatccagtggccacacctgtctttgaaatgtctcactgaactccagttttaaaatagattcattgcttcaacacagcaagcccaatgcacccagctaagactggcttgaccgacagcctggcctttggtggggggcttcctggggcctggggaaagctggccaccttcaacagctggtacctcttcaacagtgtggcctttcaaaatgcagatgccaccaggagaacatgcccacagctcaccacctatggatgccatggctctgggcagctttcaaagcaggttcctgtggtctcctcagctgtttgagggggtaacagcaaatcagcctccattttaaaatgaaaacaccagcctccagatgtagggcctgctgggtgttgctagccgctggtccccaggcacggtgcactttctccacctcctgcagcctccctgttgtttctagactcttgcacctggtgagtgcaaggataggtgacccaggggcctgcagccttgtcctcagctcccatctcctggactgccagcctcaccctctgcagttagcatggttggcctgatgcagggatcccgagggattactttttagaccttctttcacattcagaaaagtagtatagattcaggagaggcaagaaaattatgctgtccatagaagtcacccatgaagactgatgccaccacctgaaggctcatgattgttaaaaatgtccacgggaacctctcgtccacaggaggtttgtctcaacacttcccatttttacggcattggcattgccaagcatggggaagtatctgctcttctcatgttaaaagtggcccagcttttcttaactcagtccaagctgacttgtttagctgcactggaatttcttaccaaccaaatatttgcatcgagcaaagggggctgtgtgcacctccctaatggcagcgatgatggctgctgtcattcaagcccatcttcagacgtcacagtctggaagtgaaatgtccacaaacatctgtggcagaaaaggctatacggaccacccagttgtgctgcagctttacagagcaaggaagggttgtggcaaataaatgattaacctgcctcgactgtgctgagggcaacaaaggccatctcaccaaaggattattcgatgccattaaatcatcccgtgaccttcctgcttccgagtccatggcctttgcccagggcatgtactcccctgagaggccttctgcctagaaagatctatgactgggttccaaagttgaggcctaggtttttgctgggatttagatattttcaggcaccattttgacagcattcaggaaaacggttattgaccccatagactagggtaagaataaaggcaataaatttggtctgactcagaatataggagatccatatatttctctggaaaccacagtgtacactaaaatgtgaaattgaaggttttgttaaaaagaaaaagataatgagcttcatgctttgtttaattacataatgatttccattacgctatttctgtgaaatgcagcaggttcttaaacgttatttcagtggcatgggctggaagcttatcacaaaaagccatgtgtgtggccttatcagaacagaaagagacaggctggtgcccaaggctgctgcctgctccaccttttgccagctctggacatctgaggacgtcccggcagatctggaatggggccctcaactgaccatttgcttctcagaatttcagtttgagacatgagaggtataatcagttacttttctccccccagagaaacccttttgtgaggggagaggagctatggtatgtggttcagctgaaacacatacaactgcatccttttggagtcctttgccaacaaaaacagaccaacagaccagatggtgtccatgttcaatatcatgtcttgatggacgcagctgatgacctcaaatacttgagtggtctcatggctgttagatggattatttgaaaaaaaaaaaaaaaaaagagagaaaaaataattgatttttacatcagagatagcaaactaagacctggggaggggggtcagcttttattttattttattttttttaagtttgctagttgggtcaaatgtgaggaggagggagtctacctgccacctcttctcttgcccctcttctgcccacacatccagcatccaaaatccattcatttaatgaattgataaagtgccgtgcaaactggtgcacaaacaggcccccagtccacgcagcctggctcctaggaaaagtggtgaccgggcgtgggggggcatgccgcagccctgggacacagtcgggcaccttccccggacccccaggccttggctgtgcctcaagtcagagagggtcagccttcaggccccggagacgagtgactggccgatcatttcacaataaaatcactcacttttggcaacttcactttttttaaggcacagtcagttccttttctcatgtacctcacaaaagatgaagaccatgtagtactctttttggtaaagttacagtgttcatgttaaatatcacttttttctacattgtgtggtaaaaagaactacgttaatagctatatcttaaatactgtgatttgactttttgaaaaatatcctaatacaaatattttactaacttacaatcactcatttaataagaaacatttggattcttttgaaatcagtgttaattgactcatattcttaaaagcctggctcttgaccctattggaaacacaaaggaagctgaaatcaaacatctaaaatacactgcgtacacgtgtgcgtgcacacacacacacacacacacacacacacagctcttcatttctcctgagccatgcagaatttactttcaatgtggaaatctgttccctttaccacactgtatatgcacagagcacaagagaggctatctctagtcacttccaccagcgaggccttagactccgtattagaggccaccgatttcatacaacagtgtttcgctaaagacccttcactattcttgtttagtaaatagctgtctgctcttcagggaactgttacctatgggttattaccaaagaacgctggcaattggaaatgtcctgatggaaattctttgcacgtgccggttctctggcatcctccaggtggcccaacccaaagcagaaagcagaaaccacagaccccgtgagtctccccataccttgtttccaataacttggcaaaacttcttggtgcatattggttacaccctctgggattcataatgccattaggctaaaaccctaagagagagggttgacagaaacacacgcgagaatgaggcagatcccagagcaaggactgggcccagactctccacatgtgctctactagtgagtgccttatactctcagtattttggggcttacagcttcttatttgtgctaaaaaggtgcagttccaaagtaggaactgccacacaggccccagcatcctctctccaacttcatacctctctcctggtggggggagcgggcatccaggacctccggaatcaaggatgtgcagagaagagcgaaagtaatttttctagtcacatgaactgattggttccaggcaattagaaaatggctataaaataaccttaattttaaaaaaaaatcttgggtcttcgttttcctattaggagactgaactgaccacatgtattgatttatatcctgaatatatgggaacttctgtgtttgggatgtcctactgtaagactgatgaatgtacagagttaatttcagggtacagttttgccttaatggttttaaaaaataaactattttttaaaattt

SEQ ID NO: 22002 - DNA, 531 bp, Homo sapiens
  source 1..531: mol_type = unassigned DNA
gcagcgggcggcgggggcggaggcggccgctagcgccctgcccggcgccgcctccttcggcgttcgccccacggaccggcaggcggcggaccgcggcccaggctgaagctcagggccctgtctgctctgtggactcaacagtttgtggcaagacaagctcagaactgagaagctgtcaccacagtgccacacccccctgtcccagtgcactggggctgtggatcccttcaaagctgagattgcctgtctgtggtctccagcgttaagcacagtcattagctcagcttggagctcggcggcacaaccagcaccatctggtcgcgatggtggacacggaaagcccactctgccccctctccccactcgaggccggcgatctagagagcccgttatctgaagagttcctgcaagaaatgggaaacatccaagagatttcgcaatccatcggcgaggatagttctggaagctttggctttacggaataccagtatttaggaagctgtcctggctcagatggctcggtcatcacgg

SEQ ID NO: 22003 - DNA, 572 bp, Homo sapiens
  source 1..572: mol_type = unassigned DNA
cttcggcgttcgccccacggaccggcaggcggcggaccgcggcccaggctgaagctcagggccctgtctgctctgtggactcaacagtttgtggcaagacaagctcagaactgagaagctgtcaccacagtagcttggagctcggcggcacaaccagcaccatctggtcgcgatggtggacacggaaagcccactctgccccctctccccactcgaggccggcgatctagagagcccgttatctgaagagttcctgcaagaaatgggaaacatccaagagatttcgcaatccatcggcgaggatagttctggaagctttggctttacggaataccagtatttaggaagctgtcctggctcagatggctcggtcatcacggacacgctttcaccagcttcgagcccctcctcggtgacttatcctgtggtccccggcagcgtggacgagtctcccagtggagcattgaacatcgaatgtagaatctgcggggacaaggcctcaggctatcattacggagtccacgcgtgtgaaggctgcaaggtagaggggagctggaacagggcctggtggc

SEQ ID NO: 22004 - DNA, 1204 bp, Homo sapiens
  source 1..1204: mol_type = unassigned DNA
atggtggacacggaaagcccactctgccccctctccccactcgaggccggcgatctagagagcccgttatctgaagagttcctgcaagaaatgggaaacatccaagagatttcgcaatccatcggcgaggatagttctggaagctttggctttacggaataccagtatttaggaagctgtcctggctcagatggctcggtcatcacggacacgctttcaccagcttcgagcccctcctcggtgacttatcctgtggtccccggcagcgtggacgagtctcccagtggagcattgaacatcgaatgtagaatctgcggggacaaggcctcaggctatcattacggagtccacgcgtgtgaaggctgcaagggcttctttcggcgaacgattcgactcaagctggtgtatgacaagtgcgaccgcagctgcaagatccagaaaaagaacagaaacaaatgccagtattgtcgatttcacaagtgcctttctgtcgggatgtcacacaacgccttttgtcatacatgatatggagacactgtgtatggctgagaagacgctggtggccaagctggtggccaatggcatccagaacaaggaggcggaggtccgcatctttcactgctgccagtgcacgtcagtggagaccgtcacggagctcacggaattcgccaaggccatcccaggcttcgcaaacttggacctgaacgatcaagtgacattgctaaaatacggagtttatgaggccatattcgccatgctgtcttctgtgatgaacaaagacgggatgctggtagcgtatggaaatgggtttataactcgtgaattcctaaaaagcctaaggaaaccgttctgtgatatcatggaacccaagtttgattttgccatgaagttcaatgcactggaactggatgacagtgatatctccctttttgtggctgctatcatttgctgtggagatcgtcctggccttctaaacgtaggacacattgaaaaaatgcaggagggtattgtacatgtgctcagactccacctgcagagcaaccacccggacgatatctttctcttcccaaaacttcttcaaaaaatggcagacctccggcagctggtgacggagcatgcgcagctggtgcagatcatcaagaagacggagtcggatgctgcgctgcacccgctactgcaggagatctacagggacatgtactga

SEQ ID NO: 22005 - DNA, 368 bp, Homo sapiens
  source 1..368: mol_type = unassigned DNA
gggccgtggacgcggcggccccgcggcgggggcagcgggcggcgggggcggaggcggccgctagcgccctgcccggcgccgcctccttcggcgttcgccccacggaccggcaggcggcggaccgcggcccaggctgaagctcagggccctgtctgctctgtggactcaacagtttgtggcaagacaagctcagaactgagaagctgtcaccacagttctggaggctgggaagttcaagatcaaagtgccagcagattcagtgtcatgtgaggacgtgcttcctgcttcatagataagagtagcttggagctcggcggcacaaccagcaccatctggtcgcgatggtggacacggaaagcccactctgc

SEQ ID NO: 22006 - DNA, 2327 bp, Homo sapiens
  source 1..2327: mol_type = unassigned DNA
gtgcgcggctggggacctgagggcgaggagcgaggacacacaccgaggactcttgcgagggatctcggggcccagctcggcctccctcctagcgctgggggcctgcccggaacccgagtccgcggctgtccctggggtttggcgctgcgcggaggtcgggtctggggaccgcagcgactctgggtcttcgggttgtcccctcggagggagggcccacgggcggggacatcgggacttgccctttcctcggcgcagcggagctggggcgtcgccgactcagaaggtgctttccgagacctccagggatctccgaggcgaggaaacccgggccccggacagaccgaccctgggctgaagctcagggccctgtctgctctgtggactcaacagtttgtggcaagacaagctcagaactgagaagctgtcaccacagttctggaggctgggaagttcaagatcaaagtgccagcagattcagtgtcatgtgaggacgtgcttcctgcttcatagataagagtagcttggagctcggcggcacaaccagcaccatctggtcgcgatggtggacacggaaagcccactctgccccctctccccactcgaggccggcgatctagagagcccgttatctgaagagttcctgcaagaaatgggaaacatccaagagatttcgcaatccatcggcgaggatagttctggaagctttggctttacggaataccagtatttaggaagctgtcctggctcagatggctcggtcatcacggacacgctttcaccagcttcgagcccctcctcggtgacttatcctgtggtccccggcagcgtggacgagtctcccagtggagcattgaacatcgaatgtagaatctgcggggacaaggcctcaggctatcattacggagtccacgcgtgtgaaggctgcaagggcttctttcggcgaacgattcgactcaagctggtgtatgacaagtgcgaccgcagctgcaagatccagaaaaagaacagaaacaaatgccagtattgtcgatttcacaagtgcctttctgtcgggatgtcacacaacgcgattcgttttggacgaatgccaagatctgagaaagcaaaactgaaagcagaaattcttacctgtgaacatgacatagaagattctgaaactgcagatctcaaatctctggccaagagaatctacgaggcctacttgaagaacttcaacatgaacaaggtcaaagcccgggtcatcctctcaggaaaggccagtaacaatccaccttttgtcatacatgatatggagacactgtgtatggctgagaagacgctggtggccaagctggtggccaatggcatccagaacaaggaggcggaggtccgcatctttcactgctgccagtgcacgtcagtggagaccgtcacggagctcacggaattcgccaaggccatcccaggcttcgcaaacttggacctgaacgatcaagtgacattgctaaaatacggagtttatgaggccatattcgccatgctgtcttctgtgatgaacaaagacgggatgctggtagcgtatggaaatgggtttataactcgtgaattcctaaaaagcctaaggaaaccgttctgtgatatcatggaacccaagtttgattttgccatgaagttcaatgcactggaactggatgacagtgatatctccctttttgtggctgctatcatttgctgtggagatcgtcctggccttctaaacgtaggacacattgaaaaaatgcaggagggtattgtacatgtgctcagactccacctgcagagcaaccacccggacgatatctttctcttcccaaaacttcttcaaaaaatggcagacctccggcagctggtgacggagcatgcgcagctggtgcagatcatcaagaagacggagtcggatgctgcgctgcacccgctactgcaggagatctacagggacatgtactgagttccttcagatcagccacaccttttccaggagttctgaagctgacagcactacaaaggagacgggggagcagcacgattttgcacaaatatccaccactttaaccttagagcttggacagtctgagctgtaggtaaccggcatattattccatatctttgttttaaccagtacttctaagagcatagaactcaaatgctgggggtaggtggctaatctcaggactgggaagattacggcgaattatgctcaatggtctgattttaactcacccgatgttaatcaatgcacattgctttagatcacattcgtgatttaccatttaattaactggtaacctcaaaattcgtggcctgtcttc

SEQ ID NO: 22007 - DNA, 3774 bp, Homo sapiens
  source 1..3774: mol_type = unassigned DNA
ggcaggagcgggagaattctgcggagcctgcgggacggcggcggtggcgccgtaggcagccgggacagtgttgtacagtgttttgggcatgcacgtgatactcacacagtggcttctgctcaccaacagatgaagacagatgcaccaacgagggtctggaatggtctggagtggtctggaaagcagggtcagatacccctggaaaactgaagcccgtggagcagtgatctctacaggactgcttcaaggctgatgggaaccaccctgtagaggtccatctgcgttcagacccagacgatgccagagctatgactgggcctgcaggtgtggcgccgaggggagatcagccatggagcagccacaggaggaagcccctgaggtccgggaagaggaggagaaagaggaagtggcagaggcagaaggagccccagagctcaatgggggaccacagcatgcacttccttccagcagctacacagacctctcccggagctcctcgccaccctcactgctggaccaactgcagatgggctgtgacggggcctcatgcggcagcctcaacatggagtgccgggtgtgcggggacaaggcatcgggcttccactacggtgttcatgcatgtgaggggtgcaagggcttcttccgtcgtacgatccgcatgaagctggagtacgagaagtgtgagcgcagctgcaagattcagaagaagaaccgcaacaagtgccagtactgccgcttccagaagtgcctggcactgggcatgtcacacaacgctatccgttttggtcggatgccggaggctgagaagaggaagctggtggcagggctgactgcaaacgaggggagccagtacaacccacaggtggccgacctgaaggccttctccaagcacatctacaatgcctacctgaaaaacttcaacatgaccaaaaagaaggcccgcagcatcctcaccggcaaagccagccacacggcgccctttgtgatccacgacatcgagacattgtggcaggcagagaaggggctggtgtggaagcagttggtgaatggcctgcctccctacaaggagatcagcgtgcacgtcttctaccgctgccagtgcaccacagtggagaccgtgcgggagctcactgagttcgccaagagcatccccagcttcagcagcctcttcctcaacgaccaggttacccttctcaagtatggcgtgcacgaggccatcttcgccatgctggcctctatcgtcaacaaggacgggctgctggtagccaacggcagtggctttgtcacccgtgagttcctgcgcagcctccgcaaacccttcagtgatatcattgagcctaagtttgaatttgctgtcaagttcaacgccctggaacttgatgacagtgacctggccctattcattgcggccatcattctgtgtggagaccggccaggcctcatgaacgttccacgggtggaggctatccaggacaccatcctgcgtgccctcgaattccacctgcaggccaaccaccctgatgcccagtacctcttccccaagctgctgcagaagatggctgacctgcggcaactggtcaccgagcacgcccagatgatgcagcggatcaagaagaccgaaaccgagacctcgctgcaccctctgctccaggagatctacaaggacatgtactaacggcggcacccaggcctccctgcagactccaatggggccagcactggaggggcccacccacatgacttttccattgaccagcccttgagcacccggcctggagcagcagagtcccacgatcgccctcagacacatgacacccacggcctctggctccctgtgccctctctcccgcttcctccagccagctctcttcctgtctttgttgtctccctctttctcagttcctctttcttttctaattcctgttgctctgtttcttcctttctgtaggtttctctcttcccttctcccttgccctccctttctctctccaccccccacgtctgtcctcctttcttattctgtgagatgttttgtattatttcaccagcagcatagaacaggacctctgcttttgcacaccttttccccaggagcagaagagagtggggcctgccctctgccccatcattgcacctgcaggcttaggtcctcacttctgtctcctgtcttcagagcaaaagacttgagccatccaaagaaacactaagctctctgggcctgggttccagggaaggctaagcatggcctggactgactgcagccccctatagtcatggggtccctgctgcaaaggacagtgggcaggaggccccaggctgagagccagatgcctccccaagactgtcattgcccctccgatgctgaggccacccactgacccaactgatcctgctccagcagcacacctcagccccactgacacccagtgtccttccatcttcacactggtttgccaggccaatgttgctgatggccccctgcactggccgctggacggcactctcccagcttggaagtaggcagggttccctccaggtgggcccccacctcactgaagaggagcaagtctcaagagaaggaggggggattggtggttggaggaagcagcacacccaattctgcccctaggactcggggtctgagtcctggggtcaggccagggagagctcggggcaggccttccgccagcactcccactgcccccctgcccagtagcagccgcccacattgtgtcagcatccagggccagggcctggcctcacatccccctgctcctttctctagctggctccacgggagttcaggccccactccccctgaagctgcccctccagcacacacacataagcactgaaatcactttacctgcaggctccatgcacctcccttccctccctgaggcaggtgagaacccagagagaggggcctgcaggtgagcaggcagggctgggccaggtctccggggaggcaggggtcctgcaggtcctggtgggtcagcccagcacctgctcccagtgggagcttcccgggataaactgagcctgttcattctgatgtccatttgtcccaatagctctactgccctccccttcccctttactcagcccagctggccacctagaagtctccctgcacagcctctagtgtccggggaccttgtgggaccagtcccacaccgctggtccctgccctcccctgctcccaggttgaggtgcgctcacctcagagcagggccaaagcacagctgggcatgccatgtctgagcggcgcagagccctccaggcctgcaggggcaaggggctggctggagtctcagagcacagaggtaggagaactggggttcaagcccaggcttcctgggtcctgcctggtcctccctcccaaggagccattctgtgtgtgactctgggtggaagtgcccagcccctgcccctacgggcgctgcagcctcccttccatgccccaggatcactctctgctggcaggattcttcccgctccccacctacccagctgatgggggttggggtgcttcctttcaggccaaggctatgaagggacagctgctgggacccacctccccctccccggccacatgccgcgtccctgccccgacccgggtctggtgctgaggatacagctcttctcagtgtctgaacaatctccaaaattgaaatgtatatttttgctaggagccccagcttcctgtgtttttaatataaatagtgtacacagactgacgaaactttaaataaatgggaattaaatatttaa

SEQ ID NO: 22008 - DNA, 2041 bp, Homo sapiens
  source 1..2041: mol_type = unassigned DNA
ggcaggagcgggagaattctgcggagcctgcgggacggcggcggtggcgccgtaggcagccgggacagtgttgtacagtgttttgggcatgcacgtgatactcacacagtggcttctgctcaccaacagatgaagacagatgcaccaacgagggtctggaatggtctggagtggtctggaaagcagggtcagatacccctggaaaactgaagcccgtggagcagtgatctctacaggactgcttcaaggctgatgggaaccaccctgtagaggtccatctgcgttcagacccagacgatgccagagctatgactgggcctgcaggtgtggcgccgaggggagatcagccatggagcagccacaggaggaagcccctgaggtccgggaagaggaggagaaagaggaagtggcagaggcagaaggagccccagagctcaatgggggaccacagcatgcacttccttccagcagctacacagacctctcccggagctcctcgccaccctcactgctggaccaactgcagatgggctgtgacggggcctcatgcggcagcctcaacatggagtgccgggtgtgcggggacaaggcatcgggcttccactacggtgttcatgcatgtgaggggtgcaagggcttcttccgtcgtacgatccgcatgaagctggagtacgagaagtgtgagcgcagctgcaagattcagaagaagaaccgcaacaagtgccagtactgccgcttccagaagtgcctggcactgggcatgtcacacaacgctatccgttttggtcggatgccggaggctgagaagaggaagctggtggcagggctgactgcaaacgaggggagccagtacaacccacaggtggccgacctgaaggccttctccaagcacatctacaatgcctacctgaaaaacttcaacatgaccaaaaagaaggcccgcagcatcctcaccggcaaagccagccacacggcgccctttgtgatccacgacatcgagacattgtggcaggcagagaaggggctggtgtggaagcagttggtgaatggcctgcctccctacaaggagatcagcgtgcacgtcttctaccgctgccagtgcaccacagtggagaccgtgcgggagctcactgagttcgccaagagcatccccagcttcagcagcctcttcctcaacgaccaggttacccttctcaagtatggcgtgcacgaggccatcttcgccatgctggcctctatcgtcaacaaggacgggctgctggtagccaacggcagtggctttgtcacccgtgagttcctgcgcagcctccgcaaacccttcagtgatatcattgagcctaagtttgaatttgctgtcaagttcaacgccctggaacttgatgacagtgacctggccctattcattgcggccatcattctgtgtggaggtgagtgagagtggggcaggtgggctggcctggcacacccagtcgtcctgggggttggccctcactgcagggcactgtgcctgagctctgacagtgtggggaagtgtccctgtgatcttggcagtggaacatgcaaggcactgactgagcatgcaggatcagctccatctcattatgtacgtagatagaggtggagacaggaaaaagactaagccagacgtggtggctcacacctgtaatcccagcactttggcaggccgaggcgggtggatcacttgaggtcaggagttcgaaaccagcctggccaacatggtgaaaccccgtctctactaaaaatacaaaaaattagccagatgtggtggcacgcgcctgtaatcccagctacttgggaggctgagccaggagaatcgcttgaacccgagaggtggaggttgcagtgagccaaaatcccaccactgcactccagcctgggtgacagagtgagaccctgtctcaaaaaaaaggaaaaggactaacaggcagtatgctgtcatgttaatgtggggtggaaaaattgtctgcattttttctgcatttttaaaattccaacacaataaatacaataataactatgc

SEQ ID NO: 22009 - DNA, 3747 bp, Homo sapiens
  source 1..3747: mol_type = unassigned DNA
gcggagcgtgtgacgctgcggccgccgcggacctggggattaatgggaaaagttttggcaggagcgggagaattctgcggagcctgcgggacggcggcggtggcgccgtaggcagccgggacagtgttgtacagtgttttgggcatgcacgtgatactcacacagtggcttctgctcaccaacagatgaagacagatgcaccaacgaggctgatgggaaccaccctgtagaggtccatctgcgttcagacccagacgatgccagagctatgactgggcctgcaggtgtggcgccgaggggagatcagccatggagcagccacaggaggaagcccctgaggtccgggaagaggaggagaaagaggaagtggcagaggcagaaggagccccagagctcaatgggggaccacagcatgcacttccttccagcagctacacagacctctcccggagctcctcgccaccctcactgctggaccaactgcagatgggctgtgacggggcctcatgcggcagcctcaacatggagtgccgggtgtgcggggacaaggcatcgggcttccactacggtgttcatgcatgtgaggggtgcaagggcttcttccgtcgtacgatccgcatgaagctggagtacgagaagtgtgagcgcagctgcaagattcagaagaagaaccgcaacaagtgccagtactgccgcttccagaagtgcctggcactgggcatgtcacacaacgctatccgttttggtcggatgccggaggctgagaagaggaagctggtggcagggctgactgcaaacgaggggagccagtacaacccacaggtggccgacctgaaggccttctccaagcacatctacaatgcctacctgaaaaacttcaacatgaccaaaaagaaggcccgcagcatcctcaccggcaaagccagccacacggcgccctttgtgatccacgacatcgagacattgtggcaggcagagaaggggctggtgtggaagcagttggtgaatggcctgcctccctacaaggagatcagcgtgcacgtcttctaccgctgccagtgcaccacagtggagaccgtgcgggagctcactgagttcgccaagagcatccccagcttcagcagcctcttcctcaacgaccaggttacccttctcaagtatggcgtgcacgaggccatcttcgccatgctggcctctatcgtcaacaaggacgggctgctggtagccaacggcagtggctttgtcacccgtgagttcctgcgcagcctccgcaaacccttcagtgatatcattgagcctaagtttgaatttgctgtcaagttcaacgccctggaacttgatgacagtgacctggccctattcattgcggccatcattctgtgtggagaccggccaggcctcatgaacgttccacgggtggaggctatccaggacaccatcctgcgtgccctcgaattccacctgcaggccaaccaccctgatgcccagtacctcttccccaagctgctgcagaagatggctgacctgcggcaactggtcaccgagcacgcccagatgatgcagcggatcaagaagaccgaaaccgagacctcgctgcaccctctgctccaggagatctacaaggacatgtactaacggcggcacccaggcctccctgcagactccaatggggccagcactggaggggcccacccacatgacttttccattgaccagcccttgagcacccggcctggagcagcagagtcccacgatcgccctcagacacatgacacccacggcctctggctccctgtgccctctctcccgcttcctccagccagctctcttcctgtctttgttgtctccctctttctcagttcctctttcttttctaattcctgttgctctgtttcttcctttctgtaggtttctctcttcccttctcccttgccctccctttctctctccaccccccacgtctgtcctcctttcttattctgtgagatgttttgtattatttcaccagcagcatagaacaggacctctgcttttgcacaccttttccccaggagcagaagagagtggggcctgccctctgccccatcattgcacctgcaggcttaggtcctcacttctgtctcctgtcttcagagcaaaagacttgagccatccaaagaaacactaagctctctgggcctgggttccagggaaggctaagcatggcctggactgactgcagccccctatagtcatggggtccctgctgcaaaggacagtgggcaggaggccccaggctgagagccagatgcctccccaagactgtcattgcccctccgatgctgaggccacccactgacccaactgatcctgctccagcagcacacctcagccccactgacacccagtgtccttccatcttcacactggtttgccaggccaatgttgctgatggccccctgcactggccgctggacggcactctcccagcttggaagtaggcagggttccctccaggtgggcccccacctcactgaagaggagcaagtctcaagagaaggaggggggattggtggttggaggaagcagcacacccaattctgcccctaggactcggggtctgagtcctggggtcaggccagggagagctcggggcaggccttccgccagcactcccactgcccccctgcccagtagcagccgcccacattgtgtcagcatccagggccagggcctggcctcacatccccctgctcctttctctagctggctccacgggagttcaggccccactccccctgaagctgcccctccagcacacacacataagcactgaaatcactttacctgcaggctccatgcacctcccttccctccctgaggcaggtgagaacccagagagaggggcctgcaggtgagcaggcagggctgggccaggtctccggggaggcaggggtcctgcaggtcctggtgggtcagcccagcacctgctcccagtgggagcttcccgggataaactgagcctgttcattctgatgtccatttgtcccaatagctctactgccctccccttcccctttactcagcccagctggccacctagaagtctccctgcacagcctctagtgtccggggaccttgtgggaccagtcccacaccgctggtccctgccctcccctgctcccaggttgaggtgcgctcacctcagagcagggccaaagcacagctgggcatgccatgtctgagcggcgcagagccctccaggcctgcaggggcaaggggctggctggagtctcagagcacagaggtaggagaactggggttcaagcccaggcttcctgggtcctgcctggtcctccctcccaaggagccattctgtgtgtgactctgggtggaagtgcccagcccctgcccctacgggcgctgcagcctcccttccatgccccaggatcactctctgctggcaggattcttcccgctccccacctacccagctgatgggggttggggtgcttcctttcaggccaaggctatgaagggacagctgctgggacccacctccccctccccggccacatgccgcgtccctgccccgacccgggtctggtgctgaggatacagctcttctcagtgtctgaacaatctccaaaattgaaatgtatatttttgctaggagccccagcttcctgtgtttttaatataaatagtgtacacagactgacgaaactttaaataaatgggaattaaatatttaagagctgactggaa

SEQ ID NO: 22010 - DNA, 3453 bp, Homo sapiens
  source 1..3453: mol_type = unassigned DNA
gcggagcgtgtgacgctgcggccgccgcggacctggggattaatgggaaaagttttggcaggagcgggagaattctgcggagcctgcgggacggcggcggtggcgccgtaggcagccgggacagtgttgtacagtgttttgggcatgcacgtgatactcacacagtggcttctgctcaccaacagatgaagacagatgcaccaacgaggctgatgggaaccaccctgtagaggtccatctgcgttcagacccagacgatgccagagctatgactgggcctgcaggtgtggcgccgaggggagatcagccatggagcagccacaggaggaagcccctgaggtccgggaagaggaggagaaagaggaagtggcagaggcagaaggagccccagagctcaatgggggaccacagcatgcacttccttccagcagctacacagctatccgttttggtcggatgccggaggctgagaagaggaagctggtggcagggctgactgcaaacgaggggagccagtacaacccacaggtggccgacctgaaggccttctccaagcacatctacaatgcctacctgaaaaacttcaacatgaccaaaaagaaggcccgcagcatcctcaccggcaaagccagccacacggcgccctttgtgatccacgacatcgagacattgtggcaggcagagaaggggctggtgtggaagcagttggtgaatggcctgcctccctacaaggagatcagcgtgcacgtcttctaccgctgccagtgcaccacagtggagaccgtgcgggagctcactgagttcgccaagagcatccccagcttcagcagcctcttcctcaacgaccaggttacccttctcaagtatggcgtgcacgaggccatcttcgccatgctggcctctatcgtcaacaaggacgggctgctggtagccaacggcagtggctttgtcacccgtgagttcctgcgcagcctccgcaaacccttcagtgatatcattgagcctaagtttgaatttgctgtcaagttcaacgccctggaacttgatgacagtgacctggccctattcattgcggccatcattctgtgtggagaccggccaggcctcatgaacgttccacgggtggaggctatccaggacaccatcctgcgtgccctcgaattccacctgcaggccaaccaccctgatgcccagtacctcttccccaagctgctgcagaagatggctgacctgcggcaactggtcaccgagcacgcccagatgatgcagcggatcaagaagaccgaaaccgagacctcgctgcaccctctgctccaggagatctacaaggacatgtactaacggcggcacccaggcctccctgcagactccaatggggccagcactggaggggcccacccacatgacttttccattgaccagcccttgagcacccggcctggagcagcagagtcccacgatcgccctcagacacatgacacccacggcctctggctccctgtgccctctctcccgcttcctccagccagctctcttcctgtctttgttgtctccctctttctcagttcctctttcttttctaattcctgttgctctgtttcttcctttctgtaggtttctctcttcccttctcccttgccctccctttctctctccaccccccacgtctgtcctcctttcttattctgtgagatgttttgtattatttcaccagcagcatagaacaggacctctgcttttgcacaccttttccccaggagcagaagagagtggggcctgccctctgccccatcattgcacctgcaggcttaggtcctcacttctgtctcctgtcttcagagcaaaagacttgagccatccaaagaaacactaagctctctgggcctgggttccagggaaggctaagcatggcctggactgactgcagccccctatagtcatggggtccctgctgcaaaggacagtgggcaggaggccccaggctgagagccagatgcctccccaagactgtcattgcccctccgatgctgaggccacccactgacccaactgatcctgctccagcagcacacctcagccccactgacacccagtgtccttccatcttcacactggtttgccaggccaatgttgctgatggccccctgcactggccgctggacggcactctcccagcttggaagtaggcagggttccctccaggtgggcccccacctcactgaagaggagcaagtctcaagagaaggaggggggattggtggttggaggaagcagcacacccaattctgcccctaggactcggggtctgagtcctggggtcaggccagggagagctcggggcaggccttccgccagcactcccactgcccccctgcccagtagcagccgcccacattgtgtcagcatccagggccagggcctggcctcacatccccctgctcctttctctagctggctccacgggagttcaggccccactccccctgaagctgcccctccagcacacacacataagcactgaaatcactttacctgcaggctccatgcacctcccttccctccctgaggcaggtgagaacccagagagaggggcctgcaggtgagcaggcagggctgggccaggtctccggggaggcaggggtcctgcaggtcctggtgggtcagcccagcacctgctcccagtgggagcttcccgggataaactgagcctgttcattctgatgtccatttgtcccaatagctctactgccctccccttcccctttactcagcccagctggccacctagaagtctccctgcacagcctctagtgtccggggaccttgtgggaccagtcccacaccgctggtccctgccctcccctgctcccaggttgaggtgcgctcacctcagagcagggccaaagcacagctgggcatgccatgtctgagcggcgcagagccctccaggcctgcaggggcaaggggctggctggagtctcagagcacagaggtaggagaactggggttcaagcccaggcttcctgggtcctgcctggtcctccctcccaaggagccattctgtgtgtgactctgggtggaagtgcccagcccctgcccctacgggcgctgcagcctcccttccatgccccaggatcactctctgctggcaggattcttcccgctccccacctacccagctgatgggggttggggtgcttcctttcaggccaaggctatgaagggacagctgctgggacccacctccccctccccggccacatgccgcgtccctgccccgacccgggtctggtgctgaggatacagctcttctcagtgtctgaacaatctccaaaattgaaatgtatatttttgctaggagccccagcttcctgtgtttttaatataaatagtgtacacagactgacgaaactttaaataaatgggaattaaatatttaagagctgactggaa

SEQ ID NO: 22011 - DNA, 2002 bp, Homo sapiens
  source 1..2002: mol_type = unassigned DNA
gcggagcgtgtgacgctgcggccgccgcggacctggggattaatgggaaaagttttggcaggagcgggagaattctgcggagcctgcgggacggcggcggtggcgccgtaggcagccgggacagtgttgtacagtgttttgggcatgcacgtgatactcacacagtggcttctgctcaccaacagatgaagacagatgcaccaacgaggctgatgggaaccaccctgtagaggtccatctgcgttcagacccagacgatgccagagctatgactgggcctgcaggtgtggcgccgaggggagatcagccatggagcagccacaggaggaagcccctgaggtccgggaagaggaggagaaagaggaagtggcagaggcagaaggagccccagagctcaatgggggaccacagcatgcacttccttccagcagctacacagacctctcccggagctcctcgccaccctcactgctggaccaactgcagatgggctgtgacggggcctcatgcggcagcctcaacatggagtgccgggtgtgcggggacaaggcatcgggcttccactacggtgttcatgcatgtgaggggtgcaagggcttcttccgtcgtacgatccgcatgaagctggagtacgagaagtgtgagcgcagctgcaagattcagaagaagaaccgcaacaagtgccagtactgccgcttccagaagtgcctggcactgggcatgtcacacaacgctatccgttttggtcggatgccggaggctgagaagaggaagctggtggcagggctgactgcaaacgaggggagccagtacaacccacaggtggccgacctgaaggccttctccaagcacatctacaatgcctacctgaaaaacttcaacatgaccaaaaagaaggcccgcagcatcctcaccggcaaagccagccacacggcgccctttgtgatccacgacatcgagacattgtggcaggcagagaaggggctggtgtggaagcagttggtgaatggcctgcctccctacaaggagatcagcgtgcacgtcttctaccgctgccagtgcaccacagtggagaccgtgcgggagctcactgagttcgccaagagcatccccagcttcagcagcctcttcctcaacgaccaggttacccttctcaagtatggcgtgcacgaggccatcttcgccatgctggcctctatcgtcaacaaggacgggctgctggtagccaacggcagtggctttgtcacccgtgagttcctgcgcagcctccgcaaacccttcagtgatatcattgagcctaagtttgaatttgctgtcaagttcaacgccctggaacttgatgacagtgacctggccctattcattgcggccatcattctgtgtggaggtgagtgagagtggggcaggtgggctggcctggcacacccagtcgtcctgggggttggccctcactgcagggcactgtgcctgagctctgacagtgtggggaagtgtccctgtgatcttggcagtggaacatgcaaggcactgactgagcatgcaggatcagctccatctcattatgtacgtagatagaggtggagacaggaaaaagactaagccagacgtggtggctcacacctgtaatcccagcactttggcaggccgaggcgggtggatcacttgaggtcaggagttcgaaaccagcctggccaacatggtgaaaccccgtctctactaaaaatacaaaaaattagccagatgtggtggcacgcgcctgtaatcccagctacttgggaggctgagccaggagaatcgcttgaacccgagaggtggaggttgcagtgagccaaaatcccaccactgcactccagcctgggtgacagagtgagaccctgtctcaaaaaaaaggaaaaggactaacaggcagtatgctgtcatgttaatgtggggtggaaaaattgtctgcattttttctgcatttttaaaattccaacacaataaatacaataataactatgct

SEQ ID NO: 22012 - DNA, 3516 bp, Homo sapiens
  source 1..3516: mol_type = unassigned DNA
gcggagcgtgtgacgctgcggccgccgcggacctggggattaatgggaaaagttttggcaggagcgggagaattctgcggagcctgcgggacggcggcggtggcgccgtaggcagccgggacagtgttgtacagtgttttgggcatgcacgtgatactcacacagtggcttctgctcaccaacagatgaagacagatgcaccaacgagacctctcccggagctcctcgccaccctcactgctggaccaactgcagatgggctgtgacggggcctcatgcggcagcctcaacatggagtgccgggtgtgcggggacaaggcatcgggcttccactacggtgttcatgcatgtgaggggtgcaagggcttcttccgtcgtacgatccgcatgaagctggagtacgagaagtgtgagcgcagctgcaagattcagaagaagaaccgcaacaagtgccagtactgccgcttccagaagtgcctggcactgggcatgtcacacaacgctatccgttttggtcggatgccggaggctgagaagaggaagctggtggcagggctgactgcaaacgaggggagccagtacaacccacaggtggccgacctgaaggccttctccaagcacatctacaatgcctacctgaaaaacttcaacatgaccaaaaagaaggcccgcagcatcctcaccggcaaagccagccacacggcgccctttgtgatccacgacatcgagacattgtggcaggcagagaaggggctggtgtggaagcagttggtgaatggcctgcctccctacaaggagatcagcgtgcacgtcttctaccgctgccagtgcaccacagtggagaccgtgcgggagctcactgagttcgccaagagcatccccagcttcagcagcctcttcctcaacgaccaggttacccttctcaagtatggcgtgcacgaggccatcttcgccatgctggcctctatcgtcaacaaggacgggctgctggtagccaacggcagtggctttgtcacccgtgagttcctgcgcagcctccgcaaacccttcagtgatatcattgagcctaagtttgaatttgctgtcaagttcaacgccctggaacttgatgacagtgacctggccctattcattgcggccatcattctgtgtggagaccggccaggcctcatgaacgttccacgggtggaggctatccaggacaccatcctgcgtgccctcgaattccacctgcaggccaaccaccctgatgcccagtacctcttccccaagctgctgcagaagatggctgacctgcggcaactggtcaccgagcacgcccagatgatgcagcggatcaagaagaccgaaaccgagacctcgctgcaccctctgctccaggagatctacaaggacatgtactaacggcggcacccaggcctccctgcagactccaatggggccagcactggaggggcccacccacatgacttttccattgaccagcccttgagcacccggcctggagcagcagagtcccacgatcgccctcagacacatgacacccacggcctctggctccctgtgccctctctcccgcttcctccagccagctctcttcctgtctttgttgtctccctctttctcagttcctctttcttttctaattcctgttgctctgtttcttcctttctgtaggtttctctcttcccttctcccttgccctccctttctctctccaccccccacgtctgtcctcctttcttattctgtgagatgttttgtattatttcaccagcagcatagaacaggacctctgcttttgcacaccttttccccaggagcagaagagagtggggcctgccctctgccccatcattgcacctgcaggcttaggtcctcacttctgtctcctgtcttcagagcaaaagacttgagccatccaaagaaacactaagctctctgggcctgggttccagggaaggctaagcatggcctggactgactgcagccccctatagtcatggggtccctgctgcaaaggacagtgggcaggaggccccaggctgagagccagatgcctccccaagactgtcattgcccctccgatgctgaggccacccactgacccaactgatcctgctccagcagcacacctcagccccactgacacccagtgtccttccatcttcacactggtttgccaggccaatgttgctgatggccccctgcactggccgctggacggcactctcccagcttggaagtaggcagggttccctccaggtgggcccccacctcactgaagaggagcaagtctcaagagaaggaggggggattggtggttggaggaagcagcacacccaattctgcccctaggactcggggtctgagtcctggggtcaggccagggagagctcggggcaggccttccgccagcactcccactgcccccctgcccagtagcagccgcccacattgtgtcagcatccagggccagggcctggcctcacatccccctgctcctttctctagctggctccacgggagttcaggccccactccccctgaagctgcccctccagcacacacacataagcactgaaatcactttacctgcaggctccatgcacctcccttccctccctgaggcaggtgagaacccagagagaggggcctgcaggtgagcaggcagggctgggccaggtctccggggaggcaggggtcctgcaggtcctggtgggtcagcccagcacctgctcccagtgggagcttcccgggataaactgagcctgttcattctgatgtccatttgtcccaatagctctactgccctccccttcccctttactcagcccagctggccacctagaagtctccctgcacagcctctagtgtccggggaccttgtgggaccagtcccacaccgctggtccctgccctcccctgctcccaggttgaggtgcgctcacctcagagcagggccaaagcacagctgggcatgccatgtctgagcggcgcagagccctccaggcctgcaggggcaaggggctggctggagtctcagagcacagaggtaggagaactggggttcaagcccaggcttcctgggtcctgcctggtcctccctcccaaggagccattctgtgtgtgactctgggtggaagtgcccagcccctgcccctacgggcgctgcagcctcccttccatgccccaggatcactctctgctggcaggattcttcccgctccccacctacccagctgatgggggttggggtgcttcctttcaggccaaggctatgaagggacagctgctgggacccacctccccctccccggccacatgccgcgtccctgccccgacccgggtctggtgctgaggatacagctcttctcagtgtctgaacaatctccaaaattgaaatgtatatttttgctaggagccccagcttcctgtgtttttaatataaatagtgtacacagactgacgaaactttaaataaatgggaattaaatatttaagagctgactggaa

SEQ ID NO: 22013 - DNA, 1505 bp, Homo sapiens
  source 1..1505: mol_type = unassigned DNA
gagaattctgcggagcctgcgggacggcggcggtggcgccgtaggcagccgggacaggctgatgggaaccaccctgtagaggtccatctgcgttcagacccagacgatgccagagctatgactgggcctgcaggtgtggcgccgaggggagatcagccatggagcagccacaggaggaagcccctgaggtccgggaagaggaggagaaagaggaagtggcagagggcttcttccgtcgtacgatccgcatgaagctggagtacgagaagtgtgagcgcagctgcaagattcagaagaagaaccgcaacaagtgccagtactgccgcttccagaagtgcctggcactgggcatgtcacacaacgctatccgttttggtcggatgccggaggctgagaagaggaagctggtggcagggctgactgcaaacgaggggagccagtacaacccacaggtggccgacctgaaggccttctccaagcacatctacaatgcctacctgaaaaacttcaacatgaccaaaaagaaggcccgcagcatcctcaccggcaaagccagccacacggcgccctttgtgatccacgacatcgagacattgtggcaggcagagaaggggctggtgtggaagcagttggtgaatggcctgcctccctacaaggagatcagcgtgcacgtcttctaccgctgccagtgcaccacagtggagaccgtgcgggagctcactgagttcgccaagagcatccccagcttcagcagcctcttcctcaacgaccaggttacccttctcaagtatggcgtgcacgaggccatcttcgccatgctggcctctatcgtcaacaaggacgggctgctggtagccaacggcagtggctttgtcacccgtgagttcctgcgcagcctccgcaaacccttcagtgatatcattgagcctaagtttgaatttgctgtcaagttcaacgccctggaacttgatgacagtgacctggccctattcattgcggccatcattctgtgtggagaccggccaggcctcatgaacgttccacgggtggaggctatccaggacaccatcctgcgtgccctcgaattccacctgcaggccaaccaccctgatgcccagtacctcttccccaagctgctgcagaagatggctgacctgcggcaactggtcaccgagcacgcccagatgatgcagcggatcaagaagaccgaaaccgagacctcgctgcaccctctgctccaggagatctacaaggacatgtactaacggcggcacccaggcctccctgcagactccaatggggccagcactggaggggcccacccacatgacttttccattgaccagcccttgagcacccggcctggagcagcagagtcccacgatcgccctcagacacatgacacccacggcctctggctccctgtgccctctctcccgcttcctccagccagctctcttcctgtctttgttgtctccctctttctcagttcctctttcttttct

SEQ ID NO: 22014 - DNA, 1850 bp, Homo sapiens
  source 1..1850: mol_type = unassigned DNA
actcatgggtgtattcacaaattctgttacttcaagtctttttcttttaacggattgatcttttgctagatagagacaaaatatcagtgtgaattacagcaaacccctattccatgctgttatgggtgaaactctgggagattctcctattgacccagaaagcgattccttcactgatacactgtctgcaaacatatcacaagaaatgaccatggttgacacagagatgccattctggcccaccaactttgggatcagctccgtggatctctccgtaatggaagaccactcccactcctttgatatcaagcccttcactactgttgacttctccagcatttctactccacattacgaagacattccattcacaagaacagatccagtggttgcagattacaagtatgacctgaaacttcaagagtaccaaagtgcaatcaaagtggagcctgcatctccaccttattattctgagaagactcagctctacaataagcctcatgaagagccttccaactccctcatggcaattgaatgtcgtgtctgtggagataaagcttctggatttcactatggagttcatgcttgtgaaggatgcaagggtttcttccggagaacaatcagattgaagcttatctatgacagatgtgatcttaactgtcggatccacaaaaaaagtagaaataaatgtcagtactgtcggtttcagaaatgccttgcagtggggatgtctcataatgccatcaggtttgggcggatgccacaggccgagaaggagaagctgttggcggagatctccagtgatatcgaccagctgaatccagagtccgctgacctccgggccctggcaaaacatttgtatgactcatacataaagtccttcccgctgaccaaagcaaaggcgagggcgatcttgacaggaaagacaacagacaaatcaccattcgttatctatgacatgaattccttaatgatgggagaagataaaatcaagttcaaacacatcacccccctgcaggagcagagcaaagaggtggccatccgcatctttcagggctgccagtttcgctccgtggaggctgtgcaggagatcacagagtatgccaaaagcattcctggttttgtaaatcttgacttgaacgaccaagtaactctcctcaaatatggagtccacgagatcatttacacaatgctggcctccttgatgaataaagatggggttctcatatccgagggccaaggcttcatgacaagggagtttctaaagagcctgcgaaagccttttggtgactttatggagcccaagtttgagtttgctgtgaagttcaatgcactggaattagatgacagcgacttggcaatatttattgctgtcattattctcagtggagaccgcccaggtttgctgaatgtgaagcccattgaagacattcaagacaacctgctacaagccctggagctccagctgaagctgaaccaccctgagtcctcacagctgtttgccaagctgctccagaaaatgacagacctcagacagattgtcacggaacacgtgcagctactgcaggtgatcaagaagacggagacagacatgagtcttcacccgctcctgcaggagatctacaaggacttgtactagcagagagtcctgagccactgccaacatttcccttcttccagttgcactattctgagggaaaatctgacacctaagaaatttactgtgaaaaagcattttaaaaagaaaaggttttagaatatgatctattttatgcatattgtttataaagacacatttacaatttacttttaatattaaaaattaccatattatgaaattgctgatagta

SEQ ID NO: 22015 - DNA, 1870 bp, Homo sapiens
  source 1..1870: mol_type = unassigned DNA
cccgcccccgcgccgggcccggctcggcccgacccggctccgccgcgggcaggcggggcccagcgcactcggagcccgagcccgagccgcagccgccgcctggggcgcttgggtcggcctcgaggacaccggagaggggcgccacgccgccgtggccgcagatttgaaagaagccaacactaaaccacaaatatacaacaaggccattttctcaaacgagagtcagcctttaacgaaatgaccatggttgacacagagatgccattctggcccaccaactttgggatcagctccgtggatctctccgtaatggaagaccactcccactcctttgatatcaagcccttcactactgttgacttctccagcatttctactccacattacgaagacattccattcacaagaacagatccagtggttgcagattacaagtatgacctgaaacttcaagagtaccaaagtgcaatcaaagtggagcctgcatctccaccttattattctgagaagactcagctctacaataagcctcatgaagagccttccaactccctcatggcaattgaatgtcgtgtctgtggagataaagcttctggatttcactatggagttcatgcttgtgaaggatgcaagggtttcttccggagaacaatcagattgaagcttatctatgacagatgtgatcttaactgtcggatccacaaaaaaagtagaaataaatgtcagtactgtcggtttcagaaatgccttgcagtggggatgtctcataatgccatcaggtttgggcggatgccacaggccgagaaggagaagctgttggcggagatctccagtgatatcgaccagctgaatccagagtccgctgacctccgggccctggcaaaacatttgtatgactcatacataaagtccttcccgctgaccaaagcaaaggcgagggcgatcttgacaggaaagacaacagacaaatcaccattcgttatctatgacatgaattccttaatgatgggagaagataaaatcaagttcaaacacatcacccccctgcaggagcagagcaaagaggtggccatccgcatctttcagggctgccagtttcgctccgtggaggctgtgcaggagatcacagagtatgccaaaagcattcctggttttgtaaatcttgacttgaacgaccaagtaactctcctcaaatatggagtccacgagatcatttacacaatgctggcctccttgatgaataaagatggggttctcatatccgagggccaaggcttcatgacaagggagtttctaaagagcctgcgaaagccttttggtgactttatggagcccaagtttgagtttgctgtgaagttcaatgcactggaattagatgacagcgacttggcaatatttattgctgtcattattctcagtggagaccgcccaggtttgctgaatgtgaagcccattgaagacattcaagacaacctgctacaagccctggagctccagctgaagctgaaccaccctgagtcctcacagctgtttgccaagctgctccagaaaatgacagacctcagacagattgtcacggaacacgtgcagctactgcaggtgatcaagaagacggagacagacatgagtcttcacccgctcctgcaggagatctacaaggacttgtactagcagagagtcctgagccactgccaacatttcccttcttccagttgcactattctgagggaaaatctgacacctaagaaatttactgtgaaaaagcattttaaaaagaaaaggttttagaatatgatctattttatgcatattgtttataaagacacatttacaatttacttttaatattaaaaattaccatattatgaaa

SEQ ID NO: 22016 - DNA, 1122 bp, Homo sapiens
  source 1..1122: mol_type = unassigned DNA
gaagccaacactaaaccacaaatatacaacaaggccattttctcaaacgagagtcagcctttaacgaaatgaccatggttgacacagagatgccattctggcccaccaactttgggatcagctccgtggatctctccgtaatggaagaccactcccactcctttgatatcaagcccttcactactgttgacttctccagcatttctactccacattacgaagacattccattcacaagaacagatccagtggttgcagattacaagtatgacctgaaacttcaagagtaccaaagtgcaatcaaagtggagcctgcatctccaccttattattctgagaagactcagctctacaataagcctcatgaagagccttccaactccctcatggcaattgaatgtcgtgtctgtggagataaagcttctggatttcactatggagttcatgcttgtgaaggatgcaagggtttcttccggagaacaatcagattgaagcttatctatgacagatgtgatcttaactgtcggatccacaaaaaaagtagaaataaatgtcagtactgtcggtttcagaaatgccttgcagtggggatgtctcataatgccatcaggtttgggcggatgccacaggccgagaaggagaagctgttggcggagatctccagtgatatcgaccagctgaatccagagtccgctgacctccgggccctggcaaaacatttgtatgactcatacataaagtccttcccgctgaccaaagcaaaggcgagggcgatcttgacaggaaagacaacagacaaatcaaccgcccaggtttgctgaatgtgaagcccattgaagacattcaagacaacctgctacaagccctggagctccagctgaagctgaaccaccctgagtcctcacagctgtttgccaagctgctccagaaaatgacagacctcagacagattgtcacggaacacgtgcagctactgcaggtgatcaagaagacggagacagacatgagtcttcacccgctcctgcaggagatctacaaggacttgtactagcagagagtcctgagccactgccaacatttcccttcttccagttgcactattctgagggaaaatctgacacc

SEQ ID NO: 22017 - DNA, 2017 bp, Homo sapiens
  source 1..2017: mol_type = unassigned DNA
aacttacaaacgcaaggaactctgaaagtgtgcagcaccaccgatcagaagagaaaaccaagggacccgaaatatgctttaattaaattttcttttaaaatgtcactggaaagaacatcttgggaagacggcctggccgatcgccgtgtgaagggcaagccactctggccgagagggagccccacacctcggtctccccagaccggccctggccgggggcatccccctaaacttcggatccctcctcggaaatgggaccctctctgggccgcctcccagcggtggtggcgaggagcaaacgacaccagatttgaaagaagccaacactaaaccacaaatatacaacaaggccattttctcaaacgagagtcagcctttaacgaaatgaccatggttgacacagagatgccattctggcccaccaactttgggatcagctccgtggatctctccgtaatggaagaccactcccactcctttgatatcaagcccttcactactgttgacttctccagcatttctactccacattacgaagacattccattcacaagaacagatccagtggttgcagattacaagtatgacctgaaacttcaagagtaccaaagtgcaatcaaagtggagcctgcatctccaccttattattctgagaagactcagctctacaataagcctcatgaagagccttccaactccctcatggcaattgaatgtcgtgtctgtggagataaagcttctggatttcactatggagttcatgcttgtgaaggatgcaagggtttcttccggagaacaatcagattgaagcttatctatgacagatgtgatcttaactgtcggatccacaaaaaaagtagaaataaatgtcagtactgtcggtttcagaaatgccttgcagtggggatgtctcataatgccatcaggtttgggcggatgccacaggccgagaaggagaagctgttggcggagatctccagtgatatcgaccagctgaatccagagtccgctgacctccgggccctggcaaaacatttgtatgactcatacataaagtccttcccgctgaccaaagcaaaggcgagggcgatcttgacaggaaagacaacagacaaatcaccattcgttatctatgacatgaattccttaatgatgggagaagataaaatcaagttcaaacacatcacccccctgcaggagcagagcaaagaggtggccatccgcatctttcagggctgccagtttcgctccgtggaggctgtgcaggagatcacagagtatgccaaaagcattcctggttttgtaaatcttgacttgaacgaccaagtaactctcctcaaatatggagtccacgagatcatttacacaatgctggcctccttgatgaataaagatggggttctcatatccgagggccaaggcttcatgacaagggagtttctaaagagcctgcgaaagccttttggtgactttatggagcccaagtttgagtttgctgtgaagttcaatgcactggaattagatgacagcgacttggcaatatttattgctgtcattattctcagtggagaccgcccaggtttgctgaatgtgaagcccattgaagacattcaagacaacctgctacaagccctggagctccagctgaagctgaaccaccctgagtcctcacagctgtttgccaagctgctccagaaaatgacagacctcagacagattgtcacggaacacgtgcagctactgcaggtgatcaagaagacggagacagacatgagtcttcacccgctcctgcaggagatctacaaggacttgtactagcagagagtcctgagccactgccaacatttcccttcttccagttgcactattctgagggaaaatctgacacctaagaaatttactgtgaaaaagcattttaaaaagaaaaggttttagaatatgatctattttatgcatattgtttataaagacacatttacaatttacttttaatattaaaaattaccatattatgaaa

SEQ ID NO: 22018 - DNA, 2006 bp, Homo sapiens
  source 1..2006: mol_type = unassigned DNA
ctttgtgggctcctgcaagtgccaggcgctgaccactcctcctgggagcctaactgaggggggtagaggcagcagaggttaacagaaatctcaggtcccttggtggaaggtgggtgtgtagtcgtggtactttacgcctcggtgtttagggaggagcctaaggtaaggagtcagaaacggggagtaaccgagctgcggcttttatataaggtcagtggtaggtaaggaaggggccttaacctctgctggtgaccagaagcctgcatttctgcattctgcttaattccctttccttagatttgaaagaagccaacactaaaccacaaatatacaacaaggccattttctcaaacgagagtcagcctttaacgaaatgaccatggttgacacagagatgccattctggcccaccaactttgggatcagctccgtggatctctccgtaatggaagaccactcccactcctttgatatcaagcccttcactactgttgacttctccagcatttctactccacattacgaagacattccattcacaagaacagatccagtggttgcagattacaagtatgacctgaaacttcaagagtaccaaagtgcaatcaaagtggagcctgcatctccaccttattattctgagaagactcagctctacaataagcctcatgaagagccttccaactccctcatggcaattgaatgtcgtgtctgtggagataaagcttctggatttcactatggagttcatgcttgtgaaggatgcaagggtttcttccggagaacaatcagattgaagcttatctatgacagatgtgatcttaactgtcggatccacaaaaaaagtagaaataaatgtcagtactgtcggtttcagaaatgccttgcagtggggatgtctcataatgccatcaggtttgggcggatgccacaggccgagaaggagaagctgttggcggagatctccagtgatatcgaccagctgaatccagagtccgctgacctccgggccctggcaaaacatttgtatgactcatacataaagtccttcccgctgaccaaagcaaaggcgagggcgatcttgacaggaaagacaacagacaaatcaccattcgttatctatgacatgaattccttaatgatgggagaagataaaatcaagttcaaacacatcacccccctgcaggagcagagcaaagaggtggccatccgcatctttcagggctgccagtttcgctccgtggaggctgtgcaggagatcacagagtatgccaaaagcattcctggttttgtaaatcttgacttgaacgaccaagtaactctcctcaaatatggagtccacgagatcatttacacaatgctggcctccttgatgaataaagatggggttctcatatccgagggccaaggcttcatgacaagggagtttctaaagagcctgcgaaagccttttggtgactttatggagcccaagtttgagtttgctgtgaagttcaatgcactggaattagatgacagcgacttggcaatatttattgctgtcattattctcagtggagaccgcccaggtttgctgaatgtgaagcccattgaagacattcaagacaacctgctacaagccctggagctccagctgaagctgaaccaccctgagtcctcacagctgtttgccaagctgctccagaaaatgacagacctcagacagattgtcacggaacacgtgcagctactgcaggtgatcaagaagacggagacagacatgagtcttcacccgctcctgcaggagatctacaaggacttgtactagcagagagtcctgagccactgccaacatttcccttcttccagttgcactattctgagggaaaatctgacacctaagaaatttactgtgaaaaagcattttaaaaagaaaaggttttagaatatgatctattttatgcatattgtttataaagacacatttacaatttacttttaatattaaaaattaccatattatgaaa

SEQ ID NO: 22019 - DNA, 1722 bp, Homo sapiens
  source 1..1722: mol_type = unassigned DNA
gccgcgggcaggcggggcccagcgcactcggagcccgagcccgagccgcagccgccgcctggggcgcttgggtcggcctcgaggacaccggagaggggcgccacgccgccgtggccgcagaaatgaccatggttgacacagagatgccattctggcccaccaactttgggatcagctccgtggatctctccgtaatggaagaccactcccactcctttgatatcaagcccttcactactgttgacttctccagcatttctactccacattacgaagacattccattcacaagaacagatccagtggttgcagattacaagtatgacctgaaacttcaagagtaccaaagtgcaatcaaagtggagcctgcatctccaccttattattctgagaagactcagctctacaataagcctcatgaagagccttccaactccctcatggcaattgaatgtcgtgtctgtggagataaagcttctggatttcactatggagttcatgcttgtgaaggatgcaagggtttcttccggagaacaatcagattgaagcttatctatgacagatgtgatcttaactgtcggatccacaaaaaaagtagaaataaatgtcagtactgtcggtttcagaaatgccttgcagtggggatgtctcataatgccatcaggtttgggcggatgccacaggccgagaaggagaagctgttggcggagatctccagtgatatcgaccagctgaatccagagtccgctgacctccgggccctggcaaaacatttgtatgactcatacataaagtccttcccgctgaccaaagcaaaggcgagggcgatcttgacaggaaagacaacagacaaatcaccattcgttatctatgacatgaattccttaatgatgggagaagataaaatcaagttcaaacacatcacccccctgcaggagcagagcaaagaggtggccatccgcatctttcagggctgccagtttcgctccgtggaggctgtgcaggagatcacagagtatgccaaaagcattcctggttttgtaaatcttgacttgaacgaccaagtaactctcctcaaatatggagtccacgagatcatttacacaatgctggcctccttgatgaataaagatggggttctcatatccgagggccaaggcttcatgacaagggagtttctaaagagcctgcgaaagccttttggtgactttatggagcccaagtttgagtttgctgtgaagttcaatgcactggaattagatgacagcgacttggcaatatttattgctgtcattattctcagtggagaccgcccaggtttgctgaatgtgaagcccattgaagacattcaagacaacctgctacaagccctggagctccagctgaagctgaaccaccctgagtcctcacagctgtttgccaagctgctccagaaaatgacagacctcagacagattgtcacggaacacgtgcagctactgcaggtgatcaagaagacggagacagacatgagtcttcacccgctcctgcaggagatctacaaggacttgtactagcagagagtcctgagccactgccaacatttcccttcttccagttgcactattctgagggaaaatctgacacctaagaaatttactgtgaaaaagcattttaaaaagaaaaggttttagaatatgatctattttatgcatattgtttataaagacacatttacaattt

SEQ ID NO: 22020 - DNA, 2029 bp, Homo sapiens
  source 1..2029: mol_type = unassigned DNA
ccttaacctctgctggtgaccagaagcctgcatttctgcattctgcttaattccctttccttagatttgaaagaagccaacactaaaccacaaatatacaacaaggccattttctcaaacgagagtcagcctttaacgtgtttcaggatgattcttgtctctggatgtcgctgtcatgatgggagaggaattagtaaattcccaggtcagtttacactgcagagtgatcttgatctgcatgaatcagtaaggatgggctggataaacaagttggaaccacagttatgagtaccatgacattaactgaaacaaatgagaagggattgaaaaatcggcggttaagtgtcttttaaggtcatttccaacaaaactacaaaggacctatgaaaggcttttcagaaatgaccatggttgacacagagatgccattctggcccaccaactttgggatcagctccgtggatctctccgtaatggaagaccactcccactcctttgatatcaagcccttcactactgttgacttctccagcatttctactccacattacgaagacattccattcacaagaacagatccagtggttgcagattacaagtatgacctgaaacttcaagagtaccaaagtgcaatcaaagtggagcctgcatctccaccttattattctgagaagactcagctctacaataagcctcatgaagagccttccaactccctcatggcaattgaatgtcgtgtctgtggagataaagcttctggatttcactatggagttcatgcttgtgaaggatgcaagggtttcttccggagaacaatcagattgaagcttatctatgacagatgtgatcttaactgtcggatccacaaaaaaagtagaaataaatgtcagtactgtcggtttcagaaatgccttgcagtggggatgtctcataatgccatcaggtttgggcggatgccacaggccgagaaggagaagctgttggcggagatctccagtgatatcgaccagctgaatccagagtccgctgacctccgggccctggcaaaacatttgtatgactcatacataaagtccttcccgctgaccaaagcaaaggcgagggcgatcttgacaggaaagacaacagacaaatcaccattcgttatctatgacatgaattccttaatgatgggagaagataaaatcaagttcaaacacatcacccccctgcaggagcagagcaaagaggtggccatccgcatctttcagggctgccagtttcgctccgtggaggctgtgcaggagatcacagagtatgccaaaagcattcctggttttgtaaatcttgacttgaacgaccaagtaactctcctcaaatatggagtccacgagatcatttacacaatgctggcctccttgatgaataaagatggggttctcatatccgagggccaaggcttcatgacaagggagtttctaaagagcctgcgaaagccttttggtgactttatggagcccaagtttgagtttgctgtgaagttcaatgcactggaattagatgacagcgacttggcaatatttattgctgtcattattctcagtggagaccgcccaggtttgctgaatgtgaagcccattgaagacattcaagacaacctgctacaagccctggagctccagctgaagctgaaccaccctgagtcctcacagctgtttgccaagctgctccagaaaatgacagacctcagacagattgtcacggaacacgtgcagctactgcaggtgatcaagaagacggagacagacatgagtcttcacccgctcctgcaggagatctacaaggacttgtactagcagagagtcctgagccactgccaacatttcccttcttccagttgcactattctgagggaaaatctgacacctaagaaatttactgtgaaaaagcattttaaaaagaaaaggttttagaatatgatctattttatgcatattgtttataaagacacatttacaatttacttttaatattaaaaattaccatatta

SEQ ID NO: 22021 - DNA, 686 bp, Homo sapiens
  source 1..686: mol_type = unassigned DNA
tctgaaagtgtgcagcaccaccgatcagaagagaaaaccaagggacccgaaatatgctttaattaaattttcttttaaaatgtcactggaaagaacatcttgggaagacggcctggccgatcgccgtgtgaagggcaagccactctggccgagagggagccccacacctcggtctccccagaccggccctggccgggggcatccccctaaacttcggatccctcctcggaaatgggaccctctctgggccgcctcccagcggtggtggcgaggagcaaacgacaccagaaatgaccatggttgacacagagatgccattctggcccaccaactttgggatcagctccgtggatctctccgtaatggaagaccactcccactcctttgatatcaagcccttcactactgttgacttctccagcatttctactccacattacgaagacattccattcacaagaacagatccagtggttgcagattacaagtatgacctgaaacttcaagagtaccaaagtgcaatcaaagtggagcctgcatctccaccttattattctgagaagactcagctctacaataagcctcatgaagagccttccaactccctcatggcaattgaatgtcgtgtctgtggagataaagcttctggatttcactatggagttcatgcttgtgaaggatgcaag

SEQ ID NO: 22022 - DNA, 560 bp, Homo sapiens
  source 1..560: mol_type = unassigned DNA
ttagtatacaatgaatttataaatgtaaccatacaatttcatgcttagagaacgttttctctccattctctctacctttagaccattctgcagtttaaatcttgaaccaaaatgtcatttaaccatccttctgaacgataactccataattaactcaagcaccaaataagtcatctagctcttgatgatttgaaagaagccaacactaaaccacaaatatacaacaaggccattttctcaaacgagagtcagcctttaacgaaatgaccatggttgacacagagatgccattctggcccaccaactttgggatcagctccgtggatctctccgtaatggaagaccactcccactcctttgatatcaagcccttcactactgttgacttctccagcatttctactccacattacgaagacattccattcacaagaacagatccagtggttgcagattacaagtatgacctgaaacttcaagagtaccaaagtgcaatcaaagtggagcctgcatctccaccttattattctgagaagactcagctctacaataagcctcat

SEQ ID NO: 22023 - DNA, 428 bp, Homo sapiens
  source 1..428: mol_type = unassigned DNA
ctttgtgggctcctgcaagtgccaggcgctgaccactcctcctgggagcctaactgaggggggtagaggcagcagaggttaacagaaatctcaggtcccttggtggaaggtgggtgtgtagtcgtggtactttacgcctcggtgtttagggaggagcctaaggtaaggagtcagaaacggggagtaaccgagctgcggcttttatataaggtcagtggtaggtaaggaaggggccttaacctctgctggtgaccagaagcctgcatttctgcattctgcttaattccctttccttagaaatgaccatggttgacacagagatgccattctggcccaccaactttgggatcagctccgtggatctctccgtaatggaagaccactcccactcctttgatatcaagcccttcactactgttgacttctcc

SEQ ID NO: 22024 - DNA, 1122 bp, Homo sapiens; identical to SEQ ID NO: 22016
  source 1..1122: mol_type = unassigned DNA

SEQ ID NO: 22025 - DNA, 3004 bp, Homo sapiens
  source 1..3004: mol_type = unassigned DNA
cggctcggcgttgactccgccgcacgctgcagccgcggctggaagatggcggggaacgactgcggcgcgctgctggacgaagagctctcctccttcttcctcaactatctcgctgacacgcagggtggagggtccggggaggagcaactctatgctgactttccagaacttgacctctcccagctggatgccagcgactttgactcggccacctgctttggggagctgcagtggtgcccagagaactcagagactgaacccaaccagtacagccccgatgactccgagctcttccagattgacagtgagaatgaggccctcctggcagagctcaccaagaccctggatgacatccctgaagatgacgtgggtctggctgccttcccagccctggatggtggagacgctctatcatgcacctcagcttcgcctgccccctcatctgcaccccccagccctgccccggagaagccctcggccccagcccctgaggtggacgagctctcactggcggacagcacccaagacaagaaggctcccatgatgcagtctcagagccgaagttgtacagaactacataagcacctcacctcggcacagtgctgcctgcaggatcggggtctgcagccaccatgcctccagagtccccggctccctgccaaggaggacaaggagccgggtgaggactgcccgagcccccagccagctccagcctctccccgggactccctagctctgggcagggcagaccccggtgccccggtttcccaggaagacatgcaggcgatggtgcaactcatacgctacatgcacacctactgcctcccccagaggaagctgcccccacagacccctgagccactccccaaggcctgcagcaacccctcccagcaggtcagatcccggccctggtcccggcaccactccaaagcctcctgggctgagttctccattctgagggaacttctggctcaagacgtgctctgtgatgtcagcaaaccctaccgtctggccacgcctgtttatgcctccctcacacctcggtcaaggcccaggccccccaaagacagtcaggcctcccctggtcgcccgtcctcggtggaggaggtaaggatcgcagcttcacccaagagcaccgggcccagaccaagcctgcgcccactgcggctggaggtgaaaagggaggtccgccggcctgccagactgcagcagcaggaggaggaagacgaggaagaagaggaggaggaagaggaagaagaaaaagaggaggaggaggagtggggcaggaaaaggccaggccgaggcctgccatggacgaagctggggaggaagctggagagctctgtgtgccccgtgcggcgttctcggagactgaaccctgagctgggcccctggctgacatttgcagatgagccgctggtcccctcggagccccaaggtgctctgccctcactgtgcctggctcccaaggcctacgacgtagagcgggagctgggcagccccacggacgaggacagtggccaagaccagcagctcctacggggaccccagatccctgccctggagagcccctgtgagagtgggtgtggggacatggatgaggaccccagctgcccgcagctccctcccagagactctcccaggtgcctcatgctggccttgtcacaaagcgacccaacttttggcaagaagagctttgagcagaccttgacagtggagctctgtggcacagcaggactcaccccacccaccacaccaccgtacaagcccacagaggaggatcccttcaaaccagacatcaagcatagtctaggcaaagaaatagctctcagcctcccctcccctgagggcctctcactcaaggccaccccaggggctgcccacaagctgccaaagaagcacccagagcgaagtgagctcctgtcccacctgcgacatgccacagcccagccagcctcccaggctggccagaagcgtcccttctcctgttcctttggagaccatgactactgccaggtgctccgaccagaaggcgtcctgcaaaggaaggtgctgaggtcctgggagccgtctggggttcaccttgaggactggccccagcagggtgccccttgggctgaggcacaggcccctggcagggaggaagacagaagctgtgatgctggcgccccacccaaggacagcacgctgctgagagaccatgagatccgtgccagcctcaccaaacactttgggctgctggagaccgccctggaggaggaagacctggcctcctgcaagagccctgagtatgacactgtctttgaagacagcagcagcagcagcggcgagagcagcttcctcccagaggaggaagaggaagaaggggaggaggaggaggaggacgatgaagaagaggactcaggggtcagccccacttgctctgaccactgcccctaccagagcccaccaagcaaggccaaccggcagctctgttcccgcagccgctcaagctctggctcttcaccctgccactcctggtcaccagccactcgaaggaacttcagatgtgagagcagagggccgtgttcagacagaacgccaagcatccggcacgccaggaagcggcgggaaaaggccattggggaaggccgcgtggtgtacattcaaaatctctccagcgacatgagctcccgagagctgaagaggcgctttgaagtgtttggtgagattgaggagtgcgaggtgctgacaagaaataggagaggcgagaagtacggcttcatcacctaccggtgttctgagcacgcggccctctctttgacaaagggcgctgccctgaggaagcgcaacgagccctccttccagctgagctacggagggctccggcacttctgctggcccagatacactgactacgattccaattcagaagaggcccttcctgcgtcagggaaaagcaagtatgaagccatggattttgacagcttactgaaagaggcccagcagagcctgcattgataac

SEQ ID NO: 22026 - DNA, 3146 bp, Homo sapiens
  source 1..3146: mol_type = unassigned DNA
acattctcattttaatcctcaagcaactctgaattagttgctgttatcccagacttacaggcaggaagcaggctcagagaagtgaaggtttccaacttagacgtgccaggctgtgcacaggtggggacctctgaggggcctgctctgatctgggttggggctgccccaggacccttggaggagccgccaccagagcaatgggtggagggtccggggaggagcaactctatgctgactttccagaacttgacctctcccagctggatgccagcgactttgactcggccacctgctttggggagctgcagtggtgcccagagaactcagagactgaacccaaccagtacagccccgatgactccgagctcttccagattgacagtgagaatgaggccctcctggcagagctcaccaagaccctggatgacatccctgaagatgacgtgggtctggctgccttcccagccctggatggtggagacgctctatcatgcacctcagcttcgcctgccccctcatctgcaccccccagccctgccccggagaagccctcggccccagcccctgaggtggacgagctctcactggcggacagcacccaagacaagaaggctcccatgatgcagtctcagagccgaagttgtacagaactacataagcacctcacctcggcacagtgctgcctgcaggatcggggtctgcagccaccatgcctccagagtccccggctccctgccaaggaggacaaggagccgggtgaggactgcccgagcccccagccagctccagcctctccccgggactccctagctctgggcagggcagaccccggtgccccggtttcccaggaagacatgcaggcgatggtgcaactcatacgctacatgcacacctactgcctcccccagaggaagctgcccccacagacccctgagccactccccaaggcctgcagcaacccctcccagcaggtcagatcccggccctggtcccggcaccactccaaagcctcctgggctgagttctccattctgagggaacttctggctcaagacgtgctctgtgatgtcagcaaaccctaccgtctggccacgcctgtttatgcctccctcacacctcggtcaaggcccaggccccccaaagacagtcaggcctcccctggtcgcccgtcctcggtggaggaggtaaggatcgcagcttcacccaagagcaccgggcccagaccaagcctgcgcccactgcggctggaggtgaaaagggaggtccgccggcctgccagactgcagcagcaggaggaggaagacgaggaagaagaggaggaggaagaggaagaagaaaaagaggaggaggaggagtggggcaggaaaaggccaggccgaggcctgccatggacgaagctggggaggaagctggagagctctgtgtgccccgtgcggcgttctcggagactgaaccctgagctgggcccctggctgacatttgcagatgagccgctggtcccctcggagccccaaggtgctctgccctcactgtgcctggctcccaaggcctacgacgtagagcgggagctgggcagccccacggacgaggacagtggccaagaccagcagctcctacggggaccccagatccctgccctggagagcccctgtgagagtgggtgtggggacatggatgaggaccccagctgcccgcagctccctcccagagactctcccaggtgcctcatgctggccttgtcacaaagcgacccaacttttggcaagaagagctttgagcagaccttgacagtggagctctgtggcacagcaggactcaccccacccaccacaccaccgtacaagcccacagaggaggatcccttcaaaccagacatcaagcatagtctaggcaaagaaatagctctcagcctcccctcccctgagggcctctcactcaaggccaccccaggggctgcccacaagctgccaaagaagcacccagagcgaagtgagctcctgtcccacctgcgacatgccacagcccagccagcctcccaggctggccagaagcgtcccttctcctgttcctttggagaccatgactactgccaggtgctccgaccagaaggcgtcctgcaaaggaaggtgctgaggtcctgggagccgtctggggttcaccttgaggactggccccagcagggtgccccttgggctgaggcacaggcccctggcagggaggaagacagaagctgtgatgctggcgccccacccaaggacagcacgctgctgagagaccatgagatccgtgccagcctcaccaaacactttgggctgctggagaccgccctggaggaggaagacctggcctcctgcaagagccctgagtatgacactgtctttgaagacagcagcagcagcagcggcgagagcagcttcctcccagaggaggaagaggaagaaggggaggaggaggaggaggacgatgaagaagaggactcaggggtcagccccacttgctctgaccactgcccctaccagagcccaccaagcaaggccaaccggcagctctgttcccgcagccgctcaagctctggctcttcaccctgccactcctggtcaccagccactcgaaggaacttcagatgtgagagcagagggccgtgttcagacagaacgccaagcatccggcacgccaggaagcggcgggaaaaggccattggggaaggccgcgtggtgtacattcaaaatctctccagcgacatgagctcccgagagctgaagaggcgctttgaagtgtttggtgagattgaggagtgcgaggtgctgacaagaaataggagaggcgagaagtacggcttcatcacctaccggtgttctgagcacgcggccctctctttgacaaagggcgctgccctgaggaagcgcaacgagccctccttccagctgagctacggagggctccggcacttctgctggcccagatacactgactacgattccaattcagaagaggcccttcctgcgtcagggaaaagcaagtatgaagccatggattttgacagcttactgaaagaggcccagcagagcctgcattgataacagccttaaccctcgaggaatacctcaatacctcagacaaggcccttccaatatgtttacgttttc

SEQ ID NO: 22027 - DNA, 6318 bp, Homo sapiens
  source 1..6318: mol_type = unassigned DNA
tagtaagacaggtgccttcagttcactctcagtaaggggctggttgcctgcatgagtgtgtgctctgtgtcactgtggattggagttgaaaaagcttgactggcgtcattcaggagctggatggcgtgggacatgtgcaaccaggactctgagtctgtatggagtgacatcgagtgtgctgctctggttggtgaagaccagcctctttgcccagatcttcctgaacttgatctttctgaactagatgtgaacgacttggatacagacagctttctgggtggactcaagtggtgcagtgaccaatcagaaataatatccaatcagtacaacaatgagccttcaaacatatttgagaagatagatgaagagaatgaggcaaacttgctagcagtcctcacagagacactagacagtctccctgtggatgaagacggattgccctcatttgatgcgctgacagatggagacgtgaccactgacaatgaggctagtccttcctccatgcctgacggcacccctccaccccaggaggcagaagagccgtctctacttaagaagctcttactggcaccagccaacactcagctaagttataatgaatgcagtggtctcagtacccagaaccatgcaaatcacaatcacaggatcagaacaaaccctgcaattgttaagactgagaattcatggagcaataaagcgaagagtatttgtcaacagcaaaagccacaaagacgtccctgctcggagcttctcaaatatctgaccacaaacgatgaccctcctcacaccaaacccacagagaacagaaacagcagcagagacaaatgcacctccaaaaagaagtcccacacacagtcgcagtcacaacacttacaagccaaaccaacaactttatctcttcctctgaccccagagtcaccaaatgaccccaagggttccccatttgagaacaagactattgaacgcaccttaagtgtggaactctctggaactgcaggcctaactccacccaccactcctcctcataaagccaaccaagataacccttttagggcttctccaaagctgaagtcctcttgcaagactgtggtgccaccaccatcaaagaagcccaggtacagtgagtcttctggtacacaaggcaataactccaccaagaaagggccggagcaatccgagttgtatgcacaactcagcaagtcctcagtcctcactggtggacacgaggaaaggaagaccaagcggcccagtctgcggctgtttggtgaccatgactattgccagtcaattaattccaaaacagaaatactcattaatatatcacaggagctccaagactctagacaactagaaaataaagatgtctcctctgattggcaggggcagatttgttcttccacagattcagaccagtgctacctgagagagactttggaggcaagcaagcaggtctctccttgcagcacaagaaaacagctccaagaccaggaaatccgagccgagctgaacaagcacttcggtcatcccagtcaagctgtttttgacgacgaagcagacaagaccggtgaactgagggacagtgatttcagtaatgaacaattctccaaactacctatgtttataaattcaggactagccatggatggcctgtttgatgacagcgaagatgaaagtgataaactgagctacccttgggatggcacgcaatcctattcattgttcaatgtgtctccttcttgttcttcttttaactctccatgtagagattctgtgtcaccacccaaatccttattttctcaaagaccccaaaggatgcgctctcgttcaaggtccttttctcgacacaggtcgtgttcccgatcaccatattccaggtcaagatcaaggtctccaggcagtagatcctcttcaagatcctgctattactatgagtcaagccactacagacaccgcacgcaccgaaattctcccttgtatgtgagatcacgttcaagatcgccctacagccgtcggcccaggtatgacagctacgaggaatatcagcacgagaggctgaagagggaagaatatcgcagagagtatgagaagcgagagtctgagagggccaagcaaagggagaggcagaggcagaaggcaattgaagagcgccgtgtgatttatgtcggtaaaatcagacctgacacaacacggacagaactgagggaccgttttgaagtttttggtgaaattgaggagtgcacagtaaatctgcgggatgatggagacagctatggtttcattacctaccgttatacctgtgatgcttttgctgctcttgaaaatggatacactttgcgcaggtcaaacgaaactgactttgagctgtacttttgtggacgcaagcaatttttcaagtctaactatgcagacctagattcaaactcagatgactttgaccctgcttccaccaagagcaagtatgactctctggattttgatagtttactgaaagaagctcagagaagcttgcgcaggtaacatgttccctagctgaggatgacagagggatggcgaatacctcatgggacagcgcgtccttccctaaagactattgcaagtcatacttaggaatttctcctactttacactctctgtacaaaaacaaaacaaaacaacaacaatacaacaagaacaacaacaacaataacaacaatggtttacatgaacacagctgctgaagaggcaagagacagaatgatatccagtaagcacatgtttattcatgggtgtcagctttgcttttcctggagtctcttggtgatggagtgtgcgtgtgtgcatgtatgtgtgtgtgtatgtatgtgtgtggtgtgtgtgcttggtttaggggaagtatgtgtgggtacatgtgaggactgggggcacctgaccagaatgcgcaagggcaaaccatttcaaatggcagcagttccatgaagacacgcttaaaacctagaacttcaaaatgttcgtattctattcaaaaggaaatatatatatatatatatatatatatatatatatatataaattaaaaaggaaagaaaactaacaaccaaccaaccaaccaaccaaccacaaaccaccctaaaatgacagccgctgatgtctgggcatcagcctttgtactctgtttttttaagaaagtgcagaatcaacttgaagcaagctttctctcataacgtaatgattatatgacaatcctgaagaaaccacaggttccatagaactaatatcctgtctctctctctctctctctctctctcttttttttttctttttccttttgccatggaatctgggtgggagaggatactgcgggcaccagaatgctaaagtttcctaacattttgaagtttctgtagttcatccttaatcctgacacccatgtaaatgtccaaaatgttgatcttccactgcaaatttcaaaagccttgtcaatggtcaagcgtgcagcttgttcagcggttctttctgaggagcggacaccgggttacattactaatgagagttgggtagaactctctgagatgtgttcagatagtgtaattgctacattctctgatgtagttaagtatttacagatgttaaatggagtatttttattttatgtatatactatacaacaatgttcttttttgttacagctatgcactgtaaatgcagccttcttttcaaaactgctaaatttttcttaatcaagaatattcaaatgtaattatgaggtgaaacaattattgtacactaacatatttagaagctgaacttactgcttatatatatttgattgtaaaaacaaaaagacagtgtgtgtgtctgttgagtgcaacaagagcaaaatgatgctttccgcacatccatcccttaggtgagcttcaatctaagcatcttgtcaagaaatatcctagtcccctaaaggtattaaccacttctgcgatatttttccacattttcttgtcgcttgtttttctttgaagttttatacactggatttgttaggggaatgaaattttctcatctaaaatttttctagaagatatcatgattttatgtaaagtctctcaatgggtaaccattaagaaatgtttttattttctctatcaacagtagttttgaaactagaagtcaaaaatctttttaaaatgctgttttgttttaatttttgtgattttaatttgatacaaaatgctgaggtaataattatagtatgatttttacaataattaatgtgtgtctgaagactatctttgaagccagtatttctttcccttggcagagtatgacgatggtatttatctgtattttttacagttatgcatcctgtataaatactgatatttcattcctttgtttactaaagagacatatttatcagttgcagatagcctatttattataaattatgagatgatgaaaataataaagccagtggaaattttctacctaggatgcatgacaattgtcaggttggagtgtaagtgcttcatttgggaaattcagcttttgcagaagcagtgtttctacttgcactagcatggcctctgacgtgaccatggtgttgttcttgatgacattgcttctgctaaatttaataaaaacttcagaaaaacctccattttgatcatcaggatttcatctgagtgtggagtccctggaatggaattcagtaacatttggagtgtgtattcaagtttctaaattgagattcgattactgtttggctgacatgacttttctggaagacatgatacacctactactcaattgttcttttcctttctctcgcccaacacgatcttgtaagatggatttcacccccaggccaatgcagctaattttgatagctgcattcatttatcaccagcatattgtgttctgagtgaatccactgtttgtcctgtcggatgcttgcttgattttttggcttcttatttctaagtagatagaaagcaataaaaatactatgaaatgaaagaacttgttcacaggttctgcgttacaacagtaacacatctttaatccgcctaattcttgttgttctgtaggttaaatgcaggtattttaactgtgtgaacgccaaactaaagtttacagtctttctttctgaattttgagtatcttctgttgtagaataataataaaaagactattaagagcaataaattatttttaagaaatcgagatttagtaaatcctattatgtgttcaaggaccacatgtgttctctattttgcctttaaatttttgtgaaccaattttaaatacattctcctttttgccctggattgttgacatgagtggaatacttggtttcttttcttacttatcaaaagacagcactacagatatcatattgaggattaatttatcccccctacccccagcctgacaaatattgttaccatgaagatagttttcctcaatggacttcaaattgcatctagaattagtggagcttttgtatcttctgcagacactgtgggtagcccatcaaaatgtaagctgtgctcctctcatttttatttttatttttttgggagagaatatttcaaatgaacacgtgcaccccatcatcactggaggcaaatttcagcatagatctgtaggatttttagaagaccgtgggccattgccttcatgccgtggtaagtaccacatctacaattttggtaaccgaactggtgctttagtaatgtggatttttttcttttttaaaagagatgtagcagaataattcttccagtgcaacaaaatcaattttttgctaaacgactccgagaacaacagttgggctgtcaacattcaaagcagcagagagggaactttgcactattggggtatgatgtttgggtcagttgataaaaggaaaccttttcatgcctttagatgtgagcttccagtaggtaatgattatgtgtcctttcttgatggctgtaatgagaacttcaatcactgtagtctaagacctgatctatagatgacctagaatagccatgtactataatgtgatgattctaaatttgtacctatgtgacagacattttcaataatgtgaactgctgatttgatggagctactttaagatttgtaggtgaaagtgtaatactgttggttgaactatgctgaagagggaaagtgagcgattagttgagcccttgccgggccttttttccacctgccaattctacatgtattgttgtggttttattcattgtatgaaaattcctgtgattttttttaaatgtgcagtacacatcagcctcactgagctaataaagggaaacgaatgtttcaaatcta

SEQ ID NO: 22028 - DNA, 10568 bp, Homo sapiens
  source 1..10568: mol_type = unassigned DNA
actccgccgcacgctgcagccgcggctggaagatggcggggaacgactgcggcgcgctgctggacgaagagctctcctccttcttcctcaactatctcgctgacacgcagggtggagggtccggggaggagcaactctatgctgactttccagaacttgacctctcccagctggatgccagcgactttgactcggccacctgctttggggagctgcagtggtgcccagagaactcagagactgaacccaaccagtacagccccgatgactccgagctcttccagattgacagtgagaatgaggccctcctggcagagctcaccaagaccctggatgacatccctgaagatgacgtgggtctggctgccttcccagccctggatggtggagacgctctatcatgcacctcagcttcgcctgccccctcatctgcaccccccagccctgccccggagaagccctcggccccagcccctgaggtggacgagctctcactgctgcagaagctcctcctggccacatcctacccaacatcaagctctgacacccagaaggaagggaccgcctggcgccaggcaggcctcagatctaaaagtcaacggccttgtgttaaggcggacagcacccaagacaagaaggctcccatgatgcagtctcagagccgaagttgtacagaactacataagcacctcacctcggcacagtgctgcctgcaggatcggggtctgcagccaccatgcctccagagtccccggctccctgccaaggaggacaaggagccgggtgaggactgcccgagcccccagccagctccagcctctccccgggactccctagctctgggcagggcagaccccggtgccccggtttcccaggaagacatgcaggcgatggtgcaactcatacgctacatgcacacctactgcctcccccagaggaagctgcccccacagacccctgagccactccccaaggcctgcagcaacccctcccagcaggtcagatcccggccctggtcccggcaccactccaaagcctcctgggctgagttctccattctgagggaacttctggctcaagacgtgctctgtgatgtcagcaaaccctaccgtctggccacgcctgtttatgcctccctcacacctcggtcaaggcccaggccccccaaagacagtcaggcctcccctggtcgcccgtcctcggtggaggaggtaaggatcgcagcttcacccaagagcaccgggcccagaccaagcctgcgcccactgcggctggaggtgaaaagggaggtccgccggcctgccagactgcagcagcaggaggaggaagacgaggaagaagaggaggaggaagaggaagaagaaaaagaggaggaggaggagtggggcaggaaaaggccaggccgaggcctgccatggacgaagctggggaggaagctggagagctctgtgtgccccgtgcggcgttctcggagactgaaccctgagctgggcccctggctgacatttgcagatgagccgctggtcccctcggagccccaaggtgctctgccctcactgtgcctggctcccaaggcctacgacgtagagcgggagctgggcagccccacggacgaggacagtggccaagaccagcagctcctacggggaccccagatccctgccctggagagcccctgtgagagtgggtgtggggacatggatgaggaccccagctgcccgcagctccctcccagagactctcccaggtgcctcatgctggccttgtcacaaagcgacccaacttttggcaagaagagctttgagcagaccttgacagtggagctctgtggcacagcaggactcaccccacccaccacaccaccgtacaagcccacagaggaggatcccttcaaaccagacatcaagcatagtctaggcaaagaaatagctctcagcctcccctcccctgagggcctctcactcaaggccaccccaggggctgcccacaagctgccaaagaagcacccagagcgaagtgagctcctgtcccacctgcgacatgccacagcccagccagcctcccaggctggccagaagcgtcccttctcctgttcctttggagaccatgactactgccaggtgctccgaccagaaggcgtcctgcaaaggaaggtgctgaggtcctgggagccgtctggggttcaccttgaggactggccccagcagggtgccccttgggctgaggcacaggcccctggcagggaggaagacagaagctgtgatgctggcgccccacccaaggacagcacgctgctgagagaccatgagatccgtgccagcctcaccaaacactttgggctgctggagaccgccctggaggaggaagacctggcctcctgcaagagccctgagtatgacactgtctttgaagacagcagcagcagcagcggcgagagcagcttcctcccagaggaggaagaggaagaaggggaggaggaggaggaggacgatgaagaagaggactcaggggtcagccccacttgctctgaccactgcccctaccagagcccaccaagcaaggccaaccggcagctctgttcccgcagccgctcaagctctggctcttcaccctgccactcctggtcaccagccactcgaaggaacttcagatgtgagagcagagggccgtgttcagacagaacgccaagcatccggcacgccaggaagcggcgggaaaaggccattggggaaggccgcgtggtgtacattcaaaatctctccagcgacatgagctcccgagagctgaagaggcgctttgaagtgtttggtgagattgaggagtgcgaggtgctgacaagaaataggagaggcgagaagtacggcttcatcacctaccggtgttctgagcacgcggccctctctttgacaaagggcgctgccctgaggaagcgcaacgagccctccttccagctgagctacggagggctccggcacttctgctggcccagatacactgactacgattccaattcagaagaggcccttcctgcgtcagggaaaagcaagtatgaagccatggattttgacagcttactgaaagaggcccagcagagcctgcattgataacagccttaaccctcgaggaatacctcaatacctcagacaaggcccttccaatatgtttacgttttcaaagaaatcaagtatatgaggagagcgagcgagcgtgagagaacacccgtgagagagacttgaaactgctgtcctttaaaaaaaaaaaaaatcaatgtttacattgaacaaagctgcttctgtctgtgagtttccatggtgttgacgttccactgccacattagtgtcctcgcttccaacgggttgtcccgggtgcacctcgaagtgccgggtccgtcacccatcgccccttccttcccgactgacttcctctcgtagacttgcagctgtgttcaccataacatttcttgtctgtagtgtgtgatgatgaaattgttacttgtgaatagaatcaggactataaacttcatttttaattgaaaaaaaaagtatatccttaaaataatgtatttatggctcagatgtactgtgcctgggattattgtattgcttccttgattttttaactatgcactgtcatgaggtgtttgccactgagctgccctgctccccttgccagattgccctggaggtgctgggtggccgctaggctggtctgcaggaaagcgcggcctgccgtttccgggccgtatctgccaagccctgccttgtctcttactgagcaagtttggctcaaattataggagcccccatcttgtgcccagctcatgctccaagtgtgtgtctatccatttgtactcagactcttgagtaccttgtaaggaaggcggggcaagctgcatcattcctgttttccaggggaggctggcagctcctcaagaggcgaaatgactgtgggaggtccggttaccagtgaggaggcagagcggtgacccagaccaggccttctggttcttggtcccgtgcttccgtagtagctggggtaaagacaccgtttcagggactggtagaggtgagttcggctaaattgggcaccgggctagaagcctaagggctcattttaggggttacattaggtgttgattcaccagcatcaggtgaattcaagccctggcatgtgtcttggatgcaccatcagctttgatcctgagtggtcctgcggtttgtctgtgcctgtggacacactgtcagaacttcagtgacacccctggcagcggtacagacaggtggtctgggagcagtcatcttttttgggccagccaccagcccatcctactccctcaggtagtccttcgtctttaccttgtccttgtctgtaaagttgttttggtggctggggcaggggagccaggaggagggagtgaaggttgggaatagataggacaatctcctagctctcctccaattgagaaaacactccaattgggctttgctttaaactttgtgttcttaagtgatgtcaaagccatttccagcttaatgttctgtgggtaccttgggggccattcatgcagggagcatggccaggcagggtatgagtacattgtttctgatttctttcatacatcagggttcctcgggaaatttttgtattttttttttaagtcctgctgctttaaaaatttgaaagtggctcattaaactaaacaggctaatgtaatttgttgcttatgccaagcctagactgttgagaattgacgtttttaaagattatcaaatacctcagtaggtaaaatgagcccatgatcttccactgagtggtgagcatactcccagcccatggacaaggccggaagagacaggctttagtaggggtagggaatttgaactgttgtgtgtcacagcagttgacctctctggactccaatttcctttcctgtgaaatgaactgattagacatgtttcaacattgttagcttctgctgaggcagtgtctagcccaagatggcaaatacatagctcatgtgccactactcccacctccttgaccaatacagacataactaatcaatcacaccactcaggttccctgagcctggatgtgctataagaatcctgaaatcagtgctctggtaagtcattactaattgattagagttcaatctatttgacatcttgggctaatctttggaaggtttccaacaatcacacaaaaccatatgctggctgggtttcatgctggcctatccctgtctgtgatgttccgttccatgagagaaaactcccctaatgctattccatggcgtaacactcccaatactattttgacgcccacgtccccttgcagagggtgcagggggcggtagacgaatgacagacaggaacatatttggggaaggcagggcttaggaagatggaccaaaaagggacttcccacagcacagacctgatcattcggatttcctctttagctattcactgcctagcacatagtaggcacacaataaatgattatggaatgggataaaatttagatctttctgctgcctccactaagttaagtcctgatttacatcaaggagagaactgagataggaaagaacactagattccaagtctggagagttgggggagtccagattctaccaagaatttcctttgtaactttggtaagtcccttttactccctggcaccccggtgtgctgaaaggagttggtccatatatgatctcttagcccctcctatttgcttcttccttgattgctcttggtcaaagggtcagccttgggctggtgatactttagagtaaagaaatggagagttttagcaaaggaccagtctgtccctccctgctttggggtcagctaaagctgtcctttcatgtcagattaacctaggacacttgtagttagcttagacgttggcccttgagcagagacctgagcgtggcattgggacatgacatacctaaagtcagggctaggggacgctgcctgccaagggcatcgagtagtctctacttgctatcccgtacataaaatgctacaagttctaaaatttaccgaccctgcagacaacctctatcccgaaggactcattcggtgctgtgtattatttagggcaactccaaggtctattcagaaaaacgagtgaaccttggtctctttcccaccaaattgaggagtaacccagagggagcagctgccattggcaaccatctcgttgtagctctgtcctagtgtttgctcttgatgatgtttacatgtgatcgccataaagcttgctgtagactgtgtcgatagccgcccgcacagggcaggtcgtactgtccgtttctgtgccgtgctggtgttttccaaaaatgtctgatccaaccactaagtggaattcttccatctccttcctcagtctgtacaaggctgaatcagaatccccattctcgggggctctggttaccgaaggaaaatgcatcaaagagttaaagaatatgagtggatggagtgcagctaaggcccccaccccctgctccgtcacaacttgccccctcaaccaaaaagctgctttgagtcaaaaagcacccataagatacctgcatctgccttgaaatcttgcagcatggagtgtcatatgtactcaggagagaggcagggctttgcgggcaggagaaggaagggaggaatgctctgagctgcaaagacccagtactcaagttctgacgtgggaggagatgcagtgagacgtctcttgttgcctaaagcctgttcctgttggttttcttagagtgatttctcctagacatgtgcagtaggcccactggggctgctgtgcagtggtgagtaaaagggcagggaaggcatggacagcctggtccttctgcatggacagctcagtccatggcccatcccaggtatagagttcagttaatcccatttgagcctgcagcttaagagatggctcatcctaactgtgaagcaaaatcagccccagaggatgtattgatctgactcactgatgtcaaaattgcagtatttttttagcatttgagatttagcagctgccttcagtttggggttacccacatcccagcatcagatatgattaaggaaagaaattggatgtacaacagcaaagaaagtgaatgtcatggtttccctggccaaagaagagggaccctgtcatccttaccaatggggaagaagaaaactagtgcatgtgcaatatgtcaaagttagtcccctagtccctgaggggtttttacacacagatgggctccaggtctgctcgtcaagtttggaggtaccgggtaaatggaggggagctgcagagttggaaacccacatgcatggatgtgtccttggcccagaaccaccatgggatgggggaggccctgagccggctacaagacacccaggaagtaggcaaaggctgactttgcattaaacaataaaagcactttgagaaaaccccaacacttcagcctgggtccgtgtttctacactggaaaatacgagtctcctttggctgtgtgaagtgatcttctagagactgggacagggagtttgggaatggggctgctgtcaggtaggagagagcagagatgcctttggagatgtcagcagcaggagagccagtgctggggccaaccctttgctggccttttgttggaagcccttgaaacagggagccatgggtttagatcttggtacctacctttacagaaagatgaaaacagcccagctgagtgaaatgagtttgtagagtaagtcacttaactgtaagccatctcagaatcagaaaccctaatgtttcttacttgctatgtgaccttgggcccctgtttcctcatctaccaaatgagaatgttgaatatgagcattaaagtccctttcacctctgagaggctcagatccccaaccaggagcattgggaatccatcactcctccttgaaactgattccattctctgacttgacccagctcctgttcagggtgagggttctctgcaagaaccaaccagcagtaggttcaatcccactgtgtcctggctgagttgccttatccaagaagaccagctccccgggacagatctaagccatagtttctagtggggacagtaaggaattaaacccccaacttggctaggtaacgatgtcaaatctcacattaaccttgtctttgtccccactggatagctgttaatccgaatgttgtgaccatttggctgtttctctcttgttctcagacaatactagcaatacactttttttttttttttttaaagaaaaacagcttaggagcttttcacacatttctttcaaatgattgtaaaacatatggggcaacaggaggcattgatcgcgctgcatatgtttagggcagcttttgttttttgtttctttaatggtatagcagcagtgactgagccttcgtgattcctggggacagcttttcagatactctgtttcatcagtatgctttgcacatccggaaggagtacaaaaatccaactgcccaaatttggggcttggaaaataggttttataggtggtcggtccctgggctgtgcaacaactcctcaaagaggggtttatataactagaacccccctgggctgtatttttggtcaaaggagtctccaaggcggcttacaaaagcttcctttttcacttgaccacccttgctcattggttacttgtgaagggaattggtcagtttccacctcagcactttgccttatcaacatgcggtcgccatctagtggccaaaggttgtctccaccagctacccagatggaaggcaaataaatcctttcggccaccctgctgtccatcgtgaactttgggaatgaaatataatggcctgaacgaactgcctttgtgttcagagatcagtgcaacactagggtcagaagactccagaagcagccacttagtagactctcacgcagaactgagaaatgcactagctgtcctgtgggcagaagagacaggagtggaccaggagaggtccaggtgcccgggaagggtttactgtaactgcaatactggcagcccagctgctgaccttgttaagtaaacctttgctgggtggtccgaattctgccctcaaggcaagataagaagttgggtgtaaggattttgtggggggcctggccatgatctttgatatgatccccgaatagccaaatagttttttttgttcaattttttgtttctgtattttgtatttttaaaatcttgtcaaatgtttttgtgttaggaataaaaagtcataaactattcccaactttgtttcttgagggatgttctgattccaatggaaacaggtgggaaatctcaaggggagcgtggacaaggtggtatgtgcagcaggggaatagactgcttggatttccaaatggtttctggggaagatgaccatccagaagtccagcttagtgcagtctgctctggaattcacacccaccccctcgcctccttgtgccatgttgttagcattggcttggagcatctgcttcttccagaggcagctgctaatgttgaaaccaacacgagccctctccccaaccccaggtttctaaagaaggtgtctgtagccagccttaatcaactgggcaaggtggtccctatggtcctttccagcatttccaaatcttggactcaaattattttctcttggtgtgaccacacagcctagagaattctgagcaataggagccagggctttccctgactctgcgacagggtcaaaccaaggaatggctaaacctgtgaggttttgtcatccccgggggtactactgtagggggcattatttattaggaagcttaacaaggtaactacggcctgagtgcgtgagtgtaaggctgtgtttgtggtgggggtgtgtgtgtgtgtatctgtgcacacatacacacgtctgtgcctgtgtgtgtgtgtttgtgtgtgtgtgtgtgtgtggaattacattgatgcatttattgagaaaggtgcaagaatttcacctacacagagggacacatctgctttgttatttataatagaaagctaaattttaattttttaaaggacactgctaatgattgagaatcaagtttttagttttgctattttttttaattggtagaggatttttatatattttttccattttgttgggttgtgtccttatttatataaatactttatccgtaagaggcaaggaggaaaccttctttgcttttacatattgtggttgtcatcgtccctattttatttctggtgtgatttctctgtcttaccttctaaatgagaaaatgttttcttgtatttgtacattgtcagattctatagtttcctagataatttaaccaaattgctctatgtattattattctgtgagtataaagttctattttaatgtctgtaaatacttcagaactggcttcttttctcaaactcccactgtggggttattgtttacatcacagaaactgtagaatctctatgctcatgtactgtaaatagtgaagtgatctgcttataaataaacttaacaaatacactatggagattaaaaacaaaataccacccaca

SEQ ID NO: 22029 - DNA, 4803 bp, Homo sapiens
  source 1..4803: mol_type = unassigned DNA
ctcggcgttgactccgccgcacgctgcagccgcggctggaagatggcggggaacgactgcggcgcgctgctggacgaagagctctcctccttcttcctcaactatctcgctgacacgcagggtggagggtccggggaggagcaactctatgctgactttccagaacttgacctctcccagctggatgccagcgactttgactcggccacctgctttggggagctgcagtggtgcccagagaactcagagactgaacccaaccagtacagccccgatgactccgagctcttccagattgacagtgagaatgaggccctcctggcagagctcaccaagaccctggatgacatccctgaagatgacgtgggtctggctgccttcccagccctggatggtggagacgctctatcatgcacctcagcttcgcctgccccctcatctgcaccccccagccctgccccggagaagccctcggccccagcccctgaggtggacgagctctcactgctgcagaagctcctcctggccacatcctacccaacatcaagctctgacacccagaaggaagggaccgcctggcgccaggcaggcctcagatctaaaagtcaacggccttgtgttaaggcggacagcacccaagacaagaaggctcccatgatgcagtctcagagccgaagttgtacagaactacataagcacctcacctcggcacagtgctgcctgcaggatcggggtctgcagccaccatgcctccagagtccccggctccctgccaaggaggacaaggagccgggtgaggactgcccgagcccccagccagctccagcctctccccgggactccctagctctgggcagggcagaccccggtgccccggtttcccaggaagacatgcaggcgatggtgcaactcatacgctacatgcacacctactgcctcccccagaggaagctgcccccacagacccctgagccactccccaaggcctgcagcaacccctcccagcaggtcagatcccggccctggtcccggcaccactccaaagcctcctgggctgagttctccattctgagggaacttctggctcaagacgtgctctgtgatgtcagcaaaccctaccgtctggccacgcctgtttatgcctccctcacacctcggtcaaggcccaggccccccaaagacagtcaggcctcccctggtcgcccgtcctcggtggaggaggtaaggatcgcagcttcacccaagagcaccgggcccagaccaagcctgcgcccactgcggctggaggtgaaaagggaggtccgccggcctgccagactgcagcagcaggaggaggaagacgaggaagaagaggaggaggaagaggaagaagaaaaagaggaggaggaggagtggggcaggaaaaggccaggccgaggcctgccatggacgaagctggggaggaagctggagagctctgtgtgccccgtgcggcgttctcggagactgaaccctgagctgggcccctggctgacatttgcagatgagccgctggtcccctcggagccccaaggtgctctgccctcactgtgcctggctcccaaggcctacgacgtagagcgggagctgggcagccccacggacgaggacagtggccaagaccagcagctcctacggggaccccagatccctgccctggagagcccctgtgagagtgggtgtggggacatggatgaggaccccagctgcccgcagctccctcccagagactctcccaggtgcctcatgctggccttgtcacaaagcgacccaacttttggcaagaagagctttgagcagaccttgacagtggagctctgtggcacagcaggactcaccccacccaccacaccaccgtacaagcccacagaggaggatcccttcaaaccagacatcaagcatagtctaggcaaagaaatagctctcagcctcccctcccctgagggcctctcactcaaggccaccccaggggctgcccacaagctgccaaagaagcacccagagcgaagtgagctcctgtcccacctgcgacatgccacagcccagccagcctcccaggctggccagaagcgtcccttctcctgttcctttggagaccatgactactgccaggtgctccgaccagaaggcgtcctgcaaaggaaggtgctgaggtcctgggagccgtctggggttcaccttgaggactggccccagcagggtgccccttgggctgaggcacaggcccctggcagggaggaagacagaagctgtgatgctggcgccccacccaaggacagcacgctgctgagagaccatgagatccgtgccagcctcaccaaacactttgggctgctggagaccgccctggaggaggaagacctggcctcctgcaagagccctgagtatgacactgtctttgaagacagcagcagcagcagcggcgagagcagcttcctcccagaggaggaagaggaagaaggggaggaggaggaggaggacgatgaagaagaggactcaggggtcagccccacttgctctgaccactgcccctaccagagcccaccaagcaaggccaaccggcagctctgttcccgcagccgctcaagctctggctcttcaccctgccactcctggtcaccagccactcgaaggaacttcagatgtgagagcagagggccgtgttcagacagaacgccaagcatccggcacgccaggaagcggcgggaaaaggccattggggaaggccgcgtggtgtacattcaaaatctctccagcgacatgagctcccgagagctgaagaggcgctttgaagtgtttggtgagattgaggagtgcgaggtgctgacaagaaataggagaggcgagaagtacggcttcatcacctaccggtgttctgagcacgcggccctctctttgacaaagggcgctgccctgaggaagcgcaacgagccctccttccagctgagctacggagggctccggcacttctgctggcccagatacactgactacggtaagcccctgaaacccagccacagtctagtaagactcaaagcttgggaagcagtgccttccttgaacaaaacccagagctaaagcgccttgtggacatagcttccatccccacaccccagtgtgctgcttggtataactttgcagccactttgcctgaagactaccatcctgtttctcttctggcctctggtccaccttatcctgtcctgtgactgctaccaaagagaatccagcctcccacggcctctaggaagattcagtcatgtgcacagccagctggcagaaccgtggctacggtctccttgacttcacagggccagctgctaccctgtccccttcaggggcattccgtggtgaccccagacaaggcagcagccacctggggacaagatgatgaagaaggacaaagaagtacaatgtacgaaagaattacttggccaggctcagtggctcatgcctgtaatcccatcaccttgggaggctgaggcaagaggatcacttgagcccaggagttcgagaccagcttgggcaacatagtgaaatcctgtctctacaaaaaatataaaaattagccaggcatggtggcttgcgcctatagtcccagctactcaggaggcagaggtgggaggatcacctgaacccaagaggttggagctgcagtgagccatgatggcactactgcattccagcctgggcaacagagcaagaccctgtctcaaaaggaaagaaaaaaaaaaaaacacttactggagagaatccaatgcagccttgatggtacaggactgagtgtcagtgacccggctgggtgccaggccaggcggccctgcccttggctgcatgtccatttatgggaatcagtttcccaatctattaaaaaattctagtgttggctgggtgcagttgctcacgcctgtaatcccagcactttgggaggccgaggcaggaagatcatgaggtcaagagatcgagaccatcgtggccaacatggtgaaaccccctctctattaaaaatacaaaaattagctgggcgtggtggcgcacacctgtagtcccagcaacttgggaggctgaggcgggagaatcacttgaacccgagaggcagaggttgcagtgagctgagatcacatccctgcactccagccttggtgacagagcgagactgcatctcaaaaaaaaaaaaattctagtgttgttagccctcccttatgtggcactgcagcaggttactaatggacgagaagctgttgggggaagtagagttgtagggtgttggagctagaaaggctctggagtgctctagtttgggcctccaggtctctagataggacagccaaggccctgagacactgataccatggccaagatgtcccagcaggatggcaggcagtgcccacagtccagcgctcatcccagctccccaaggccttgggctgcagccactccacggtgcccactcatagtggcagattcttcaaccatccggtctttgtaagttgctcactgccttcccctcttccctgcctcttcacccccatgcccagattccaattcagaagaggcccttcctgcgtcagggaaaagcaagtatgaagccatggattttgacagcttactgaaagaggcccagcagagcctgcattgataacagccttaaccctcgaggaatacctcaatacctcagacaaggcccttccaatatgtttacgttttcaaagaaatcaagtatatgaggagagcgagcgagcgtgagagaacacccgtgagagagacttgaaactgctgtccttt

SEQ ID NO: 22030 - DNA, 471 bp, Homo sapiens
  source 1..471: mol_type = unassigned DNA
atggccgtagggaagttcctgctgggctccctgctgctcctgtccctgcagctgggacagggctggggccccgatgcccgtggggttcccgtggccgatggagagttctcgtctgaacaggtggcaaaggctggagggacctggctgggcacccaccgcccccttgcccgcctgcgccgagccctgtctggtccatgccagctgtggagcctgaccctgtccgtggcagagctaggcctgggctacgcctcagaggagaaggtcatcttccgctactgcgccggcagctgcccccgtggtgcccgcacccagcatggcctggcgctggcccggctgcagggccagggccgagcccacggcgggccctgctgccggcccactcgctacaccgacgtggccttcctcgatgaccgccaccgctggcagcggctgccccagctctcggcggctgcctgcggctgtggtggctga

SEQ ID NO: 22031 - DNA, 1657 bp, Homo sapiens
  source 1..1657: mol_type = unassigned DNA
gcccgcctgatgtcgtcccacgccgtgccggctctcaggcgccggaagtgagctgcgcagcgccggaagcggcggacgcaggaggcctcgtggaggacacagcagcatgggacagtcagggaggtcccggcaccagaagcgcgcccgcgcccaggcgcagctccgcaacctcgaggcctatgccgcgaacccgcactcgttcgtgttcacgcgaggctgcacgggtcgcaacatccggcagctcagcctggacgtgcggcgggtcatggagccgctcactgccagccgtctgcaggttcgtaagaagaactcgctgaaggactgcgtggcagtggctgggcccctcggggtcacacactttctgatcctgagcaaaacagagaccaatgtctactttaagctgatgcgcctcccaggaggccccaccttgaccttccaggtcaagaagtactcgctggtgcgtgatgtggtctcctcactgcgccggcaccgcatgcacgagcagcagtttgcccacccacccctcctggtactcaacagctttggcccccatggtatgcatgtgaagctcatggccaccatgttccagaacctgttcccctccatcaacgtgcacaaggtgaacctgaacaccatcaagcgctgcctcctcatcgactacaaccccgactcccaggagctggacttccgccactatagcatcaaagttgttcctgtgggcgcgagtcgcgggatgaagaagctgctccaggagaagttccccaacatgagccgcctgcaggacatcagcgagctgctggccacgggcgcggggctgtcggagagcgaggcagagcctgacggcgaccacaacatcacagagctgcctcaggctgtcgctggccgtggcaacatgcgggcccagcagagtgcagtgcggctcaccgagatcggcccgcggatgacactgcagctcatcaaggtccaggagggcgtcggggagggcaaagtgatgttccacagttttgtgagcaagacggaggaggagctgcaggccatcctggaagccaaggagaagaagctgcggctgaaggcgcagaggcaggcccagcaggcccagaatgtgcagcgcaagcaggagcagcgggaggcccacagaaagaagagcctggagggcatgaagaaggcacgggtcgggggtagtgatgaagaggcctctgggatcccttcaaggacggcgagcctggagttgggtgaggacgatgatgaacaggaagatgatgacatcgagtatttctgccaggcggtgggcgaggcgcccagtgaggacctgttccccgaggccaagcagaaacggcttgccaagtctccagggcggaagcggaagcggtgggaaatggatcgaggcaggggtcgcctttgtgaccagaagtttcccaagaccaaggacaagtcccagggagcccaggccaggcgggggcccagaggggcttcccgggatggtgggcgaggccggggccggggccgcccagggaagagagtggcctgagcccaagccgcaccggagcagcggctggattgaacgccccagattggggcccgagatgtggccctcggtttcctttcataaaggagttgtgtccccagcccttccactccagtaaagaactgaattggc

SEQ ID NO: 22032 - DNA, 1410 bp, Homo sapiens
  source 1..1410: mol_type = unassigned DNA
aggaggcctcgtggaggacacagcagcatgggacagtcagggaggtcccggcaccagaagcgcgcccgcgcccaggcgcagctccgcaacctcgaggcctatgccgcgaacccgcactcgttcgtgttcacgcgaggctgcacgggtcgcaacatccggcagctcagcctggacgtgcggcgggtcatggagccgctcactgccagccgtctgcaggttcgtaagaagaactcgctgaaggactgcgtggcagtggctgggcccctcggggtcacacactttctgatcctgagcaaaacagagaccaatgtctactttaagctgatgcgcctcccaggaggccccaccttgaccttccaggtcaagaagtactcgctggtgcgtgatgtggtctcctcactgcgccggcaccgcatgcacgagcagcagtttgcccacccacccctcctggtactcaacagctttggcccccatggtatgcatgtgaagctcatggccaccatgttccagaacctgttcccctccatcaacgtgcacaaggtgaacctgaacaccatcaagcgctgcctcctcatcgactacaaccccgactcccaggagctggacttccgccactatagcatcaaagttgttcctgtgggcgcgagtcgcgggatgaagaagctgctccaggagaagttccccaacatgagccgcctgcaggacatcagcgagctgctggccacgggcgcggggctgtcggagagcgaggcagagcctgacggcgaccacaacatcacagagctgcctcaggctgtcgctggccgtggcaacatgcgggcccagcagagtgcagtgcggctcaccgagatcggcccgcggatgacactgcagctcatcaaggtccaggagggcgtcggggagggcaaagtgatgttccacagttttgtgagcaagacggaggaggagctgcaggccatcctggaagccaaggagaagaagctgcggctgaaggcgcagaggcaggcccagcaggcccagaatgtgcagcgcaagcaggagcagcgggaggcccacagaaagaagagcctggagggcatgaagaaggcacgggtcgggggtagtgatgaagaggcctctgggatcccttcaaggacggcgagcctggagttgggtgaggacgatgatgaacaggaagatgatgacatcgagtatttctgccaggcggtgggcgaggcgcccagtgaggacctgttccccgaggccaagcagaaacggcttgccaagtctccagggcggaagcggaagcggtgggaaatggatcgaggcaggggtcgcctttgtgaccagaagtttcccaagaccaaggacaagtcccaggatggtgggcgaggccggggccggggccgcccagggaagagagtggcctga

SEQ ID NO: 22033 - DNA, 2412 bp, Homo sapiens
  source 1..2412: mol_type = unassigned DNA
aggaggcctcgtggaggacacagcagcatgggacagtcagggaggtcccggcaccagaagcgcgcccgcgcccaggcgcagctccgcaacctcgaggcctatgccgcgaacccgcactcgttcgtgttcacgcgaggctgcacgggtcgcaacatccggcagctcagcctggacgtgcggcgggtcatggagccgctcactgccagccgtctgcaggttcgtaagaagaactcgctgaaggactgcgtggcagtggctgggcccctcggggtcacacactttctgatcctgagcaaaacagagaccaatgtctactttaagctgatgcgcctcccaggaggccccaccttgaccttccaggtcaagaagtactcgctggtgcgtgatgtggtctcctcactgcgccggcaccgcatgcacgagcagcagtttgcccacccacccctcctggtactcaacagctttggcccccatggtatgcatgtgaagctcatggccaccatgttccagaacctgttcccctccatcaacgtgcacaaggtgaacctgaacaccatcaagcgctgcctcctcatcgactacaaccccgactcccaggagctggacttccgccactatagcatcaaagttgttcctgtgggcgcgagtcgcgggatgaagaagctgctccaggagaagttccccaacatgagccgcctgcaggacatcagcgagctgctggccacgggcgcggggctgtcggagagcgaggcagagcctgacggcgaccacaacatcacagagctgcctcaggctgtcgctggccgtggcaacatgcgggcccagcagagtgcagtgcggctcaccgagatcggcccgcggatgacactgcagctcatcaaggtccaggagggcgtcggggagggcaaagtgatgttccacagttttgtgagcaagacggaggaggagctgcaggccatcctggaagccaaggagaagaagctgcggctgaaggcgcagaggcaggcccagcaggcccagaatgtgcagcgcaagcaggagcagcgggaggcccacagaaagaagagcctggagggcatgaagaaggcacgggtcgggggtagtgatgaagaggcctctgggatcccttcaaggacggcgagcctggagttgggtgaggacgatgatgaacaggaagatgatgacatcgagtatttctgccaggcggtgggcgaggcgcccagtgaggacctgttccccgaggccaagcagaaacggcttgccaagtctccagggcggaagcggaagcggtgggaaatggatcgaggtgccaagtcctgccctgccaacttcttggcagctgccgacgacaaactcagtgggttccagggggacttcctgtggcccatactggtggttgagttcctggtggccgtggccagcaatggcctggccctgtaccgcttcagcatccggaagcagcgcccatggcaccccgccgtggtcttctctgtccagctggcagtcagcgacctgctctgcgccctgacgctgcccccgctggccgcctacctctatccccccaagcactggcgctatggggaggccgcgtgccgcctggagcgcttcctcttcacctgcaacctgctgggcagcgtcatcttcatcacctgcatcagcctcaaccgctacctgggcatcgtgcaccccttcttcgcccgaagccacctgcgacccaagcacgcctgggccgtgagcgctgccggctgggtcctggccgccctgctggccatgcccacactcagcttctcccacctgaagaggccgcagcagggggcgggcaactgcagcgtggccaggcccgaggcctgcatcaagtgtctggggacagcagaccacgggctggcggcctacagagcgtatagcctggtgctggcggggttgggctgcggcctgccgctgctgctcacgctggcagcctacggcgccctcgggcgggccgtgctacgcagcccaggcatgactgtggccgagaagctgcgtgtggcagcgttggtggccagtggtgtggccctctacgccagctcctatgtgccctaccacatcatgcgggtgctcaacgtggatgctcggcggcgctggagcacccgctgcccgagctttgcagacatagcccaggccacagcagccctggagctggggccctacgtgggctaccaggtgatgcggggcctcatgcccctggccttctgtgtccaccctctactctacatggccgcagtgcccagcctgggctgctgctgccgacactgccccggctacagggacagctggaacccagaggacgccaagagcactggccaagccctgcccctcaatgccacagccgcccctaaaccgtcagagccccagtcccgtgagctgagccaatga

SEQ ID NO: 22034 - DNA, 2224 bp, Homo sapiens
  source 1..2224: mol_type = unassigned DNA
caccctcccccccaaccggtccgtccctcccctccctccctcccccccgccgcctcctcctcctgccgctgccgctgctttggctgctgcgtcatacgccccagagccgccgggacggaggggctgggcctggggaccccccggcctccgcctgcacgcccccccacgcccggacgtgccctctccgcgcgggggactcgcctaggtctcctacgtctgcccctgcccggctcccggcggccccagctgtcaccggcccccccaggatgcaatggcgcagcccccccggctgagccgctctggtgcctcctcactttgggacccagcttctcctgctcccacctctggccccaggcctcggctttgggagggtcaagatgtgctggccagatggactgatgggctgctatacttgggtaccatcaaaaaggtggacagtgctagggaggtgtgtctggtccagtttgaggatgattcgcagtttctggttctatggaaagacattagccctgctgccctccctggagaggaactcctctgttgtgtctgtcgctctgagactgtggtccctgggaaccggctggtcagctgtgagaagtgtcgccatgcttatcaccaggactgccatgttcccagggctccagcccctggagagggagagggcacatcctgggtatgccgccagtgtgtctttgcgatcgccaccaagaggggaggtgccctgaagaagggcccctatgcccgggccatgctgggtatgaagctttctctgccatatggactgaaggggctggactgggatgctggacatctgagcaaccgacagcagagttactgttactgtggtggccctggggagtggaacctgaaaatgctgcagtgccggagctgcctgcagtggttccatgaggcctgcacccagtgtctgagcaagcccctcctctatggggacaggttctatgaatttgaatgctgtgtgtgtcgcgggggccctgagaaagtccggagactacagcttcgctgggtggatgtggcccatcttgtcctgtatcacctcagtgtttgctgtaagaagaaatactttgattttgatcgtgagatcctccccttcacttctgagaattgggacagtttgctcctgggggagctttcagacacccccaaaggagaacgttcttccaggctcctctctgctcttaacagccacaaggaccgtttcatttcagggagagagattaagaagaggaaatgtttgtttggtctccatgctcggatgcctccccctgtggagccccctactggagatggagcactcaccagggcagggccctgggggaggggtctcacgtcccctggggaagcgccggaggccggagccagagcccctgaggaggaggcagaaggggaaagtggaggagctggggccaccctcagcagtgcgcaatcagcccgagccccaggagcagagggagcgggctcatctgcagagggcactgcagcagccccatccggatgtttgcttccttccacccttctgccagcaccgcagggacctctggggacagtggacccccagacaggtcacccctggaacttcacattggtttccccacagacatccctaaaagtgccccccactcgatgactgcctcatcttcctcagtttcatccccatccccaggtcttcctagacgctcagcacccccttctcccctgtgccgtagtttgtctcctgggactgggggaggagtccgaggtggggttggttacctgtcccgaggggaccctgtccgggtccttgctcggagagtacggcctgatggctctgtgcagtacctggttgagtggggaggagggggcatcttctgaacagcctgcctctgcccagctccccattcacacacaccggcactttcataccctgacctctgacctcacctacagctgggatgtacctggagagatagggggtagttctccctactgcccaggctggaatccaagagtggggagtggggaagaggccctcttctctaccctccttcatgattcctgacccctcccatccttcccatttcctttgatgttattttgttacagctttttaaatattttttaaaattatttaacccctgggggcagagactgaggagggaggatgataagggatcccggactctgtatgattgaaataaagagaaataaacaaatctagcagctctga

SEQ ID NO: 22035 - DNA, 2330 bp, Homo sapiens
  source 1..2330: mol_type = unassigned DNA
caccctcccccccaaccggtccgtccctcccctccctccctcccccccgccgcctcctcctcctgccgctgccgctgctttggctgctgcgtcatacgccccagagccgccgggacggaggggctgggcctggggaccccccggcctccgcctgcacgcccccccacgcccggacgtgccctctccgcgcgggggactcgcctaggtctcctacgtctgcccctgcccggctcccggcggccccagctgtcaccggcccccccaggatgcaatggcgcagcccccccggctgagccgctctggtgcctcctcactttgggacccagcttctcctgctcccacctctggccccaggcctcggctttgggagggtcaagatgtgctggccagatggactgatgggctgctatacttgggtaccatcaaaaaggtggacagtgctagggaggtgtgtctggtccagtttgaggatgattcgcagtttctggttctatggaaagacattagccctgctgccctccctggagaggaactcctctgttgtgtctgtcgctctgagactgtggtccctgggaaccggctggtcagctgtgagaagtgtcgccatgcttatcaccaggactgccatgttcccagggctccagcccctggagagggagagggcacatcctgggtatgccgccagtgtgtctttgcgatcgccaccaagaggggaggtgccctgaagaagggcccctatgcccgggccatgctgggtatgaagctttctctgccatatggactgaaggggctggactgggatgctggacatctgagcaaccgacagcagagttactgttactgtggtggccctggggagtggaacctgaaaatgctgcagtgccggagctgcctgcagtggttccatgaggcctgcacccagtgtctgagcaagcccctcctctatggggacaggttctatgaatttgaatgctgtgtgtgtcgcgggggccctgagaaagtccggagactacagcttcgctgggtggatgtggcccatcttgtcctgtatcacctcagtgtttgctgtaagaagaaatactttgattttgatcgtgagatcctccccttcacttctgagaattgggacagtttgctcctgggggagctttcagacacccccaaaggagaacgttcttccaggctcctctctgctcttaacagccacaaggaccgtttcatttcagggagagagattaagaagaggaaatgtttgtttggtctccatgctcggatgcctccccctgtggagccccctactggagatggagcactcaccagcttcccttcagggcagggccctgggggaggggtctcacgtcccctggggaagcgccggaggccggagccagagcccctgaggaggaggcagaaggggaaagtggaggagctggggccaccctcagcagtgcgcaatcagcccgagccccaggagcagagggagcgggctcatctgcagagggcactgcaggcctcagtgtctccaccatcccccagccctaaccagagttaccagggcagcagcggctacaacttccggcccacagatgcccgctgcctgcccagcagccccatccggatgtttgcttccttccacccttctgccagcaccgcagggacctctggggacagtggacccccagacaggtcacccctggaacttcacattggtttccccacagacatccctaaaagtgccccccactcgatgactgcctcatcttcctcagtttcatccccatccccaggtcttcctagacgctcagcacccccttctcccctgtgccgtagtttgtctcctgggactgggggaggagtccgaggtggggttggttacctgtcccgaggggaccctgtccgggtccttgctcggagagtacggcctgatggctctgtgcagtacctggttgagtggggaggagggggcatcttctgaacagcctgcctctgcccagctccccattcacacacaccggcactttcataccctgacctctgacctcacctacagctgggatgtacctggagagatagggggtagttctccctactgcccaggctggaatccaagagtggggagtggggaagaggccctcttctctaccctccttcatgattcctgacccctcccatccttcccatttcctttgatgttattttgttacagctttttaaatattttttaaaattatttaacccctgggggcagagactgaggagggaggatgataagggatcccggactctgtatgattgaaataaagagaaataaacaaatctagcagctctga

SEQ ID NO: 22036 - DNA, 728 bp, Homo sapiens
  source 1..728: mol_type = unassigned DNA
ctctctgctcttaacagccacaaggaccgtttcatttcagggagagagattaagaagaggaaatgtttgtttggtctccatgctcggatgcctccccctgtggagccccctactggagatggagcactcaccagggcagggccctgggggaggggtctcacgtcccctggggaagcgccggaggccggagccagagcccctgaggaggaggcagaaggggaaagtggaggagctggggccaccctcagcagtgcgcaatcagcccgagccccaggagcagagggagcgggctcatctgcagagggcactgcaggcctcagtgtctccaccatcccccagccctaaccagagttaccagggcagcagcggctacaacttccggcccacagatgcccgctgcctgcccagccccatccggatgtttgcttccttccacccttctgccagcaccgcagggacctctggggacagtggacccccagacaggtcacccctggaacttcacattggtttccccacagacatccctaaaagtgccccccactcgatgactgcctcatcttcctcagtttcatccccatccccaggtcttcctagacgctcagcacccccttctcccctgtgccgtagtttgtctcctgggactgggggaggagtccgaggtggggttggttacctgtcccgaggggaccctgtccgggtccttgctcggagagtacggcctgatg

SEQ ID NO: 22037 - DNA, 609 bp, Homo sapiens
  source 1..609: mol_type = unassigned DNA
aagcacggggcgggacgtccacgggaagcggcgcgcacgcccgccgactccctcgcgccaaccgccgacggccgccgcccggtgaaggaggggctcagtcctcccaggtctcctacgtctgcccctgcccggctcccggcggccccagctgtcaccggcccccccaggatgcaatggcgcagcccccccggctgagccgctctggtgcctcctcactttgggacccagcttctcctgctcccacctctggccccaggcctcggctttgggagggtcaagatgtgctggccagatggactgatgggctgctatacttgggtaccatcaaaaaggtggacagtgctagggaggtgtgtctggtccagtttgaggatgattcgcagtttctggttctatggaaagacattagccctgctgccctccctggagaggaactcctctgttgtgtctgtcgctctgagactgtggtccctgggaaccggctggtcagctgtgagaagtgtcgccatgcttatcaccaggactgccatgttcccagggctccagcccctggagagggagagggcacatcctgggtatgccgccagtgtgtctttgcgatcgccacca

SEQ ID NO: 22038 - DNA, 862 bp, Homo sapiens
  source 1..862: mol_type = unassigned DNA
tggggccaccctcagcagtgcgcaatcagcccgagccccaggagcagagggagcgggctcatctgcagagggcactgcaggcctcagtgtctccaccatcccccagccctaaccagagttaccagggcagcagcggctacaacttccggcccacagatgcccgctgcctgcccaggtcaccccatccggatgtttgcttccttccacccttctgccagcaccgcagggacctctggggacagtggacccccagacaggtcacccctggaacttcacattggtttccccacagacatccctaaaagtgccccccactcgatgactgcctcatcttcctcagtttcatccccatccccaggtcttcctagacgctcagcacccccttctcccctgtgccgtagtttgtctcctgggactgggggaggagtccgaggtggggttggttacctgtcccgaggggaccctgtccgggtccttgctcggagagtacggcctgatggctctgtgcagtacctggttgagtggggaggagggggcatcttctgaacagcctgcctctgcccagctccccattcacacacaccggcactttcataccctgacctctgacctcacctacagctgggatgtacctggagagatagggggtagttctccctactgcccaggctggaatccaagagtggggagtggggaagaggccctcttctctaccctccttcatgattcctgacccctcccatccttcccatttcctttgatgttattttgttacagctttttaaatattttttaaaattatttaacccctgggggcagagactgaggagggaggatgataagggatcccggactctgtatg

SEQ ID NO: 22039 - DNA, 609 bp, Homo sapiens; identical to SEQ ID NO: 22037
  source 1..609: mol_type = unassigned DNA

SEQ ID NO: 22040 - DNA, 2330 bp, Homo sapiens
  source 1..2330: mol_type = unassigned DNA
caccctcccccccaaccggtccgtccctcccctccctccctcccccccgccgcctcctcctcctgccgctgccgctgctttggctgctgcgtcatacgccccagagccgccgggacggaggggctgggcctggggaccccccggcctccgcctgcacgcccccccacgcccggacgtgccctctccgcgcgggggactcgcctaggtctcctacgtctgcccctgcccggctcccggcggccccagctgtcaccggcccccccaggatgcaatggcgcagcccccccggctgagccgctctggtgcctcctcactttgggacccagcttctcctgctcccacctctggccccaggcctcggctttgggagggtcaagatgtgctggccagatggactgatgggctgctatacttgggtaccatcaaaaaggtggacagtgctagggaggtgtgtctggtccagtttgaggatgattcgcagtttctggttctatggaaagacattagccctgctgccctccctggagaggaactcctctgttgtgtctgtcgctctgagactgtggtccctgggaaccggctggtcagctgtgagaagtgtcgccatgcttatcaccaggactgccatgttcccagggctccagcccctggagagggagagggcacatcctgggtatgccgccagtgtgtctttgcgatcgccaccaagaggggaggtgccctgaagaagggcccctatgcccgggccatgctgggtatgaagctttctctgccatatggactgaaggggctggactgggatgctggacatctgagcaaccgacagcagagttactgttactgtggtggccctggggagtggaacctgaaaatgctgcagtgccggagctgcctgcagtggttccatgaggcctgcacccagtgtctgagcaagcccctcctctatggggacaggttctatgaatttgaatgctgtgtgtgtcgcgggggccctgagaaagtccggagactacagcttcgctgggtggatgtggcccatcttgtcctgtatcacctcagtgtttgctgtaagaagaaatactttgattttgatcgtgagatcctccccttcacttctgagaattgggacagtttgctcctgggggagctttcagacacccccaaaggagaacgttcttccaagctcctctctgctcttaacagccacaaggaccgtttcatttcagggagagagattaagaagaggaaatgtttgtttggtctccatgctcggatgcctccccctgtggagccccctactggagatggagcactcaccagcttcccttcagggcagggccctgggggaggggtctcacgtcccctggggaagcgccggaggccggagccagagcccctgaggaggaggcagaaggggaaagtggaggagctggggccaccctcagcagtgcgcaatcagcccgagccccaggagcagagggagcgggctcatctgcagagggcactgcaggcctcagtgtctccaccatcccccagccctaaccagagttaccagggcagcagcggctacaacttccggcccacagatgcccgctgcctgcccagcagccccatccggatgtttgcttccttccacccttctgccagcaccgcagggacctctggggacagtggacccccagacaggtcacccctggaacttcacattggtttccccacagacatccctaaaagtgccccccactcgatgactgcctcatcttcctcagtttcatccccatccccaggtcttcctagacgctcagcacccccttctcccctgtgccgtagtttgtctcctgggactgggggaggagtccgaggtggggttggttacctgtcccgaggggaccctgtccgggtccttgctcggagagtacggcctgatggctctgtgcagtacctggttgagtggggaggagggggcatcttctgaacagcctgcctctgcccagctccccattcacacacaccggcactttcataccctgacctctgacctcacctacagctgggatgtacctggagagatagggggtagttctccctactgcccaggctggaatccaagagtggggagtggggaagaggccctcttctctaccctccttcatgattcctgacccctcccatccttcccatttcctttgatgttattttgttacagctttttaaatattttttaaaattatttaacccctgggggcagagactgaggagggaggatgataagggatcccggactctgtatgattgaaataaagagaaataaacaaatctagcagctctga

SEQ ID NO: 22041 - DNA, 836 bp, Homo sapiens
  source 1..836: mol_type = unassigned DNA
ttccctcgtgccccaagggcgaatctcaggtcggaggaaggggctgaggggattccctctcccaccgggtccgactcttcgctccccaagccgcggagggccagcctcttcttcggcgccctccaggcctgttggaggcccccccaggatgcaatggcgcagcccccccggctgagccgctctggtgcctcctcactttgggacccagcttctcctgctcccacctctggccccaggcctcggctttgggagggtcaagatgtgctggccagatggactgatgggctgctatacttgggtaccatcaaaaaggtggacagtgctagggaggtgtgtctggtccagtttgaggatgattcgcagtttctggttctatggaaagacattagccctgctgccctccctggagaggaactcctctgttgtgtctgtcgctctgagactgtggtccctgggaaccggctggtcagctgtgagaagtgtcgccatgcttatcaccaggactgccatgttcccagggctccagcccctggagagggagagggcacatcctgggtatgccgccagtgtgtctttgcgatcgccaccaagaggggaggtgccctgaagaagggcccctatgcccgggccatgctgggtatgaagctttctctgccatatggactgaaggggctggactgggatgctggacatctgagcaaccgacagcagagttactgttactgtggtggccctggggagtggaacctgaaaatgctgcagtgccggagctgcctgcagtggttccatgaggcctgcacccagtgtctgagcaagcccctcctctatggggacag

SEQ ID NO: 22042 - DNA, 836 bp, Homo sapiens; identical to SEQ ID NO: 22041
  source 1..836: mol_type = unassigned DNA

SEQ ID NO: 22043 - DNA, 2224 bp, Homo sapiens
  source 1..2224: mol_type = unassigned DNA
caccctcccccccaaccggtccgtccctcccctccctccctcccccccgccgcctcctcctcctgccgctgccgctgctttggctgctgcgtcatacgccccagagccgccgggacggaggggctgggcctggggaccccccggcctccgcctgcacgcccccccacgcccggacgtgccctctccgcgcgggggactcgcctaggtctcctacgtctgcccctgcccggctcccggcggccccagctgtcaccggcccccccaggatgcaatggcgcagcccccccggctgagccgctctggtgcctcctcactttgggacccagcttctcctgctcccacctctggccccaggcctcggctttgggagggtcaagatgtgctggccagatggactgatgggctgctatacttgggtaccatcaaaaaggtggacagtgctagggaggtgtgtctggtccagtttgaggatgattcgcagtttctggttctatggaaagacattagccctgctgccctccctggagaggaactcctctgttgtgtctgtcgctctgagactgtggtccctgggaaccggctggtcagctgtgagaagtgtcgccatgcttatcaccaggactgccatgttcccagggctccagcccctggagagggagagggcacatcctgggtatgccgccagtgtgtctttgcgatcgccaccaagaggggaggtgccctgaagaagggcccctatgcccgggccatgctgggtatgaagctttctctgccatatggactgaaggggctggactgggatgctggacatctgagcaaccgacagcagagttactgttactgtggtggccctggggagtggaacctgaaaatgctgcagtgccggagctgcctgcagtggttccatgaggcctgcacccagtgtctgagcaagcccctcctctatggggacaggttctatgaatttgaatgctgtgtgtgtcgcgggggccctgagaaagtccggagactacagcttcgctgggtggatgtggcccatcttgtcctgtatcacctcagtgtttgctgtaagaagaaatactttgattttgatcgtgagatcctccccttcacttctgagaattgggacagtttgctcctgggggagctttcagacacccccaaaggagaacgttcttccaagctcctctctgctcttaacagccacaaggaccgtttcatttcagggagagagattaagaagaggaaatgtttgtttggtctccatgctcggatgcctccccctgtggagccccctactggagatggagcactcaccagggcagggccctgggggaggggtctcacgtcccctggggaagcgccggaggccggagccagagcccctgaggaggaggcagaaggggaaagtggaggagctggggccaccctcagcagtgcgcaatcagcccgagccccaggagcagagggagcgggctcatctgcagagggcactgcagcagccccatccggatgtttgcttccttccacccttctgccagcaccgcagggacctctggggacagtggacccccagacaggtcacccctggaacttcacattggtttccccacagacatccctaaaagtgccccccactcgatgactgcctcatcttcctcagtttcatccccatccccaggtcttcctagacgctcagcacccccttctcccctgtgccgtagtttgtctcctgggactgggggaggagtccgaggtggggttggttacctgtcccgaggggaccctgtccgggtccttgctcggagagtacggcctgatggctctgtgcagtacctggttgagtggggaggagggggcatcttctgaacagcctgcctctgcccagctccccattcacacacaccggcactttcataccctgacctctgacctcacctacagctgggatgtacctggagagatagggggtagttctccctactgcccaggctggaatccaagagtggggagtggggaagaggccctcttctctaccctccttcatgattcctgacccctcccatccttcccatttcctttgatgttattttgttacagctttttaaatattttttaaaattatttaacccctgggggcagagactgaggagggaggatgataagggatcccggactctgtatgattgaaataaagagaaataaacaaatctagcagctctga

SEQ ID NO: 22044 - DNA, 1719 bp, Homo sapiens
  source 1..1719: mol_type = unassigned DNA
gggggcggggccggggcggcggggggcccgcgcggcggcggcggcggcggcggcggcagcggcggcggcggccgggacaaggcggaggcgacggcggcggcggcggcgcggggcgctcgggctgatggcggcggcggccgggcccggggctgcgctgtccccgcggccgtgcgacagcgacccagccacccccggagcgcagtccccgaaggatgataatgaagataattcaaatgatgggacccagccatccaaaaggaggcgaatgggctcaggagatagttctaggagttgtgaaacttcaagtcaagatcttggttttagttactatccagcagaaaacttgatagagtacaaatggccacctgatgaaacaggagaatactatatgcttcaagaacaagtcagtgaatatttgggtgtgacctcctttaaaaggaaatatccagatttagagcgacgagatttgtctcacaaggagaaactctacctgagagagctaaatgtcattactgaaactcagtgcactctaggcttaacagcattgcgcagtgatgaagtgattgatttaatgataaaagaatatccagccaaacatgctgagtattctgttattctacaagaaaaagaacgtcaacgaattacagaccattataaagagtattcccaaatgcaacaacagaatactcagaaagttgaagccagtaaagtgcctgagtatattaagaaagctgccaaaaaagcagcagaatttaatagcaacttaaaccgggaacgcatggaagaaagaagagcttattttgacttgcagacacatgttatccaggtacctcaagggaagtacaaagttttgccaacagagcgaacaaaggtcagttcttacccagtggctctcatccccggacagttccaggaatattataagaggtactcaccagatgagctgcggtatctgccattaaacacagccctgtatgagccccctctggatcctgagctccctgctctagacagtgatggtgattcagatgatggcgaagatggtcgaggtgatgagaaacggaaaaataaaggcacttcggacagctcctctggcaatgtatctgaaggggaaagccctcctgacagccaggaggactctttccagggaagacagaaatcaaaagacaaagctgccactccaagaaaagatggtcccaaacgttctgtactgtccaagtcagttcctgggtacaagccaaaggtcattccaaatgctatatgtggaatttgtctgaagggtaaggagtccaacaagaaaggaaaggctgaatcacttatacactgctcccaatgtgagaatagtggccatccttcttgcctggatatgacaatggagcttgtttctatgattaagacctacccatggcagtgtatggaatgtaaaacatgcattatatgtggacaaccccaccatgaagaagaaatgatgttctgtgatatgtgtgacagaggttatcatactttttgtgtgggccttggtgctattccatcaggtcgctggatttgtgactgttgtcagcgggcccccccaacacccaggaaagtgggcagaagggggaaaaacagcaaagagggataaaatagtttttgactctaatactgtatatgcatttaagtggaatatttggtgccatttacaacattattttcatgccaataaaagattttttttgcaaa

SEQ ID NO: 22045 - DNA, 1589 bp, Homo sapiens
  source 1..1589: mol_type = unassigned DNA
atggcggcggcggccgggcccggggctgcgctgtccccgcggccgtgcgacagcgacccagccacccccggagcgcagtccccgaaggatgataatgaagataattcaaatgatgggacccagccatccaaaaggaggcgaatgggctcaggagatagttctaggagttgtgaaacttcaagtcaagatcttggttttagttactatccagcagaaaacttgatagagtacaaatggccacctgatgaaacaggagaatactatatgcttcaagaacaagtcagtgaatatttgggtgtgacctcctttaaaaggaaatatccagagcgacgagatttgtctcacaaggagaaactctacctgagagagctaaatgtcattactgaaactcagtgcactctaggcttaacagcattgcgcagtgatgaagtgattgatttaatgataaaagaatatccagccaaacatgctgagtattctgttattctacaagaaaaagaacgtcaacgaattacagaccattataaagagtattcccaaatgcaacaacagaatactcagaaagttgaagccagtaaagtgcctgagtatattaagaaagctgccaaaaaagcagcagaatttaatagcaacttaaaccgggaacgcatggaagaaagaagagcttattttgacttgcagacacatgttatccaggtacctcaagggaagtacaaagttttgccaacagagcgaacaaaggtcagttcttacccagtggctctcatccccggacagttccaggaatattataagaggtactcaccagatgagctgcggtatctgccattaaacacagccctgtatgagccccctctggatcctgagctccctgctctagacagtgatggtgattcagatgatggcgaagatggtcgaggtgatgagaaacggaaaaataaaggcacttcggacagctcctctggcaatgtatctgaaggggaaagccctcctgacagccaggaggactctttccagggaagacagaaatcaaaagacaaagctgccactccaagaaaagatggtcccaaacgttctgtactgtccaagtcagttcctgggtacaagccaaaggtcattccaaatgctatatgtggaatttgtctgaagggtaaggagtccaacaagaaaggaaaggctgaatcacttatacactgctcccaatgtgagaatagtggccatccttcttgcctggatatgacaatggagcttgtttctatgattaagacctacccatggcagtgtatggaatgtaaaacatgcattatatgtggacaaccccaccatgaagaagaaatgatgttctgtgatatgtgtgacagaggttatcatactttttgtgtgggccttggtgctattccatcaggtcgctggatttgtgactgttgtcagcgggcccccccaacacccaggaaagtgggcagaagggggaaaaacagcaaagagggataaaatagtttttgactctaatactgtatatgcatttaagtggaatatttggtgccatttacaacattattttcatgccaataaaagattttttttgcaaa

SEQ ID NO: 22046 - DNA, 1471 bp, Homo sapiens
  source 1..1471: mol_type = unassigned DNA
agcccagtgcttccaccacaaccgatgtcaactctcctagcgcccctccgctcaccggtaaaccaggacagtggaggggcgccctgatgcgggcaagactcagccaaaggtggaaaagttgaaggggtgttcccagcagagaggatgacacaaaggcaccaaaccacaaaacgtcacacgtaaacatcatacgtggcaaccacaagccaatcagttggatatttcattcattggtatacatatggactgtaaggtgtctttcaggttgcagaaaagatggaaaaaaggacatgtgcactctgccccaaagatgtcgaatataatgtcctatactttgcacaatcagagaatatagctgctcatgagaattgtttgctgtattcttcaggacttgtggaatgtgaggatcaggatccacttaatcctgatagaagttttgatgtggaatcagtaaagaaagaaatccagagaggaaggaagttgaaatgcaaattttgtcataaaagaggagccaccgtgggatgtgatttaaaaaactgtaacaagaattaccactttttctgtgccaagaaggacgacgcagttccacagtctgatggagttcgaggaatttataaactgctttgccagcaacatgctcaattcccgatcatcgctcaaagtgctaaattttcaggagtgaaaagaaaaagaggaaggaagaaacccctctcaggcaatcatgtacagccacccgaaacaatgaaatgtaatacattcataagacaagtgaaagaagagcatggcagacacacagatgcaactgtgaaagttccttttcttaagaaatgcaaggaagcaggacttcttaattacttacttgaagaaatattagacaaagttcattcaattccagaaaaactcatggatgagactacttcagaatcagactatgaagaaatcgggagtgcactttttgactgtagattgttcgaagacacatttgtaaattttcaagcagcaatagagaaaaaaattcatgcatctcaacaaaggtggcagcagttgaaggaagagattgagctacttcaggacttaaaacaaaccttgtgctcttttcaagaaaatagagatcttatgtcaagttctacatcaatatcatccctgtcttattagggattaccgtttcctaagccaagagtcatgtcaaattgcaatcaggctcaaaaccagagaccaggctgtgaaatccacacatctttagaactagtcgtctcctcttggcctcagcagctcttccctgttcttactggttgacattttgatcactctttgcacactcttgtgttttttgctcactgtcacattcccagcacctagtatgctcagtaaatgtttgtggaataagtgcataaaatgttcttaacctttgattctacttacagcccatgatagcctcttagatataataaatttggattatactacttta

SEQ ID NO: 22047 - DNA, 1359 bp, Homo sapiens
  source 1..1359: mol_type = unassigned DNA
gatctcgctatccggccgccacccgcagctgcagcacagtcatggcccaggcgtcgccgccccggcccgagagggtgctcggcgccagcagcccggaggcccggcccgcgcaggaggcgctcctccttcccaccggtgtctttcaggttgcagaaaagatggaaaaaaggacatgtgcactctgccccaaagatgtcgaatataatgtcctatactttgcacaatcagagaatatagctgctcatgagaattgtttgctgtattcttcaggacttgtggaatgtgaggatcaggatccacttaatcctgatagaagttttgatgtggaatcagtaaagaaagaaatccagagaggaaggaagttgaaatgcaaattttgtcataaaagaggagccaccgtgggatgtgatttaaaaaactgtaacaagaattaccactttttctgtgccaagaaggacgacgcagttccacagtctgatggagttcgaggaatttataaactgctttgccagcaacatgctcaattcccgatcatcgctcaaagtgctaaattttcaggagtgaaaagaaaaagaggaaggaagaaacccctctcaggcaatcatgtacagccacccgaaacaatgaaatgtaatacattcataagacaagtgaaagaagagcatggcagacacacagatgcaactgtgaaagttccttttcttaagaaatgcaaggaagcaggacttcttaattacttacttgaagaaatattagacaaagttcattcaattccagaaaaactcatggatgagactacttcagaatcagactatgaagaaatcgggagtgcactttttgactgtagattgttcgaagacacatttgtaaattttcaagcagcaatagagaaaaaaattcatgcatctcaacaaaggtggcagcagttgaaggaagagattgagctacttcaggacttaaaacaaaccttgtgctcttttcaagaaaatagagatcttatgtcaagttctacatcaatatcatccctgtcttattagggattaccgtttcctaagccaagagtcatgtcaaattgcaatcaggctcaaaaccagagaccaggctgtgaaatccacacatctttagaactagtcgtctcctcttggcctcagcagctcttccctgttcttactggttgacattttgatcactctttgcacactcttgtgttttttgctcactgtcacattcccagcacctagtatgctcagtaaatgtttgtggaataagtgcataaaatgttcttaacctttgattctacttacagcccatgatagcctcttagatataataaatttggattatactactttacttgta

SEQ ID NO: 22048 - DNA, 903 bp, Homo sapiens
  source 1..903: mol_type = unassigned DNA
gccgccccggcccgagagggtgctcggcgccagcagcccggaggcccggcccgcgcaggaggcgctcctccttcccaccgctgtattcttcaggacttgtggaatgtgaggatcaggatccacttaatcctgatagaagttttgatgtggaatcagtaaagaaagaaatccagagaggaaggaagttgaaatgcaaattttgtcataaaagaggagccaccgtgggatgtgatttaaaaaactgtaacaagaattaccactttttctgtgccaagaaggacgacgcagttccacagtctgatggagttcgaggaatttataaactgctttgccagcaacatgctcaattcccgatcatcgctcaaagtgctaaattttcaggagtgaaaagaaaaagaggaaggaagaaacccctctcaggcaatcatgtacagccacccgaaacaatgaaatgtaatacattcataagacaagtgaaagaagagcatggcagacacacagatgcaactgtgaaagttccttttcttaagaaatgcaaggaagcaggacttcttaattacttacttgaagaaatattagacaaagttcattcaattccagaaaaactcatggatgagactacttcagaatcagactatgaagaaatcgggagtgcactttttgactgtagattgttcgaagacacatttgtaaattttcaagcagcaatagagaaaaaaattcatgcatctcaacaaaggtggcagcagttgaaggaagagattgagctacttcaggacttaaaacaaaccttgtgctcttttcaagaaaatagagatcttatgtcaagttctacatcaatatcatccctgtcttattagggattaccgtttcctaagccaagagtcatgtcaaattgcaatc

SEQ ID NO: 22049 - DNA, 610 bp, Homo sapiens
  source 1..610: mol_type = unassigned DNA
gcttccaccacaaccgatgtcaactctcctagcgcccctccgctcaccggtaaaccaggacagtggaggggcgccctgatgcggtgtctttcaggttgcagaaaagatggaaaaaaggacatgtgcactctgccccaaagatgtcgaatataatgtcctatactttgcacaatcagagaatatagctgctcatgagaattgtttgctgtattcttcaggacttgtggaatgtgaggatcaggatccacttaatcctgatagaagttttgatgtggaatcagtaaagaaagaaatccagagaggaaggaagttgaaatgcaaattttgtcataaaagaggagccaccgtgggatgtgatttaaaaaactgtaacaagaattaccactttttctgtgccaagaaggacgacgcagttccacagtctgatggagttcgaggaatttataaactgctttgccagcaacatgctcaattcccgatcatcgctcaaagtgctaaattttcaggagtgaaaagaaaaagaggaaggaagaaacccctctcaggcaatcatgtacagccacccgaaacaatgaaatgtaatacattcataagacaagtgaaagaagag

SEQ ID NO: 22050 - DNA, 566 bp, Homo sapiens
  source 1..566: mol_type = unassigned DNA
agtgcttccaccacaaccgatgtcaactctcctagcgcccctccgctcaccggtaaaccaggacagtggaggggcgccctgatgcgggcaagactcagccaaaggtggaaaagttgaaggggtgttcccagcagagaggatgacacaaaggcaccaaaccacaaaacgtcacacgtaaacatcatacgtggcaaccacaagccaatcagttggatatttcattcattggtatacatatggactgtaaggtgtctttcaggttgcagaaaagatggaaaaaaggacatgtgcactctgccccaaagatgtcgaatataatgtcctatactttgcacaatcagagaatatagctgctcatgagaattgtttgctgtattcttcaggacttgtggaatgtgaggatcaggatccacttaatcctgatagaagttttgatgtggaatcagtaaagaaagaaatccagagaggaaggaagttgaaatgcaaattttgtcataaaagaggagccaccgtgggatgtgatttaaaaaactgtaacaagaattaccactttttctgtgccaaga

SEQ ID NO: 22051 - DNA, 1318 bp, Homo sapiens
  source 1..1318: mol_type = unassigned DNA
cacaaaggcaccaaaccacaaaacgtcacacgtaaacatcatacgtggcaaccacaagccaatcagttggatatttcattcattggtatacatatggactgtaaggtgtctttcaggttgcagaaaagatggaaaaaaggacatgtgcactctgccccaaagatgtcgaatataatgtcctatactttgcacaatcagagaatatagctgctcatgagaattgtttgctgtattcttcaggacttgtggaatgtgaggatcaggatccacttaatcctgatagaagttttgatgtggaatcagtaaagaaagaaatccagagaggaaggaagttgaaatgcaaattttgtcataaaagaggagccaccgtgggatgtgatttaaaaaactgtaacaagaattaccactttttctgtgccaagaaggacgacgcagttccacagtctgatggagttcgaggaatttataaactgctttgccagcaacatgctcaattcccgatcatcgctcaaagtgctaaattttcaggagtgaaaagaaaaagaggaaggaagaaacccctctcaggcaatcatgtacagccacccgaaacaatgaaatgtaatacattcataagacaagtgaaagaagagcatggcagacacacagatgcaactgtgaaagttccttttcttaagaaatgcaaggaagcaggacttcttaattacttacttgaagaaatattagacaaagttcattcaattccagaaaaactcatggatgagactacttcagaatcagactatgaagaaatcgggagtgcactttttgactgtagattgttcgaagacacatttgtaaattttcaagcagcaatagagaaaaaaattcatgcatctcaacaaaggtggcagcagttgaaggaagagattgagctacttcaggacttaaaacaaaccttgtgctcttttcaagaaaatagagatcttatgtcaagttctacatcaatatcatccctgtcttattagggattaccgtttcctaagccaagagtcatgtcaaattgcaatcaggctcaaaaccagagaccaggctgtgaaatccacacatctttagaactagtcgtctcctcttggcctcagcagctcttccctgttcttactggttgacattttgatcactctttgcacactcttgtgttttttgctcactgtcacattcccagcacctagtatgctcagtaaatgtttgtggaataagtgcataaaatgttcttaacctttgattctacttacagcccatgatagcctcttagatataataaatttggattatacta

SEQ ID NO: 22052 - DNA, 836 bp, Homo sapiens
  source 1..836: mol_type = unassigned DNA
actcggccgggcagccgcgggccgagcgcagccgcctccgccaccgatgcgcctggtggccagactccaagtgggaccggcggacacgcagcctcgcgtgtcaggggaagctgatggagaatcgagctctggatccagggactcgggactcctatggtgccaccagccacctccccaacaagggggccctggcgaaggtcaagaacaacttcaaagacttgatgtccaaactgacggagggccagtatgtgctgtgccggtggacagatggcctgtactacctcgggaagatcaagagggtcagcagctctaagcaaagctgcctcgtgactttcgaagataattccaaatactgggtcctatggaaggacatacagcatgccggtgttccaggagaggagcccaagtgcaacatctgcctagggaagacatcagggccgctgaatgagatcctcatctgcgggaagtgtggcctgggttaccaccagcagtgccacatccccatagcgggcagtgctgaccagcccctgctcacaccttggttctgccgacgctgcatcttcgcactggctgtgcgggtgagccttccatcctccccagtccctgcctctcctgcctcctccagtggggcagaccagagactcccatcacagagtctgagctccaagcagaagggccacacctgggctttggagacagatagcgcctctgccactgtccttggccaggatttgtagactccctgagcctcagtttcctcaactgtaaagtggagatgggtttggtgtcgggaataacgggaccaataaatgatgctttactattaaaaaagaaaa

SEQ ID NO: 22053 - DNA, 4241 bp, Homo sapiens
  source 1..4241: mol_type = unassigned DNA
gaaaaagatggcgccccgcgcccggggggccccttcctgagcgccccggcccctccctccgccgcctccccctcctccccgcggcgcccccgccccgccccgcccccgccgagaccccgaccccggccccacgggcggacactcggccgggcagccgcgggccgagcgcagccgcctccgccaccgatgcgcctggtggccagactccaagtgggaccggcggacacgcagcctcgcgtgtcaggggaagctgatggagaatcgagctctggatccagggactcgggactcctatggtgccaccagccacctccccaacaagggggccctggcgaaggtcaagaacaacttcaaagacttgatgtccaaactgacggagggccagtatgtgctgtgccggtggacagatggcctgtactacctcgggaagatcaagagggtcagcagctctaagcaaagctgcctcgtgactttcgaagataattccaaatactgggtcctatggaaggacatacagcatgccggtgttccaggagaggagcccaagtgcaacatctgcctagggaagacatcagggccgctgaatgagatcctcatctgcgggaagtgtggcctgggttaccaccagcagtgccacatccccatagcgggcagtgctgaccagcccctgctcacaccttggttctgccgacgctgcatcttcgcactggctgtgcggaaaggcggcgcgctgaagaagggcgccatcgccaggacgctgcaggccgtgaagatggtgctgtcctaccagcccgaggagctcgagtgggactcgccccatcgcaccaaccagcagcaatgctactgctactgcggcgggcccggagaatggtacctgcggatgctgcaatgttaccggtgcaggcagtggttccacgaggcctgcacccagtgcctcaatgagcccatgatgtttggagaccggttttacctgttcttctgctccgtgtgtaaccagggcccagagtacatcgagaggctgcccctgcgatgggtggatgtggttcacctggccctctataatctgggggtacagagcaagaagaagtactttgactttgaggagattctggcctttgtcaaccaccactgggagctcctgcagcttggcaagctcaccagcaccccagtgacagatcgaggaccacatctcctcaacgctctgaacagttataaaagccggttcctctgcggcaaggagatcaagaagaagaagtgcatcttccgcctgcgcatccgcgtcccacccaacccgccagggaagctgctgcctgacaaaggactgctgccaaatgagaacagcgcctcctctgagctgcgtaagagaggaaagagcaagcctggtttgttgcctcacgaattccagcagcagaaaaggcgagtttatagaagaaaaagatcaaagtttttgctggaagatgctattcccagtagtgacttcacctcagcctggagcaccaaccaccacctggctagcatatttgacttcacgctggatgaaattcaaagtttaaaaagtgccagctcaggccagaccttcttctcagatgtcgactccaccgacgctgccagcacctctggctctgcctccaccagcctctcctatgactccagatggacagtgggcagccgaaagaggaagctggcagccaaggcatacatgcccctgcgggcaaagcggtgggcagctgagctggatggacgctgcccctcggacagcagtgcagagggggcttcagtccccgagcggccagacgaaggcattgacagccacacatttgagagcatcagtgaagatgactcatccctgtcccacctcaagtcatctatcaccaactactttggtgcagctgggcggttggcctgtggggagaagtaccaggtgttggctcggagggtcacacctgagggcaaggttcagtacctggtggagtgggaagggaccaccccttactgactagcccccgggggtgccaggggtcctgaaaaccaaaggaggagcagcagaagccataggctccccagctttctccaggctggggtgggagaaggaagcaggacagagctgcaagtgcctggcagaatgccctgcctgcctgcctgccaggccaaggcctgcgtctctctgctgtaccagctctgttccagggcctcctcaggctcgttacccctgtgcctgtgtctctacacactccacaccccctcaaactctgtttatctgttctctgaccttgtgtcccctgcgctgggacccttcctcctgaggcccaggtctttgtccccagttgtgtgccttgacctctctcgcccctttctgggtgtgttcgcacatcctgtgtgtgcacagctgtccctccactggatccccttcacacgtgacccgtggggcagccagtcctcccagggactacataacaggcacctttgagagagcatgggagaaggtggataagaggatgctgctcagtgcttttctcttccactttcctgccactccccactaccctcggagagaggtggtgggatgggagagagcccctgtgaaagcctgtgaggatctgaagagtaaagggctgggtctgcctcagaaggcaccagcaccagggcccaggtattaaggctgagagtgaaggctgccaatgtcagctttggaggtcccagaagtcttctgttctctggcctcaccccctcagtcgccatagagctgggcctggccttgctggaatggaggcatccttccaaacctgggggacgggggtggggggtggtagtggtgggagggaaaccatgtcttgctaaacctgtttctggtgcctcccatccccagacccaccagacaccacacagcagacaatacacacccactcgcacaagcttccatccacatgtgttgtactttcagctctaggcatgcagacaaccccacacggccacaccaccacatgcccaagtgtacacacacagagccacaccgtccctctgggcctgctggctcctcccttggctttcccttggcccacttccagggcccaggtgctgcaactaaatgtgaaagctcagtggccgctccttctttcagcccatcaaccagcattggtcccatagggaagcacaggggactcaccctctttcatatcccttgccctgccctgaaatggacaatcactttttgggataggttgaaatttttaaagagcctgcatcatttggttccctcaaagggaagcccttgccagtgggggtttgaaagagaatttttggaaccaacattcaaattctgcctcatctggagggaaaccaaaattgggagggggaagaggacccctgatgttttgctgcttccagagatattagaaactgactcacttgattggaaaatggacaaaagtgccttgacgtggagggtgggcaccagatggggaccagccttgccaactgctgctgtggcctccagcttggctggttttgcaggccgccagcaggaaggcgaaggtggtagtacagcaagaggcactggcggggcagcaggcctgcaggagctgtttttccattgctaggcctgacccctctctacctgtgagcgttcagggggtccctgagatagtttagatgcccccccatcttagacctcagctcccacagtgccttttaagggggacctcacctcctgtgcacagcccacccactttcctctgcttccctggcacagcccaggcatagacgagctggcgttggacccagttcttcccccttttcagccccacagctgctgccacaggggccaactagggccaggtggaaggggagctgagaagccaacccctagcccaggggtgctgtgggaactgggatccaatttgtagcttcctgcctggcttcagagagcccagcaaccttctaggcctgctttccagacttctgagatagcctgggatgagcaatcctgttatagtacatctggaccttccctacctgggctctggggaggctgtgggcctggagagggaaaaggagggagggggtgtctgcaccacctgggaagatagcacaaggcctaatgaggtcaccctgactccccaccccagcatttcattcataccagataatagctgcattactgccaactgaccttataaccctctgcaccttcaaaaagattcatggtttttaattgctgcttttaataacatttgttaaagtta

SEQ ID NO: 22054 - DNA, 1528 bp, Homo sapiens
  source 1..1528: mol_type = unassigned DNA
aggttagaccttggggcgaggcctcgggaggcgggcctggcgggttgcgaccgcccaagcagggccccagggagatggtacctgcggatgctgcaatgttaccggtgcaggcagtggttccacgaggcctgcacccagtgcctcaatgagcccatgatgtttggagaccggttttacctgttcttctgctccgtgtgtaaccagggcccagagtacatcgagaggctgcccctgcgatgggtggatgtggttcacctggccctctataatctgggggtacagagcaagaagaagtactttgactttgaggagattctggcctttgtcaaccaccactgggagctcctgcagcttggcaagctcaccagcaccccagtgacagatcgaggaccacatctcctcaacgctctgaacagttataaaagccggttcctctgcggcaaggagatcaagaagaagaagtgcatcttccgcctgcgcatccgcgtcccacccaacccgccagggaagctgctgcctgacaaaggactgctgccaaatgagaacagcgcctcctctgagctgcgtaagagaggaaagagcaagcctggtttgttgcctcacgaattccagcagcagaaaaggcgagtttatagaagaaaaagatcaaagtttttgctggaagatgctattcccagtagtgacttcacctcagcctggagcaccaaccaccacctggctagcatatttgacttcacgctggatgaaattcaaagtttaaaaagtgccagctcaggccagaccttcttctcagatgtcgactccaccgacgctgccagcacctctggctctgcctccaccagcctctcctatgactccagatggacagtgggcagccgaaagaggaagctggcagccaaggcatacatgcccctgcgggcaaagcggtgggcagctgagctggatggacgctgcccctcggacagcagtgcagagggggcttcagtccccgagcggccagacgaaggcattgacagccacacatttgagagcatcagtgaagatgactcatccctgtcccacctcaagtcatctatcaccaactactttggtgcagctgggcggttggcctgtggggagaagtaccaggtgttggctcggagggtcacacctgagggcaaggttcagtacctggtggagtgggaagggaccaccccttactgactagcccccgggggtgccaggggtcctgaaaaccaaaggaggagcagcagaagccataggctccccagctttctccaggctggggtgggagaaggaagcaggacagagctgcaagtgcctggcagaatgccctgcctgcctgcctgccaggccaaggcctgcgtctctctgctgtaccagctctgttccagggcctcctcaggctcgttacccctgtgcctgtgtctctacacactccacaccccctcaaactctgtttatctgttctctgaccttgtgtcccctgcgctgggacccttcctcctgaggcccaggtctttgtccc

SEQ ID NO: 22055 - DNA, 558 bp, Homo sapiens
  source 1..558: mol_type = unassigned DNA
ttttcgaaatctccctgaactttggcggcccgaacgcctccgggggtgtcaggggaagctgatggagaatcgagctctggatccagggactcgggactcctatggtgccaccagccacctccccaacaagggggccctggcgaaggtcaagaacaacttcaaagacttgatgtccaaactgacggagggccagtatgtgctgtgccggtggacagatggcctgtactacctcgggaagatcaagagggtcagcagctctaagcaaagctgcctcgtgactttcgaagataattccaaatactgggtcctatggaaggacatacagcatgccggtgttccaggagaggagcccaagtgcaacatctgcctagggaagacatcagggccgctgaatgagatcctcatctgcgggaagtgtggcctgggttaccaccagcagtgccacatccccatagcgggcagtgctgaccagcccctgctcacaccttggttctgccgacgctgcatcttcgcactggctgtgcggaaaggcggcgcgctgaagaagggcgccatcgc

SEQ ID NO: 22056 - DNA, 888 bp, Homo sapiens
  source 1..888: mol_type = unassigned DNA
cgcccggccagggtggaggcgggtgcggcgacccggccggctcctagaggcgcagcgggagaggaagtgtcagtttgtgaacctgcagcggccccggcctggcccctggccgggcgggcggggacctcgcagcgccgggcgagccaggtggcagggagaggacagggattcagaccgcatcccctgcccgggagcctgtgcgctctgcgctggagaaaaaggagatgggagtgggggtggagaaggtcgtggccacgccaccatctggggagccgagacccctgcagtgcctggctcgccccagggccccgcacatacttagcttcacacactccctggcacaatgccgtagacatcatcctgcccagtctcacaggagtacacacacgcaccacacagaaacaggcactggactctctccctgtgaacagatagtcacaacaccaggtgcccagcgccatggccacaaggaggagacccgagtaggcccgcggggaaagagagaggctgtgtgtggctgtagtggagagcatgtggagggacttggagccagtgtcaggggaagctgatggagaatcgagctctggatccagggactcgggactcctatggtgccaccagccacctccccaacaagggggccctggcgaaggtcaagaacaacttcaaagacttgatgtccaaactgacggagggccagtatgtgctgtgccggtggacagatggcctgtactacctcgggaagatcaagagggtcagcagctctaagcaaagctgcctcgtgactttcgaagataattccaaatactgggtcctatggaaggacatacagcatgccggtgttccaggagaggagcccaagtgcaacatctgcctagggaagacatc

SEQ ID NO: 22057 - DNA, 4100 bp, Homo sapiens
  source 1..4100: mol_type = unassigned DNA
actcggccgggcagccgcgggccgagcgcagccgcctccgccaccgatgcgcctggtggccagactccaagtgggaccggcggacacgcagcctcgcgtgtcaggggaagctgatggagaatcgagctctggatccagggactcgggactcctatggtgccaccagccacctccccaacaagggggccctggcgaaggtcaagaacaacttcaaagacttgatgtccaaactgacggagggccagtatgtgctgtgccggtggacagatggcctgtactacctcgggaagatcaagagggtcagcagctctaagcaaagctgcctcgtgactttcgaagataattccaaatactgggtcctatggaaggacatacagcatgccggtgttccaggagaggagcccaagtgcaacatctgcctagggaagacatcagggccgctgaatgagatcctcatctgcgggaagtgtggcctgggttaccaccagcagtgccacatccccatagcgggcagtgctgaccagcccctgctcacaccttggttctgccgacgctgcatcttcgcactggctgtgcggaaaggcggcgcgctgaagaagggcgccatcgccaggacgctgcaggccgtgaagatggtgctgtcctaccagcccgaggagctcgagtgggactcgccccatcgcaccaaccagcagcaatgctactgctactgcggcgggcccggagaatggtacctgcggatgctgcaatgttaccggtgcaggcagtggttccacgaggcctgcacccagtgcctcaatgagcccatgatgtttggagaccggttttacctgttcttctgctccgtgtgtaaccagggcccagagtacatcgagaggctgcccctgcgatgggtggatgtggttcacctggccctctataatctgggggtacagagcaagaagaagtactttgactttgaggagattctggcctttgtcaaccaccactgggagctcctgcagcttggcaagctcaccagcaccccagtgacagatcgaggaccacatctcctcaacgctctgaacagttataaaagccggttcctctgcggcaaggagatcaagaagaagaagtgcatcttccgcctgcgcatccgcgtcccacccaacccgccagggaagctgctgcctgacaaaggactgctgccaaatgagaacagcgcctcctctgagctgcgtaagagaggaaagagcaagcctggtttgttgcctcacgaattccagcagcagaaaaggcgagtttatagaagaaaaagatcaaagtttttgctggaagatgctattcccagtagtgacttcacctcagcctggagcaccaaccaccacctggctagcatatttgacttcacgctggatgaaattcaaagtttaaaaagtgccagctcaggccagaccttcttctcagatgtcgactccaccgacgctgccagcacctctggctctgcctccaccagcctctcctatgactccagatggacagtgggcagccgaaagaggaagctggcagccaaggcatacatgcccctgcgggcaaagcggtgggcagctgagctggatggacgctgcccctcggacagcagtgcagagggggcttcagtccccgagcggccagacgaaggcattgacagccacacatttgagagcatcagtgaagatgactcatccctgtcccacctcaagtcatctatcaccaactactttggtgcagctgggcggttggcctggggagaagtaccaggtgttggctcggagggtcacacctgagggcaaggttcagtacctggtggagtgggaagggaccaccccttactgactagcccccgggggtgccaggggtcctgaaaaccaaaggaggagcagcagaagccataggctccccagctttctccaggctggggtgggagaaggaagcaggacagagctgcaagtgcctggcagaatgccctgcctgcctgcctgccaggccaaggcctgcgtctctctgctgtaccagctctgttccagggcctcctcaggctcgttacccctgtgcctgtgtctctacacactccacaccccctcaaactctgtttatctgttctctgaccttgtgtcccctgcgctgggacccttcctcctgaggcccaggtctttgtccccagttgtgtgccttgacctctctcgcccctttctgggtgtgttcgcacatcctgtgtgtgcacagctgtccctccactggatccccttcacacgtgacccgtggggcagccagtcctcccagggactacataacaggcacctttgagagagcatgggagaaggtggataagaggatgctgctcagtgcttttctcttccactttcctgccactccccactaccctcggagagaggtggtgggatgggagagagcccctgtgaaagcctgtgaggatctgaagagtaaagggctgggtctgcctcagaaggcaccagcaccagggcccaggtattaaggctgagagtgaaggctgccaatgtcagctttggaggtcccagaagtcttctgttctctggcctcaccccctcagtcgccatagagctgggcctggccttgctggaatggaggcatccttccaaacctgggggacgggggtggggggtggtagtggtgggagggaaaccatgtcttgctaaacctgtttctggtgcctcccatccccagacccaccagacaccacacagcagacaatacacacccactcgcacaagcttccatccacatgtgttgtactttcagctctaggcatgcagacaaccccacacggccacaccaccacatgcccaagtgtacacacacagagccacaccgtccctctgggcctgctggctcctcccttggctttcccttggcccacttccagggcccaggtgctgcaactaaatgtgaaagctcagtggccgctccttctttcagcccatcaaccagcattggtcccatagggaagcacaggggactcaccctctttcatatcccttgccctgccctgaaatggacaatcactttttgggataggttgaaatttttaaagagcctgcatcatttggttccctcaaagggaagcccttgccagtgggggtttgaaagagaatttttggaaccaacattcaaattctgcctcatctggagggaaaccaaaattgggagggggaagaggacccctgatgttttgctgcttccagagatattagaaactgactcacttgattggaaaatggacaaaagtgccttgacgtggagggtgggcaccagatggggaccagccttgccaactgctgctgtggcctccagcttggctggttttgcaggccgccagcaggaaggcgaaggtggtagtacagcaagaggcactggcggggcagcaggcctgcaggagctgtttttccattgctaggcctgacccctctctacctgtgagcgttcagggggtccctgagatagtttagatgcccccccatcttagacctcagctcccacagtgccttttaagggggacctcacctcctgtgcacagcccacccactttcctctgcttccctggcacagcccaggcatagacgagctggcgttggacccagttcttcccccttttcagccccacagctgctgccacaggggccaactagggccaggtggaaggggagctgagaagccaacccctagcccaggggtgctgtgggaactgggatccaatttgtagcttcctgcctggcttcagagagcccagcaaccttctaggcctgctttccagacttctgagatagcctgggatgagcaatcctgttatagtacatctggaccttccctacctgggctctggggaggctgtgggcctggagagggaaaaggagggagggggtgtctgcaccacctgggaagatagcacaaggcctaatgaggtcaccctgactccccaccccagcatttcattcataccagataatagctgcattactgccaactgaccttataaccctctgcaccttcaaaaagattcatggtttttaattgctgcttttaataacatttgttaaagttat

SEQ ID NO: 22058 - DNA, 5565 bp, Homo sapiens
  source 1..5565: mol_type = unassigned DNA
ggccgctcggcggccgggggtcccttcggtggggccgcggctccccgcccgccgcccccgcgcgtccattcccttttgtgtcccgcgcgcggcccgtcccccgcgcacactagcgccctgagccccgcgggccggcgggcggctcccggcgcggcccctccagccagcgcgcccggcattgtgtggacgcgcctggccgggagcgcgcgcgggggctgtcgtgcgcccccgtccccgtcccctcccggccgcggcgccgcctgcgccccgccgcccccgccgcccccgcgcggcccggcccccggcccggcccggaccgacccgggcagcgcagcggcggggccgagcggcggcgcggcgcggcaacatggcgacggtgcccgtgtactgcgtctgccggctcccctacgacgttacccgcttcatgatcgagtgcgacgcctgcaaggactggttccacggcagctgtgttggggtggaagaggaggaggcgcccgacatcgacatataccactgcccaaactgtgagaaaacccatgggaagtccaccttaaagaagaagcggacctggcacaaacacggcccggggcaagcgcctgacgtcaagcccgtgcagaatggcagccagctcttcatcaaggagctgcggagccggacctttcccagtgctgaagacgtggtggcccgtgtgccaggaagtcagctcacgctgggctacatggaggagcacggcttcaccgagcccatcctcgtccctaagaaagacgggctgggtctggctgtcccggcccccacgttctatgtcagtgacgtcgagaactacgtggggccggaacggagtgtggatgtgacagatgtcaccaagcagaaggactgcaagatgaagctgaaggagtttgtggactattactacagcaccaaccgcaagcgggtcctcaacgtcaccaacctcgagttctctgacacccgaatgtccagcttcgtggagccacctgacattgtaaagaaactgtcatgggtagaaaactactggccagatgatgcattgctggccaagcccaaagtgaccaagtactgcctaatctgcgtgaaggacagttacaccgacttccacatcgactctgggggcgcctctgcctggtaccacgtgctcaagggggagaagaccttctatctcatcaggccggcctcggccaacatctccctgtatgagcgctggcggtctgcctctaaccacagcgagatgttctttgctgaccaggtcgacaaatgctacaagtgcatcgtcaagcagggccagaccctcttcatcccctcaggctggatctacgccacactcacccctgtggactgcctggccttcgcgggacatttcctccacagcctgagtgtggagatgcagatgagagcatatgaagtggaaaggaggttgaaactgggcagcctgactcagtttcccaactttgaaactgcgtgctggtacatggggaagcacctgctggaggcattcaaaggctctcacaaatctgggaagcagctgccccctcatctagtccaaggagctaaaattctcaatggtgctttccgatcgtggacgaagaagcaggctttggcagagcatgaggacgagctcccggagcacttcaaaccttcacagctaatcaaagacctggccaaagagatccggctcagtgagaatgcctccaaagccgtccgaccggaagtgaatactgtcgcctcgtcagatgaggtgtgtgacggggaccgggagaaggaggagcccccgtctcccattgaggccaccccgcctcaatccctcctggagaaagtgtccaaaaaaaagactcccaaaactgtgaagatgcccaagccatccaaaatccccaagcccccgaagccccctaagcccccaaggccccccaaaacgctgaagctcaaagatggaggcaagaagaaagggaagaagtcccgggagtcagcctcacccaccatccccaacctggacctgctcgaagcccacaccaaggaggcactgaccaagatggagccgcccaagaagggcaaggccacaaagagtgtcctgagtgtgcccaacaaagatgtggttcacatgcagaatgatgtggagaggctggaaattcgagagcaaaccaagagcaagtcagaggccaagtggaagtacaagaacagcaaacctgactccttactgaagatggaagaggagcagaagctagagaagtcgcctctagctggaaacaaagacaataagttctctttttctttctccaacaagaaactcctcggctccaaggctctcaggcccccgacgagccctggtgtgttcggggccttgcagaacttcaaggaggacaagcccaagcccgtgcgggatgagtatgagtacgtgtcggatgacggtgagctcaagatcgacgagtttcccatcaggaggaagaaaaacgccccgaaaagggacttgtccttcttgttggataagaaggctgtgctgcccacgcctgtcacgaagccaaagctggactcggcagcgtacaagagtgatgactcctcggacgagggttcgctgcacatcgacacagacaccaagcccggccgcaatgccagagtcaagaaggagagtgggagctcggcagctggcatcttggacctgctgcaggccagtgaggaggttggcgcgctggagtacaaccccagcagccagcccccggcctcccccagcacacaggaagccattcagggaatgctgtccatggccaacctgcaggcctccgactcctgcctgcagaccacgtggggagctggccaggccaaggggagctcgctggctgcccatggtgcccggaagaatgggggtggcagtggcaagagtgcaggcaaacgactgctgaagagggctgccaagaacagtgtcgacctggacgactacgaggaagagcaggaccacctggatgcctgcttcaaggactcagactacgtttacccctcactggagtcagatgaagacaaccccatctttaagtcccggtcgaagaaaaggaaaggctcagacgacgctccctacagcccaacagcaagggtcggcccatcggtgccaagacaggacaggcctgtgcgtgagggtacacgggtggcttccatcgagaccgggctggcggctgctgcagctaagttgtcccagcaggaggagcagaaaagcaagaaaaaaaagagtgccaagaggaagctgactcctaacaccacctccccttccacctccacctccatctctgccggcaccacctccacctccaccacgccagcctctaccaccccggcctccaccaccccggcctccaccagcacggccagcagccaggcctcgcaggagggcagctcgccagagcccccgcctgagtcgcatagcagcagcctggcggaccatgagtacacagccgctggcaccttcaccggggcccaggctggccgcacctcccagcccatggcccctggggtctttctcacacagaggcggccctccgcatcgtctccaaacaacaacaccgctgccaaaggaaaacgtacgaaaaagggcatggcgaccgccaagcagaggcttgggaaaattttgaaaattcatcggaacgggaaactactcctttaagatttggaaagccaggatccttctgctccgctcaggacccccggagccccgcgaaaacatctgcctcccaggagggtgccgagctgcctcaccagggagggccttgcctcttcccggctgccatctccccaacaagcgtctgtcccttcagccggcagagcgagcccagcgtggcccctcaatttgaaaatggacgtcttttctcaagttgctaagagtgatctgtcccagaaaagcggccctgcaagtttgaggaccgcttattccactttaaggacagccttcaggccccctgagcgtgggtgtgattgcagggcctctgcagctctgctgagagcatgagtccttcaaggaagacagagtgagccaatgctcaccagccccagagtcagagctggccacaggctggcagcctccaggggcttaaaaaaaaaggcaaagaacacagaaagaggaggagcaagtgggatgtttatgtccccccttctcttcctgagtgattctcagccaagtccagacagtgctcggcgggtgaggaagggtctgccccgagctttctggttggcaggtggcagcaggatggtgggtgttcagcctgaatgcccaggagcatttctggggggcagctaagactggcagctgggttggtgtgttagcgggcaggggagccattgtggggtccccaggaaagggcaagggctcagccacatcttggggtctgggaggcccaggctaagccatgtggcagggaccgtcttgccctgctggccacactctggagaagcacttctcagccaaggcacccctgccctgggactggcagggcaggggcaggggcagggacagtggccaggcggcccgaggacttacggtcggcacttctctgttctcccgtgtcagcgtgtggtgtcgcctgcatgggtcgtacctggatggtgtgtccaccatcgacacggaggggctggatttgtttctcaggcaatcctgtattttaattttagatgtatttcctgaagcatatttttcatagaatgtagcgtgtaaatagctttttaaataacttcttttttataagagtaaaagtatctttaggaatttctttctatagagttcttcattaacatttatacgagttttttgctgagtcagatggacagttgggttctgatgctttttccttctcctttccttttattattattatttttttcttttaagaactaaggtattgcctgaaaaacaagtgatgtctgtgcagccttacactctgtctttacagaagcaaatagtacacaaaagatctatttcagacacattttgaagatgaatcttcaactttaataccagctctttgttttccttgtatgatgaggggattgggggatacagttattttactagcaccttgtgaagtgtttccgtgttttgtgatgctgtaatttattaatgtttgtagctttttatatttgtacatttcttatgagctttgtttatatacccattacctggatgtttttgtccactgggagaggcagcttggtggaggccttatccactcccacttgtcctgtttggagggacgcagtccctagggcccgagactgggtgggagagggggagtctcacggggccccaggcttattcagaactggtgtttttaaagtttcctttaccctgcccttgttgaacatttatataatctaacctggacatcaagctgttctctctctctcttttttttaattttattattattattttggcaacatgtacatttctaacaaagtttatcgtggctattaaagtgttttatttcccaattcatattactcttgtatcgagtccatgaggtctaaggcaacttagatcaaagttttaaaaaagtaaaaatatttcaggttttgtac

SEQ ID NO: 22059 - DNA, 3042 bp, Homo sapiens
  source 1..3042: mol_type = unassigned DNA
gtgcgcccccgtccccgtcccctcccggccgcggcgccgcctgcgccccgccgcccccgccgcccccgcgcggcccggcccccggcccggcccggaccgacccgggcagcgcagcggcggggccgagcggcggcgcggcgcggcaacatggcgacggtgcccgtgtactgcgtctgccggctcccctacgacgttacccgcttcatgatcgagtgcgacgcctgcaaggactggttccacggcagctgtgttggggtggaagaggaggaggcgcccgacatcgacatataccactgcccaaactgtgagaaaacccatgggaagtccaccttaaagaagaagcggacctggcacaaacacggcccggggcaagcgcctgacgtcaagcccaaaaacagtgtcgacctggacgactacgaggaagagcaggaccacctggatgcctgcttcaaggactcagactacgtttacccctcactggagtcagatgaagacaaccccatctttaagtcccggtcgaagaaaaggaaaggctcagacgacgctccctacagcccaacagcaagggtcggcccatcggtgccaagacaggacaggcctgtgcgtgagggtacacgggtggcttccatcgagaccgggctggcggctgctgcagctaagttgtcccagcaggaggagcagaaaagcaagaaaaaaaagagtgccaagaggaagctgactcctaacaccacctccccttccacctccacctccatctctgccggcaccacctccacctccaccacgccagcctctaccaccccggcctccaccaccccggcctccaccagcacggccagcagccaggcctcgcaggagggcagctcgccagagcccccgcctgagtcgcatagcagcagcctggcggaccatgagtacacagccgctggcaccttcaccggggcccaggctggccgcacctcccagcccatggcccctggggtctttctcacacagaggcggccctccgcatcgtctccaaacaacaacaccgctgccaaaggaaaacgtacgaaaaagggcatggcgaccgccaagcagaggcttgggaaaattttgaaaattcatcggaacgggaaactactcctttaagatttggaaagccaggatccttctgctccgctcaggacccccggagccccgcgaaaacatctgcctcccaggagggtgccgagctgcctcaccagggagggccttgcctcttcccggctgccatctccccaacaagcgtctgtcccttcagccggcagagcgagcccagcgtggcccctcaatttgaaaatggacgtcttttctcaagttgctaagagtgatctgtcccagaaaagcggccctgcaagtttgaggaccgcttattccactttaaggacagccttcaggccccctgagcgtgggtgtgattgcagggcctctgcagctctgctgagagcatgagtccttcaaggaagacagagtgagccaatgctcaccagccccagagtcagagctggccacaggctggcagcctccaggggcttaaaaaaaaaggcaaagaacacagaaagaggaggagcaagtgggatgtttatgtccccccttctcttcctgagtgattctcagccaagtccagacagtgctcggcgggtgaggaagggtctgccccgagctttctggttggcaggtggcagcaggatggtgggtgttcagcctgaatgcccaggagcatttctggggggcagctaagactggcagctgggttggtgtgttagcgggcaggggagccattgtggggtccccaggaaagggcaagggctcagccacatcttggggtctgggaggcccaggctaagccatgtggcagggaccgtcttgccctgctggccacactctggagaagcacttctcagccaaggcacccctgccctgggactggcagggcaggggcaggggcagggacagtggccaggcggcccgaggacttacggtcggcacttctctgttctcccgtgtcagcgtgtggtgtcgcctgcatgggtcgtacctggatggtgtgtccaccatcgacacggaggggctggatttgtttctcaggcaatcctgtattttaattttagatgtatttcctgaagcatatttttcatagaatgtagcgtgtaaatagctttttaaataacttcttttttataagagtaaaagtatctttaggaatttctttctatagagttcttcattaacatttatacgagttttttgctgagtcagatggacagttgggttctgatgctttttccttctcctttccttttattattattatttttttcttttaagaactaaggtattgcctgaaaaacaagtgatgtctgtgcagccttacactctgtctttacagaagcaaatagtacacaaaagatctatttcagacacattttgaagatgaatcttcaactttaataccagctctttgttttccttgtatgatgaggggattgggggatacagttattttactagcaccttgtgaagtgtttccgtgttttgtgatgctgtaatttattaatgtttgtagctttttatatttgtacatttcttatgagctttgtttatatacccattacctggatgtttttgtccactgggagaggcagcttggtggaggccttatccactcccacttgtcctgtttggagggacgcagtccctagggcccgagactgggtgggagagggggagtctcacggggccccaggcttattcagaactggtgtttttaaagtttcctttaccctgcccttgttgaacatttatataatctaacctggacatcaagctgttctctctctctcttttttttaattttattattattattttggcaacatgtacatttctaacaaagtttatcgtggctattaaagtgttttatttcccaattcatattactcttgtatcgagtccatgaggtctaaggcaacttagatcaaagttttaaaaaagtaaaaatatttcaggttttgtacagaa

SEQ ID NO: 22060 - DNA, 7318 bp, Homo sapiens
  source 1..7318: mol_type = unassigned DNA
ggtgaatgggctggtggtgctcgctgctgctgctgagaggaggaggaggatgaagagttgggcttgtttgtctcctacagtttctctcctgctgctctgattcccccctcccgattccggcccggggcctgtgtgtgtccctcctggaggaggaggaggatccagttcctccccccaaccccctcctccccacccccccttgcctggggaagaggaggaaagaaacagcccagagagagagagagagagagagtgagtgagagagagaggagaggagaggaggaggaggaggagggagaagggaacaacctaccatcttaacacactaatatctaaaaagtgcgagaggcccagagcagcagcagaagcagcagcagcagctccagcttcttccctccctccccatgaagaagagttccctcctcctcctcctcctgcttctcctgctcagagttcctgcctccagctgccaggggggacagccagccagcagcaggaggggggctagagagctgaaggagagccagtttccccaaaattgctgcagtgagaagaggagtttgttactttaaacagaggctgaagaaactatagaattagcagagaaagtggagaaggtagaggatggagttgcagactctacaggaggctcttaaagtggaaattcaggttcaccagaaactggttgctcaaatgaagcaggatccacagaatgctgacttaaagaaacagcttcatgaactccaagccaaaatcacagctttgagtgagaaacagaaaagagtagttgaacagctacggaagaacctgatagtaaagcaagaacaaccggacaagttccaaatacagccattgccacaatctgaaaacaaactacaaacagcacagcagcaaccactacagcaactacaacaacagcagcagtaccaccaccaccacgcccagcagtcagctgcagcctctcccaacctgactgcttcacagaagactgtaactacagcttctatgattaccacaaagacactacctctcgtcttgaaagcagcaactgcgaccatgcctgcctctgtggtgggccagagacctaccattgctatggtgaccgccatcaacagtcagaaggctgtgctcagcactgatgtgcagaacacaccagtcaacctccagacgtctagtaaggtcactgggcctggggcagaggctgtccaaattgtggcaaaaaacacagtcactctgcaggttcaggcaacacctcctcagcccatcaaagtaccacagtttatcccccctcctagactcactccacgtccaaactttcttccacaggttcgacccaagcctgtggcccagaataacattcctattgccccagcaccacctcccatgctcgcagctcctcagcttatccagaggcccgtcatgctgaccaagttcacccccacaacccttcccacatcccagaattccatccaccccgtccgtgtcgtcaatgggcagactgcaaccatagccaaaacgttccccatggcccagctcaccagcattgtgatagctactccagggaccagactcgctggacctcaaactgtacagcttagcaagccaagtcttgaaaaacagacagttaaatctcacacagaaacagatgagaaacaaacagagagccgcaccatcaccccacctgctgcacccaaaccaaaacgggaggagaaccctcagaaacttgccttcatggtgtctctagggttggtaacacatgaccatctagaagaaatccaaagcaagaggcaagagcgaaaaagaagaacaacagcaaatccggtctacagtggagcagtctttgagccagagcgtaagaagagtgcagtgacatacctaaacagcacaatgcaccctgggacccggaagagaggtcgtcctccaaaatacaatgcagtgctggggtttggagcccttaccccaacatccccccaatccagtcatcctgactcccctgaaaatgaaaagacagagaccacattcactttccctgcacctgttcagcctgtgtccctgcccagccccacctccacagacggtgatattcatgaggatttttgcagcgtttgcagaaaaagtggccagttactgatgtgcgacacatgttcccgtgtatatcatttggactgcttagacccccctctgaaaacaattcccaagggcatgtggatctgtcccagatgtcaggaccagatgctgaagaaggaagaagcaattccatggcctggaactttagcaattgttcattcctatattgcctacaaagcagcaaaagaagaagagaaacagaagttacttaaatggagttcagatttaaaacaagaacgagaacaactagagcaaaaggtgaaacagctcagcaattccataagtaaatgcatggaaatgaagaacaccatcctggcccggcagaaggagatgcacagctccctggagaaggtaaaacagctgattcgcctcatccacggcatcgacctctccaaacctgtagactctgaggccactgtgggggccatctccaatggcccggactgcaccccccctgccaatgccgccacctccacgccggccccttccccctcctcccagagctgcacagcgaactgtaaccagggggaagagactaaataacagagcccctctaggagaagccacgggatcccggcggcaaggagaacagaacactgaagactctagaaaagcaaagccggatttctggaaagtgcagaattcttttggttctttggttccagagagagagaagatgcttgtgccaggtggcaccagagtttgccaattgatccttcttattctgtgtgtacatgcaaagattggaccatgttacatgaaatagtgccagctggaggttctttgccagcaccatgccaagtgaaataatatatttactctctctattatacaccagtgtgtgcctgcagcagcctccacagccacgatgggtttgtttctgttttcttgggtggggagcagggacgggcggagggaggagagcaggtttcagatccttacttgccgagccgtttgtttaggtagagaagacaagtccaaagagtgtgtgggctttcctgtttctaaactttcgctactataaaaccaaaaaaaggaattgagatttcaccaaccccagtgcccagaagagggaaggggagtggctggagggagcagggggtgggacagtgtatcaaataagcagtatttaatcacctctggcgggggcctcgtgcaaggggagactgacaccaagaacagccagtaggttcttctcccctgcactctgctccctgcgcggtaaccccaccactcctgaagcctgcccagtctccttccttccctgcttggtgagtcgcgcatctccgtggttatcccgctgtctcctctccaagaacaagcagagcccgggccactggcccttgcccaaggcagggaagaaggatgtgtgtgtccaggaaggaaaaaaaggtggatcagtgattttacttgaaaacaagctccatcccttttctatatttataagaagagaagatcttgagtgaagcagcacgcgacccaggtgtgtgtgaattgaatggagacgtttcttttctctttctttaatttttgtttttgttctttttttctttaaggaaagttttattttactgttcattttactttcttggtaacaaaaactaaaataaggaatagaaaagctgtttttcaggctgacagtccaattaagggtagccaagaccttgcatggtagagtaggaatcatagtgtcagtgaggtcccgtgagtctttgtgagtccttgtgtcatcgttcgggcactgtttttttatgcaagggcaaaaatctttgtatctggggaaaaaaaacttttttttaaattaaaaaggaaaataaaagatattgaggtcttcctagtgttacttaaattaagatcaaggtaagaaacattgtaaaaaaaaattacaaaagtgctatttgtttcctaaaaacagtgatttctattaaaaaggtgtcagaactggagaaaatgccgtgtagttataattttttagcacagaccctgctgatcacgatgacattttgccgtgtgtgtgtctctagactggtgggccagtctccttgaaggacagaggcggagctccccacccttctctctcctcagaaaagaccgtgctctcttcttggtgcagggatcttgtctcctgttgtgaagcccaaatggaagcgtggatggtatcagggccctacccgtggtcttctcagattctgctagagcaaaaggctggtgcctaaataagatcccttcctttggtgctgcttttggtctttcagccaccagcattatgagtgcctgggggacacctccgagggaactggccagcggagctctgtggtgcgcacgcaccctggccgtgacaggagggtgcgggagtacaggctggctgcatcagcccttggtgcttagaacagaggaggagtgacatgttttgagggtacgtctctgagacagagccccagcgtggccttcgctctgtcttgcctttggggagaggtctgaagctcccactcctttctctgcctgttggctccaggcaccagaaatttactccactccacccacccacaagcctcctgggtgaccctgggctagaattgctgcgcttgcctcggcttggccggttgtggcctctccttgagaaaaccagggttgtgaaagactcagaccattctctcatcttgccttgtcagaagtaaattgtgtcagatttgtgctctcgctggagacctttgccccttgcgtgcccctggccgatgggagggcggtggaggctctgtaccctggccctgctggagcatctcccccaagcccactccaggccctgggaatggccagagtctaggagaggtagaaacgatcctatcagcttctctcccacccaattaggcccagagagacaaagacagatctgaaagcaaatgcaacagagaagagacacttcttagagtaaaatgtgtctcatctctatcagccatcgcctttcatcttcccaggggcctcagaagaaggaattaagttaggctgaacaggcctcagagttaggccctggctgcttgattggctgagggggaaagagttcccttttctcattcagaaaccaaggtgctgtgtctagtcagggagccttggagatgcctggactagttggaggaatcgttggcagaggatcagagaccagcagcaggctgtctgccctgtctagagctcttcccctcaacttgtctgggcccatctgggggttgccacacaacacctaacttaccttttcctgaaagaagttgggaaaccatcatcactagaggcctttgctcagagaggagctgccttaggagtcttgggtcggaggacggggctaggaattgaccagggctttgcctgccgccctcagcagtgtcgggtacattctgacctcgcctgcagctgggctgtggattcttcctgacattcagatgtgagctgttttgggagtcagctagtatggagtacgagatgcaacccagcccccaaacctacattctgcactcaaattccaaaacactgctttactgtaaagaagaggcccctggcacccaatctccctgtccttcactgtcccctcagacctgggcggggaggggggggggcctgtgaccacctgagacatacgctcgtgacactgccccaccccagccacctccacttgcttcctcctccttccctccgctgctctttccccacggcccagaatttagctgctctgacagccacttttgagaccagctggctttgtagtcacttcagagagctggagcggctgcccactgggccctgactgggagtcccctgccagctcctgatcaggcgctgcgccctggtggcagtgatgactgggagtcccctgccagctcctgtccaggcgctgcatcctggtaacagtgaggccatgttgctgtcatctccacctctgcattcttgctgcctgtgggtcctttttctttcatggagcctgctgggtcttgtctcacctgtgctgagctcctctggggttttgatttcttccttccttatcaggccctttggggtaagcctgctggttgtacctgacatagggaggcagttaggggcagtccctggtggggccgccctggcagcctccagctggcaccatcgtgtgcctggtttccctgcaacacctgcctctctgtccctgctgctgcttggctcaggcccaacaggcagcgtgcatggaggtggttacacacagctgtttccgtgagggtgaccgtgtctgcagcacgcttccgtctccgcatgcacggctgcctctccagccacctctgatacttctctcttggggccatcagagcctcccttgggctgtcacctcccagctcacacacactcttcagtggtttcctctcttcattctcttatagggcgtggtccttcttatttatctaaagggctgaatttaggagactttttacccaggggcaaaaggctcttagggtaatgagatggatggtggcccaggtgcattttccagggcctgggttctccagatcccgtggcttctgttgagtggaggcaactttgctctgtgtgaacctcgcccctgtccctctgccgggcacccctggcaggaagcaggactcccatcctcaccctgacttagactgtcctctgagtcagctcctctccaagacaggagtgggcagccctgggcagtcttctggccccttgctaaagtgaggggcaggaagctggggctgccctccagaaagccggggtaggaactctgaaaaatacctcctctaaacggaagcagggctctccagttccacttggcgccccctcccacaaggcccttcctccctgaggaccccacccccctaccccttccccagcagcctttggaccctcacctctctccggtgtccgtgggtcctcagcccagggtgagctgcagtcaggcgggatgggacgggcaggccagaggtcagccagctcctagcagagaagagccagccagaccccaaccctgtctcttgtccatgccctttgtgatttcagtcttggtagacttgtatttggagttttgtgcttcaaagtttttgtttttgtttgtttggtttttgttttgagggggtggggggggatacagagcagctgatcaatttgtatttatttattttaacattttactaaataaagccaaataaagcctctc

SEQ ID NO: 22061 - DNA, 3675 bp, Homo sapiens
  source 1..3675: mol_type = unassigned DNA
gtgagagagagaggagaggagaggaggaggaggaggagggagaagggaacaacctaccatcttaacacactaatatctaaaaagtgcgagaggcccagagcagcagcagaagcagcagcagcagctccagcttcttccctccctccccatgaagaagagttccctcctcctcctcctcctgcttctcctgctcagagttcctgcctccagctgccaggggggacagccagccagcagcaggaggggggctagagagctgaaggagagccagtttccccaaaattgctgcagtgagaagaggagtttgttactttaaacagaggctgaagaaactatagaattagcagagaaagtggagaaggtagaggatggagttgcagactctacaggaggctcttaaagtggaaattcaggttcaccagaaactggttgctcaaatgaagcaggatccacagaatgctgacttaaagaaacagcttcatgaactccaagccaaaatcacagctttgagtgagaaacagaaaagagtagttgaacagctacggaagaacctgatagtaaagcaagaacaaccggacaagttccaaatacagccattgccacaatctgaaaacaaactacaaacagcacagcagcaaccactacagcaactacaacaacagcagcagtaccaccaccaccacgcccagcagtcagctgcagcctctcccaacctgactgcttcacagaagactgtaactacagcttctatgattaccacaaagacactacctctcgtcttgaaagcagcaactgcgaccatgcctgcctctgtggtgggccagagacctaccattgctatggtgaccgccatcaacagtcagaaggctgtgctcagcactgatgtgcagaacacaccagtcaacctccagacgtctagtaaggtcactgggcctggggcagaggctgtccaaattgtggcaaaaaacacagtcactctgcaggttcaggcaacacctcctcagcccatcaaagtaccacagtttatcccccctcctagactcactccacgtccaaactttcttccacaggttcgacccaagcctgtggcccagaataacattcctattgccccagcaccacctcccatgctcgcagctcctcagcttatccagaggcccgtcatgctgaccaagttcacccccacaacccttcccacatcccagaattccatccaccccgtccgtgtcgtcaatgggcagactgcaaccatagccaaaacgttccccatggcccagctcaccagcattgtgatagctactccagggaccagactcgctggacctcaaactgtacagcttagcaagccaagtcttgaaaaacagacagttaaatctcacacagaaacagatgagaaacaaacagagagccgcaccatcaccccacctgctgcacccaaaccaaaacgggaggagaaccctcagaaacttgccttcatggtgtctctagggttggtaacacatgaccatctagaagaaatccaaagcaagaggcaagagcgaaaaagaagaacaacagcaaatccggtctacagtggagcagtctttgagccagagcgtaagaagagtgcagtgacatacctaaacagcacaatgcaccctgggacccggaagagagccaatgaggaacactggccaaagggtgatattcatgaggatttttgcagcgtttgcagaaaaagtggccagttactgatgtgcgacacatgttcccgtgtatatcatttggactgcttagacccccctctgaaaacaattcccaagggcatgtggatctgtcccagatgtcaggaccagatgctgaagaaggaagaagcaattccatggcctggaactttagcaattgttcattcctatattgcctacaaagcagcaaaagaagaagagaaacagaagttacttaaatggagttcagatttaaaacaagaacgagaacaactagagcaaaaggtgaaacagctcagcaattccataagtaaatgcatggaaatgaagaacaccatcctggcccggcagaaggagatgcacagctccctggagaaggtaaaacagctgattcgcctcatccacggcatcgacctctccaaacctgtagactctgaggccactgtgggggccatctccaatggcccggactgcaccccccctgccaatgccgccacctccacgccggccccttccccctcctcccagagctgcacagcgaactgtaaccagggggaagagactaaataacagagcccctctaggagaagccacgggatcccggcggcaaggagaacagaacactgaagactctagaaaagcaaagccggatttctggaaagtgcagaattcttttggttctttggttccagagagagagaagatgcttgtgccaggtggcaccagagtttgccaattgatccttcttattctgtgtgtacatgcaaagattggaccatgttacatgaaatagtgccagctggaggttctttgccagcaccatgccaagtgaaataatatatttactctctctattatacaccagtgtgtgcctgcagcagcctccacagccacgatgggtttgtttctgttttcttgggtggggagcagggacgggcggagggaggagagcaggtttcagatccttacttgccgagccgtttgtttaggtagagaagacaagtccaaagagtgtgtgggctttcctgtttctaaactttcgctactataaaaccaaaaaaaggaattgagatttcaccaaccccagtgcccagaagagggaaggggagtggctggagggagcagggggtgggacagtgtatcaaataagcagtatttaatcacctctggcgggggcctcgtgcaaggggagactgacaccaagaacagccagtaggttcttctcccctgcactctgctccctgcgcggtaaccccaccactcctgaagcctgcccagtctccttccttccctgcttggtgagtcgcgcatctccgtggttatcccgctgtctcctctccaagaacaagcagagcccgggccactggcccttgcccaaggcagggaagaaggatgtgtgtgtccaggaaggaaaaaaaggtggatcagtgattttacttgaaaacaagctccatcccttttctatatttataagaagagaagatcttgagtgaagcagcacgcgacccaggtgtgtgtgaattgaatggagacgtttcttttctctttctttaatttttgtttttgttctttttttctttaaggaaagttttattttactgttcattttactttcttggtaacaaaaactaaaataaggaatagaaaagctgtttttcaggctgacagtccaattaagggtagccaagaccttgcatggtagagtaggaatcatagtgtcagtgaggtcccgtgagtctttgtgagtccttgtgtcatcgttcgggcactgtttttttatgcaagggcaaaaatctttgtatctggggaaaaaaaacttttttttaaattaaaaaggaaaataaaagatattgaggtcttcctagtgttacttaaattaagatcaaggtaagaaacattgtaaaaaaaaattacaaaagtgctatttgtttcctaaaaacagtgatttctattaaaaaggtgtcagaactgg

SEQ ID NO: 22062 - DNA, 2730 bp, Homo sapiens
  source 1..2730: mol_type = unassigned DNA
cctcctcctcctgcttctcctgctcagagttcctgcctccagctgccaggggggacagccagccagcagcaggaggggggctagagagctgaaggagagccagtttccccaaaattgctgcagtgagaagaggagtttgttactttaaacagaggctgaagaaactatagaattagcagagaaagtggagaaggtagaggatggagttgcagactctacaggaggctcttaaagtggaaattcaggttcaccagaaactggttgctcaaatgaagcaggatccacagaatgctgacttaaagaaacagcttcatgaactccaagccaaaatcacagctttgagtgagaaacagaaaagagtagttgaacagctacggaagaacctgatagtaaagcaagaacaaccggacaagttccaaatacagccattgccacaatctgaaaacaaactacaaacagcacagcagcaaccactacagcaactacaacaacagcagcagtaccaccaccaccacgcccagcagtcagctgcagcctctcccaacctgactgcttcacagaagactgtaactacagcttctatgattaccacaaagacactacctctcgtcttgaaagcagcaactgcgaccatgcctgcctctgtggtgggccagagacctaccattgctatggtgaccgccatcaacagtcagaaggctgtgctcagcactgatgtgcagaacacaccagtcaacctccagacgtctagtaaggtcactgggcctggggcagaggctgtccaaattgtggcaaaaaacacagtcactctggttcaggcaacacctcctcagcccatcaaagtaccacagtttatcccccctcctagactcactccacgtccaaactttcttccacaggttcgacccaagcctgtggcccagaataacattcctattgccccagcaccacctcccatgctcgcagctcctcagcttatccagaggcccgtcatgctgaccaagttcacccccacaacccttcccacatcccagaattccatccaccccgtccgtgtcgtcaatgggcagactgcaaccatagccaaaacgttccccatggcccagctcaccagcattgtgatagctactccagggaccagactcgctggacctcaaactgtacagcttagcaagccaagtcttgaaaaacagacagttaaatctcacacagaaacagatgagaaacaaacagagagccgcaccatcaccccacctgctgcacccaaaccaaaacgggaggagaaccctcagaaacttgccttcatggtgtctctagggttggtaacacatgaccatctagaagaaatccaaagcaagaggcaagagcgaaaaagaagaacaacagcaaatccggtctacagtggagcagtctttgagccagagcgtaagaagagtgcagtgacatacctaaacagcacaatgcaccctgggacccggaagagaggtcgtcctccaaaatacaatgcagtgctggggtttggagcccttaccccaacatccccccaatccagtcatcctgactcccctgaaaatgaaaagacagagaccacattcactttccctgcacctgttcagcctgtgtccctgcccagccccacctccacagacggtgatattcatgaggatttttgcagcgtttgcagaaaaagtggccagttactgatgtgcgacacatgttcccgtgtatatcatttggactgcttagacccccctctgaaaacaattcccaagggcatgtggatctgtcccagatgtcaggaccagatgctgaagaaggaagaagcaattccatggcctggaactttagcaattgttcattcctatattgcctacaaagcagcaaaagaagaagagaaacagaagttacttaaatggagttcagatttaaaacaagaacgagaacaactagagcaaaaggtgaaacagctcagcaattccataagtaaatgcatggaaatgaagaacaccatcctggcccggcagaaggagatgcacagctccctggagaaggtaaaacagctgattcgcctcatccacggcatcgacctctccaaacctgtagactctgaggccactgtgggggccatctccaatggcccggactgcaccccccctgccaatgccgccacctccacgccggccccttccccctcctcccagagctgcacagcgaactgtaaccagggggaagagactaaataacagagcccctctaggagaagccacgggatcccggcggcaaggagaacagaacactgaagactctagaaaagcaaagccggatttctggaaagtgcagaattcttttggttctttggttccagagagagagaagatgcttgtgccaggtggcaccagagtttgccaattgatccttcttattctgtgtgtacatgcaaagattggaccatgttacatgaaatagtgccagctggaggttctttgccagcaccatgccaagtgaaataatatatttactctctctattatacaccagtgtgtgcctgcagcagcctccacagccacgatgggtttgtttctgttttcttgggtggggagcagggacgggcggagggaggagagcaggtttcagatccttacttgccgagccgtttgtttaggtagagaagacaagtccaaagagtgtgtgggctttcctgtttctaaactttcgctactataaaaccaa

SEQ ID NO: 22063 - DNA, 577 bp, Homo sapiens
  source 1..577: mol_type = unassigned DNA
agccccgtcgtgcacgcagttcccaacacttctcgtcatcctctctttggtctctttattctgctgagcggtgctgttaggatttcttttttttttttttcccctgaccacgttcgcgatgcattgttggaaactgttactacatttttactggaaatactattattcattttaattttgtcttctggaaggagctgcctctgaaatactcttcttctgcttacatgaagatctctaaatgctatccagcaggaggtgctacagcaagataaaggaaatttttgaattttgagggtcttgctacttattacagctctgcttagcttcagctaagcaacaggattaacaccttaaagttccagaaagattttgaggggctagagagctgaaggagagccagtttccccaaaattgctgcagtgagaagaggagtttgttactttaaacagaggctgaagaaactatagaattagcagagaaagtggagaaggtagaggatggagttgcagactctacaggaggctcttaaagtggaaattcaggttcaccagaaactggttgctcaaatgaagcagga

SEQ ID NO: 22064 - DNA, 490 bp, Homo sapiens
  source 1..490: mol_type = unassigned DNA
actctttccgtttggtccagccccgtcgtgcacgcagttcccaacacttctcgtcatcctctctttggtctctttattctgctgagcggtgctgttaggatttcttttttttttttttcccctgaccacgttcgcgatgtcttctggaaggagctgcctctgaaatactcttcttctgcttacatgaagatctctaaatgctatccagcaggaggtgctacagcaagataaaggaaatttttgaattttgagggtcttgctacttattacagctctgcttagcttcagctaagcaacaggattaacaccttaaagttccagaaagattttgaggggctagagagctgaaggagagccagtttccccaaaattgctgcagtgagaagaggagtttgttactttaaacagaggctgaagaaactatagaattagcagagaaagtggagaaggtagaggatggagttgcagactctacaggaggctcttaaag

SEQ ID NO: 22065 - DNA, 557 bp, Homo sapiens
  source 1..557: mol_type = unassigned DNA
atctaaaaagtgcgagaggcccagagcagcagcagaagcagcagcagcagctccagcttcttccctccctccccatgaagaagagttccctcctcctcctcctcctgcttctcctgctcagagttcctgcctccagctgccaggggggacagccagccagcagcaggaggctgcagtgagaagaggagtttgttactttaaacagaggctgaagaaactatagaattagcagagaaagtggagaaggtagaggatggagttgcagactctacaggaggctcttaaagtggaaattcaggttcaccagaaactggttgctcaaatgaagcaggatccacagaatgctgacttaaagaaacagcttcatgaactccaagccaaaatcacagctttgagtgagaaacagaaaagagtagttgaacagctacggaagaacctgatagtaaagcaagaacaaccggacaagttccaaatacagccattgccacaatctgaaaacaaactacaaacagcacagcagcaaccactacagcaactacaacaacagcagcagtacc

SEQ ID NO: 22066 - DNA, 546 bp, Homo sapiens
  source 1..546: mol_type = unassigned DNA
gtgcacgcagttcccaacacttctcgtcatcctctctttggtctctttattctgctgagcggtgctgttaggatttcttttttttttttttcccctgaccacgttcgcgatgcattgttggaaactgttactacatttttactggaaatactattattcattttaattttgctttgaagggtccatcctttttcctattcagtcttctggaaggagctgcctctgaaatactcttcttctgcttacatgaagatctctaaatgctatccagcaggaggtgctacagcaagataaaggaaatttttgaattttgagggtcttgctacttattacagctctgcttagcttcagctaagcaacaggattaacaccttaaagttccagaaagattttgaggggctagagagctgaaggagagccagtttccccaaaattgctgcagtgagaagaggagtttgttactttaaacagaggctgaagaaactatagaattagcagagaaagtggagaaggtagaggatggagttgcagactctacaggaggct

SEQ ID NO: 22067 - DNA, 466 bp, Homo sapiens
  source 1..466: mol_type = unassigned DNA
gtttggtccagccccgtcgtgcacgcagttcccaacacttctcgtcatcctctctttggtctctttattctgctgagcggtgctgttaggatttcttttttttttttttcccctgaccacgttcgcgatgcattgttggaaactgttactacatttttactggaaatactattattcattttaattttgggggctagagagctgaaggagagccagtttccccaaaattgctgcagtgagaagaggagtttgttactttaaacagaggctgaagaaactatagaattagcagagaaagtggagaaggtagaggatggagttgcagactctacaggaggctcttaaagtggaaattcaggttcaccagaaactggttgctcaaatgaagcaggatccacagaatgctgacttaaagaaacagcttcatgaactccaagccaaaatcacagctttgagtgagaaacag

SEQ ID NO: 22068 - DNA, 637 bp, Homo sapiens
  source 1..637: mol_type = unassigned DNA
agagggaggtggcggcagcggctagcggactcgagtctcaaccgggctgaggcggacacttctgtggagcgaagcagtgggagcatcgagcactagaggcggcaccgggatccccggctccggggaggggggcgccggaccgggaggaggggagggggcgatgctggaagccatggcggagcccagtcccgaagatccacctccgacccttaagccagagactcagccaccagagaaacggcggagaacaattgaggatttcaacaaattctgcagttttgttttggcatatgctggttacattccccctagcaaagaggaaagtgactggccagcctctggctccagctctccattgcgaggagagagtgcggccgacagtgatggctgggactcggccccctcagatcttcgaaccatccagacttttgttaagaaagcaaagtcatccaagagaagggcagctcaagcaggtcccacccagccaggacccccaaggtccactttctctcgtctgcaggcccccgacagtgctaccttgcttgagaagatgaagctcaaggactctctctttgatctggatgggcccaaagtggcatctcctttgtcccctccctgtgctgccaacaccccctga

SEQ ID NO: 22069 - DNA, 2034 bp, Homo sapiens
  source 1..2034: mol_type = unassigned DNA
aggagggagcaggcggccggcggcgcggggggagggggcccggtccgggagtgcgggaggcagtggtagagggaggtggcggcagcggctagcggactcgagtctcaaccgggctgaggcggacacttctgtggagcgaagcagtgggagcatcgagcactagaggcggcaccgggatccccggctccggggaggggggcgccggaccgggaggaggggagggggcgatgctggaagccatggcggagcccagtcccgaagatccacctccgacccttaagccagagactcagccaccagagaaacggcggagaacaattgaggatttcaacaaattctgcagttttgttttggcatatgctggttacattccccctagcaaagaggaaagtgactggccagcctctggctccagctctccattgcgaggagagagtgcggccgacagtgatggctgggactcggccccctcagatcttcgaaccatccagacttttgttaagaaagcaaagtcatccaagagaagggcagctcaagcaggtcccacccagccaggacccccaaggtccactttctctcgtctgcaggcccccgacagtgctaccttgcttgagaagatgaagctcaaggactctctctttgatctggatgggcccaaagtggcatctcctttgtcccccacatccctgacacatacctcccggccccctgctgctcttacccccgtgcccctttcccagggggacctctcccatcctcctcgaaagaaggaccgaaagaaccgaaagttggggccaggagctggggctggctttggggtgcttcggaggcctcggccaactcctggggatggggaaaagagatctcgaatcaagaagagcaagaagcggaagttaaaaaaggcagaacggggggatagactcccacctcctgggcctccccaggcaccccccagtgatacagactctgaagaggaggaggaagaggaggaagaggaagaagaagaagagatggcaacagtggtagggggtgaagccccagtccctgtgctgccaacaccccctgaggctcctaggccccctgccacagtgcaccctgaaggagtccctcctgctgacagtgaaagcaaggaggtgggcagcactgaaacaagccaagatggagatgccagctccagtgaaggcgagatgcgggtcatggacgaggacatcatggtagaatcaggtgatgactcatgggatctgatcacatgttactgtcgaaagccctttgcagggcggcccatgattgagtgcagcctgtgtgggacgtggatccacctctcctgtgctaagattaagaagaccaacgtccccgacttcttttattgccagaaatgcaaggaactgaggccagaggcccggcggttaggggggcctcccaaatctggagagccctgatggcaccaactttagcctggaacttccaaatgacaacatgatttgggaactgagcctcagggtcctcagcctatcccctggagcttggatactgtctgcacttcaaggcaggaattctcaagggagacttgtttgaaaatgagtgtctcactttcccaccctatccttcctccccactctgtggacttgaaattgaatccattacggttggggatgggaggctgtctgtgtcccgacacataatctctgtctcttggacctgccaccatcactttctgggtcaggattggaattgggatggaatgggacagttgtctataaaactctagtgtaaatattagcactcccctccctcatcttttcttctatttcactccccatttattttcttctacaccggttgtatttttaattttggacttcccctattgggcatggcagctcaaaggtggagtactagagcctggccaagtgaggaaggaaagcagaaaggtgacgattctcactcacctcttttgtttttaataatatcggccgctgtttgtacagacagcctgcgtgttgtaaataaagcagagtgggctcttttgtgttt

SEQ ID NO: 22070 - DNA, 1662 bp, Homo sapiens
  source 1..1662: mol_type = unassigned DNA
agtggccggagagttgctcaggagggaggacgtagaagaggctgagtgaggggcccggtagttcgccgaggtggggtagtttgtggcggtggtaccggagctccgagtagttgccgccggagaatgcccggtgattgtcggagagatccacctccgacccttaagccagagactcagccaccagagaaacggcggagaacaattgaggatttcaacaaattctgcagttttgttttggcatatgctggttacattccccctagcaaagaggaaagtgactggccagcctctggctccagctctccattgcgaggagagagtgcggccgacagtgatggctgggactcggccccctcagatcttcgaaccatccagacttttgttaagaaagcaaagtcatccaagagaagggcagctcaagcaggtcccacccagccaggacccccaaggtccactttctctcgtctgcaggcccccgacagtgctaccttgcttgagaagatgaagctcaaggactctctctttgatctggatgggcccaaagtggcatctcctttgtcccccacatccctgacacatacctcccggccccctgctgctcttacccccgtgcccctttcccagggggacctctcccatcctcctcgaaagaaggaccgaaagaaccgaaagttggggccaggagctggggctggctttggggtgcttcggaggcctcggccaactcctggggatggggaaaagagatctcgaatcaagaagagcaagaagcggaagttaaaaaaggcagaacggggggatagactcccacctcctgggcctccccaggcaccccccagtgatacagactctgaagaggaggaggaagaggaggaagaggaagaagaagaagagatggcaacagtggtagggggtgaagccccagtccctgtgctgccaacaccccctgaggctcctaggccccctgccacagtgcaccctgaaggagtccctcctgctgacagtgaaagcaaggaggtgggcagcactgaaacaagccaagatggagatgccagctccagtgaaggcgagatgcgggtcatggacgaggacatcatggtagaatcaggtgatgactcatgggatctgatcacatgttactgtcgaaagccctttgcagggcggcccatgattgagtgcagcctgtgtgggacgtggatccacctctcctgtgctaagattaagaagaccaacgtccccgacttcttttattgccagaaatgcaaggaactgaggccagaggcccggcggttaggggggcctcccaaatctggagagccctgatggcaccaactttagcctggaacttccaaatgacaacatgatttgggaactgagcctcagggtcctcagcctatcccctggagcttggatactgtctgcacttcaaggcaggaattctcaagggagacttgtttgaaaatgagtgtctcactttcccaccctatccttcctccccactctgtggacttgaaattgaatccattacggttggggatgggaggctgtctgtgtcccgacacataatctctgtctcttggacctgccaccatcactttctgggtcaggattggaattgggatggaatgggacagttgtctataaaactctagtgtaaatatt

SEQ ID NO: 22071 - DNA, 8233 bp, Homo sapiens
  source 1..8233: mol_type = unassigned DNA
ccgcgccgccgccgcacgccgatggctgcggggtctcgcgccgtcgcaccgtccccacgcggcaagcgaccttcgggctcagggcggcggcggctgcaacgaggattaggagggcggcgcggaagccaagaatagtgtcgtcagcagcagccatttggtcccaggaggaaaagaggctgtggcagcgacgccgacgtcctgcgcgtaccccctctccgcggcacccaccgggccccctcctcctcctcttcggcggcggcagcgtccaccatcttcctcttgctgccagtggtagcgctcgtctggcggagctggggctgaaagacacacagaagtcttcatggatatagttgatacatttaatcatttaattcctactgaacacttagatgatgccctatttctaggatccaacctggagaatgaagtctgtgaggattttagtgcaagtcaaaatgtcttagaggactcgctgaagaacatgctcagcgataaggatcctatgctaggatctgcaagtaaccagttctgtttgcctgttttggatagcaatgatcccaatttccagatgccttgttcaacagttgttggtcttgacgatattatggatgaaggagttgttaaagaaagtggcaatgataccattgatgaagaagaactgattttacctaacaggaacttaagggacaaggtagaagaaaattcagtgagatctccaagaaaatcacctcgtttaatggcacaagaacaagtaagaagtttgcgacagagcactattgccaagcgttcaaatgcagcaccattaagtaacacaaaaaaagcatctgggaagactgtatctactgctaaagcaggagtgaaacaaccagaaaggagtcaggttaaagaagaagtatgtatgtcactgaaacctgagtaccataaggagaatagaaggtgcagccgaaatagcggacaaattgaagtggtacctgaagtatcagtgtcttcaagtcattcttcagtgtcatcttgtcttgaaatgaaggatgaagatggattagattctaagcataagtgtaataatccgggagaaatagatgtgccatctcatgaattaaattgttcacttctttcagagacttgtgttactattggagaaaagaaaaatgaagctttgatggaatgtaaagccaagcctgttggtagtccattgtttaagttttcagataaagaagaacatgaacaaaatgattccatttcaggtaaaacgggtgagactgttgttgaagaaatgatagcaacaagaaaagttgaacaagattcaaaggagacagtaaaattatcccatgaagatgaccatattcttgaggacgctggatcttctgatatttctagtgatgctgcttgtacaaatccaaataagacagaaaacagccttgtaggtttgcctagttgtgtagatgaagtgactgaatgtaatttggaattgaaggataccatgggtattgctgataaaactgagaacacccttgaaagaaataaaattgaaccgttgggttattgtgaagatgcggagtctaataggcagttggagagcactgagtttaataaatcaaacttagaggtggttgatactagtacttttggaccggaaagtaatatcttggaaaatgctatttgtgatgtgcctgaccaaaattcaaaacagttgaatgctatagaaagtactaaaatagagtcccatgaaacagcaaaccttcaggatgacagaaacagccagtcaagtagcgtttcttacttagagtcaaaaagtgtaaaatccaaacatacaaaacctgtaattcattctaagcaaaacatgaccacagatgctccgaagaaaattgttgcagcaaagtatgaagtaatacatagcaaaactaaagttaatgtcaaaagtgtgaaacgaaatactgatgtaccagaatctcagcaaaattttcataggccagtcaaagtcagaaaaaaacaaattgataaggagccaaagattcagagttgcaattctggggttaaatctgtgaaaaaccaagctcattctgtactgaaaaaaacattacaggatcaaactttagtacaaattttcaagcccttaactcattctttgagtgataagtcacacgctcatcctggttgcttgaaagaacctcatcatcctgcacaaactggacatgtatcacattctagccagaaacagtgtcataagcctcagcaacaggccccagcaatgaaaaccaatagtcacgtgaaggaagagcttgaacacccaggcgttgagcattttaaggaagaggataaactgaaactgaaaaaacctgagaagaacctacaaccccgccaaagaagaagcagcaaaagtttttctttagatgagccaccattgttcattccagataacatagctaccataagaagagaaggctctgatcatagctcctcatttgaaagcaaatatatgtggactcccagcaagcagtgtgggttttgcaaaaaaccacatggcaacaggtttatggttggctgtgggagatgtgatgactggtttcatggtgattgtgttgggttaagtctttctcaagcacagcagatgggcgaggaagacaaagaatatgtctgtgtaaaatgttgtgctgaagaagacaaaaagactgaaatactagatccagatactttggaaaaccaagctacagttgaattccatagtggagataaaacaatggagtgtgaaaagcttggattatcaaaacacacaacaaatgatagaaccaaatatatagatgatacagtgaagcacaaggtcaaaattttaaaacgggagtctggtgaaggcagaaattcatcagactgtagagataatgaaattaaaaaatggcagctagctcctcttcgtaagatgggacaaccagttttacctcggagatcctcagaagaaaaaagtgaaaaaataccgaaagagtctacaactgttacttgcacaggagaaaaagcttcaaaaccaggtactcatgagaagcaagagatgaaaaagaagaaagttgaaaaaggagtgcttaatgtacatcctgctgcttctgcttccaagccttctgcagatcagatcaggcaaagtgtcagacattctctcaaagacattcttatgaagagacttacagactcaaatttgaaggtaccagaggaaaaggcagcaaaagttgccacaaaaattgagaaagagcttttctctttttttcgggacacagatgctaaatataagaacaaatatagaagtttgatgtttaatttgaaagatcctaaaaacaatatattatttaaaaaagtactgaaaggagaagtaactcctgatcatcttatcagaatgagtccagaagaactagcttctaaagagttagctgcttggagacgaagagaaaacagacataccatagaaatgattgagaaagagcagagagaagtggaacgacggccaatcaccaaaataactcataaaggtgaaatagaaattgagagtgatgccccaatgaaagaacaggaagcagccatggagattcaggaaccagccgccaataagtcattggagaagccagaaggatctgaaaaacaaaaagaggaggttgactctatgtctaaagataccactagtcaacacagacagcatctttttgatctcaactgcaaaatctgcataggtcgaatggcaccacctgtagatgatctttctccaaaaaaagtaaaagttgttgtaggagtagctcgcaaacattcagacaatgaagcagaaagtatagcagatgcattatcttcaacctcaaatattttggcttctgaattctttgaggaggagaaacaggagtctccaaagtcaacgttctctcctgctccacgtccagagatgcctggaactgttgaagttgagtctacctttctggctcgattgaacttcatctggaaaggttttatcaacatgccttctgtggcaaaatttgttaccaaagcctatccagtatctggctccccagaatacctgacagaggacctaccagatagtattcaagtaggtggcaggatatcacctcagacagtttgggattatgtggaaaaaataaaagcatcaggaaccaaggaaatttgtgtggttcgcttcacaccagtaactgaagaagatcaaatttcttatactttgctctttgcatacttcagtagcagaaagcgctatggagtagctgctaacaacatgaagcaggttaaagatatgtaccttattcctttgggtgccacagataaaattccacaccctcttgtgccttttgatggacctgggcttgaactgcatagacctaatctattgttgggcttaattattcgtcagaaactgaagcgacagcacagtgcctgtgctagtactagtcatatagctgagactcctgaaagtgcaccaccaatagcattgccacctgataaaaaaagtaaaatagaagtttctacagaagaagcaccagaggaagaaaatgacttttttaattcttttacaactgtattacacaagcagagaaataaacctcagcagaatcttcaggaagaccttccaacagcagttgaacctttaatggaagtcaccaaacaggagccaccaaaacctttaagatttcttcctggcgtgttgattggctgggagaatcaacctactactctggaattagcaaataaacctcttcctgtggatgatatacttcaaagccttttgggcaccactggtcaagtatatgaccaggcccagtcagtgatggaacaaaacactgttaaagaaattccatttttaaatgagcagaccaactcaaaaatagagaaaacagataatgtggaagtaactgatggtgaaaacaaggagataaaagttaaagtagataatatttcagaatctacagataagtcagcagaaatagaaacatcagtagtagggtcctcttccatttctgcagggtctttgacgagtcttagtctcagaggtaagccaccagatgtttctacagaagcatttttaacaaatttatcaattcagtcaaaacaagaggaaactgtggagagtaaagagaaaacattaaaaagacagcttcaggaagatcaagagaataatttgcaagataaccagacttcaaatagttctccatgcagatctaatgtaggaaaaggaaacatagatggtaatgtgagctgtagtgaaaaccttgttgctaatacagcgaggtctccacagtttatcaacctgaaaagggatcctaggcaagcagcaggacgaagtcagcctgtaactacttcagaaagcaaagatggagatagttgccggaatggagaaaaacacatgctgcctggcctgtcacacaacaaggagcacttaacagaacaaatcaatgtagaggaaaagttgtgttctgcagagaaaaactcgtgtgttcagcagagtgacaatttaaaagttgcacaaaactcaccatcagtagaaaacatacagacttctcaagcagaacaagcaaaacccttacaggaggatattttaatgcaaaatattgaaactgtgcacccatttcgaagaggatcagcagtagcgacatctcattttgaagttggaaacacatgtccatcagaatttccttctaaaagcatcacctttacttccagaagcaccagccccagaacaagtacaaacttttcacccatgaggccacagcagcccaaccttcagcatctcaagtctagcccacctggatttccatttccagggcctcctaattttcccccacaaagcatgtttggatttccaccacatttgccacctccattacttccccctccaggctttggctttgctcaaaatcccatggttccctggccacctgttgttcatctcccaggtcagccacagcgtatgatgggtcctctctcacaagcatcaaggtatataggcccgcagaatttttaccaggttaaagacattcggaggccagaaaggcgccatagtgacccttggggtaggcaagaccaacagcaactggataggccatttaataggggtaaaggggaccgccagagattttatagtgattcacaccatttgaaaagagagcgacatgaaaaggaatgggagcaagaatctgaaaggcatagacgcagagacagaagccaagacaaggacagagacagaaaaagcagggaggaagggcacaaagataaagagagggcacggttatcacatggtgatcgaggaacagatggaaaagcaagcagagatagtaggaatgtagacaagaagccagataaacctaaaagtgaagactatgagaaggacaaagaacgagagaaaagtaaacacagagaaggagaaaaggacagggataggtaccacaaagatagggaccacactgacagaactaaaagcaaaaggtaaaatttgcaggctgcttcaggattacatttaaataactgttaaaatgttgtatcttgtaaacaaaagaaagattgcctgctaggattgtgccatctttaaaatttttactattggtcatttgcagaacagtaaattctgtgtgttggtacagagtgctctgtaccagtgctcatcatcccttcttcataccaacggtccctagttataggaatttaatatttttaaaagttttacattgctgtatattcaaagatttgttttattaatatgcaataaaggcttagaaattttagttttattccttaattggtaaatatggttaactatggaatatatttacttcctctagtgaatgtcctttatataatgactaatttgggagtaatgtgtgctctgtaagtttgttttaaattgcactgtttttaaagaaactgtagaggagcaacaaaaatccaagcaacttcataatcagattatgctaatcatttagttgagcagtttttgaccaagaatcagaagcccaaggggtacatttattgctttaatctgcactcattgaagtcatttattaccatatactacagctttgtggtaggccattattttcattttcatttttggctcttcagaaacttgaatacttaagcttgtacatgatcttgtgttttgctatcctttttactgtaaaatgtaaatattttaagggatattttgattctaaatatgataaaataatttctcacctattttgtgtgtgtgacttgaaattcagtagtaaaagaatttcttctttaaagctttaattaccttcagacattgattttttgttactcagccaagaacatatagaaatagctatctatgtcaggcattagatgaggggaaaaacaatttttttaaaatcttaaattgtaggctgagatgaattgtgtagttctaaagaggctagaatttagaactacctgtgaaacactgtgcagctatagcccactttataggtaagtttctgaaaacttttacaccatcgcaatttggtactctgactcactaatcattaaaattaaagaccgcagaacttgaagagaaatatgttttgaatccttttataaaatgtgcgatttagcctaattcgtaaagtaactgtacagtttcatatgccagttttacttgaaaaaaaaatatgaaaactattgttaattcaaatctaaatttatttaaaccctaaaacacatggttttgatggctgtaatttaaagtaagagctatcaaatgatgctgacaaaagaaaaaccttccaaaatacaaaagaaagagaactctattatttacttacctgtattaatgaagaaaaatataaataattccacaaaattgattgttttcctaaagagcttaaagattagagttaaaaattggttttgaaacagaattatccttgttatttttgctggagagaagggaggaaattcagaaccaaacattctatttaatttgcaatgacttgcagtacttttttccctatccttatcctgtgaaacttactatcataaggttctaaaacagagaacttgtgtttaaataaagcccgtttaactttggtccacttttcttttggaaattaacttgttagaaaacaaagttagttcccaaacaaaacaaaatctaagttataatttgcaccattacaaagaaattgctgtcagggttttacacattttaaaaacatttcaatttcaaatgtgtatatcgtcaataaatctacctttactgata

SEQ ID NO: 22072 - DNA, 6947 bp, Homo sapiens
  source 1..6947: mol_type = unassigned DNA
gggctgaaagacacacagaagtcttcatggatatagttgatacatttaatcatttaattcctactgaacacttagatgatgccctatttctaggatccaacctggagaatgaagtctgtgaggattttagtgcaagtcaaaatgtcttagaggactcgctgaagaacatgctcagcgataaggatcctatgctaggatctgcaagtaaccagttctgtttgcctgttttggatagcaatgatcccaatttccagatgccttgttcaacagttgttggtcttgacgatattatggatgaaggagttgttaaagaaagtggcaatgataccattgatgaagaagaactgattttacctaacaggaacttaagggacaaggtagaagaaaattcagtgagatctccaagaaaatcacctcgtttaatggcacaagaacaagtaagaagtttgcgacagagcactattgccaagcgttcaaatgcagcaccattaagtaacacaaaaaaagcatctgggaagactgtatctactgctaaagcaggagtgaaacaaccagaaaggagtcaggttaaagaagaagtatgtatgtcactgaaacctgagtaccataaggagaatagaaggtgcagccgaaatagcggacaaattgaagtggtacctgaagtatcagtgtcttcaagtcattcttcagtgtcatcttgtcttgaaatgaaggatgaagatggattagattctaagcataagtgtaataatccgggagaaatagatgtgccatctcatgaattaaattgttcacttctttcagagacttgtgttactattggagaaaagaaaaatgaagctttgatggaatgtaaagccaagcctgttggtagtccattgtttaagttttcagataaagaagaacatgaacaaaatgattccatttcaggtaaaacgggtgagactgttgttgaagaaatgatagcaacaagaaaagttgaacaagattcaaaggagacagtaaaattatcccatgaagatgaccatattcttgaggacgctggatcttctgatatttctagtgatgctgcttgtacaaatccaaataagacagaaaacagccttgtaggtttgcctagttgtgtagatgaagtgactgaatgtaatttggaattgaaggataccatgggtattgctgataaaactgagaacacccttgaaagaaataaaattgaaccgttgggttattgtgaagatgcggagtctaataggcagttggagagcactgagtttaataaatcaaacttagaggtggttgatactagtacttttggaccggaaagtaatatcttggaaaatgctatttgtgatgtgcctgaccaaaattcaaaacagttgaatgctatagaaagtactaaaatagagtcccatgaaacagcaaaccttcaggatgacagaaacagccagtcaagtagcgtttcttacttagagtcaaaaagtgtaaaatccaaacatacaaaacctgtaattcattctaagcaaaacatgaccacagatgctccgaagaaaattgttgcagcaaagtatgaagtaatacatagcaaaactaaagttaatgtcaaaagtgtgaaacgaaatactgatgtaccagaatctcagcaaaattttcataggccagtcaaagtcagaaaaaaacaaattgataaggagccaaagattcagagttgcaattctggggttaaatctgtgaaaaaccaagctcattctgtactgaaaaaaacattacaggatcaaactttagtacaaattttcaagcccttaactcattctttgagtgataagtcacacgctcatcctggttgcttgaaagaacctcatcatcctgcacaaactggacatgtatcacattctagccagaaacagtgtcataagcctcagcaacaggccccagcaatgaaaaccaatagtcacgtgaaggaagagcttgaacacccaggcgttgagcattttaaggaagaggataaactgaaactgaaaaaacctgagaagaacctacaaccccgccaaagaagaagcagcaaaagtttttctttagatgagccaccattgttcattccagataacatagctaccataagaagagaaggctctgatcatagctcctcatttgaaagcaaatatatgtggactcccagcaagcagtgtgggttttgcaaaaaaccacatggcaacaggtttatggttggctgtgggagatgtgatgactggtttcatggtgattgtgttgggttaagtctttctcaagcacagcagatgggcgaggaagacaaagaatatgtctgtgtaaaatgttgtgctgaagaagacaaaaagactgaaatactagatccagatactttggaaaaccaagctacagttgaattccatagtggagataaaacaatggagtgtgaaaagcttggattatcaaaacacacaacaaatgatagaaccaaatatatagatgatacagtgaagcacaaggtcaaaattttaaaacgggagtctggtgaaggcagaaattcatcagactgtagagataatgaaattaaaaaatggcagctagctcctcttcgtaagatgggacaaccagttttacctcggagatcctcagaagaaaaaagtgaaaaaataccgaaagagtctacaactgttacttgcacaggagaaaaagcttcaaaaccaggtactcatgagaagcaagagatgaaaaagaagaaagttgaaaaaggagtgcttaatgtacatcctgctgcttctgcttccaagccttctgcagatcagatcaggcaaagtgtcagacattctctcaaagacattcttatgaagagacttacagactcaaatttgaaggtaccagaggaaaaggcagcaaaagttgccacaaaaattgagaaagagcttttctctttttttcgggacacagatgctaaatataagaacaaatatagaagtttgatgtttaatttgaaagatcctaaaaacaatatattatttaaaaaagtactgaaaggagaagtaactcctgatcatcttatcagaatgagtccagaagaactagcttctaaagagttagctgcttggagacgaagagaaaacagacataccatagaaatgattgagaaagagcagagagaagtggaacgacggccaatcaccaaaataactcataaaggtgaaatagaaattgagagtgatgccccaatgaaagaacaggaagcagccatggagattcaggaaccagccgccaataagtcattggagaagccagaaggatctgaaaaacaaaaagaggaggttgactctatgtctaaagataccactagtcaacacagacagcatctttttgatctcaactgcaaaatctgcataggtcgaatggcaccacctgtagatgatctttctccaaaaaaagtaaaagttgttgtaggagtagctcgcaaacattcagacaatgaagcagaaagtatagcagatgcattatcttcaacctcaaatattttggcttctgaattctttgaggaggagaaacaggagtctccaaagtcaacgttctctcctgctccacgtccagagatgcctggaactgttgaagttgagtctacctttctggctcgattgaacttcatctggaaaggttttatcaacatgccttctgtggcaaaatttgttaccaaagcctatccagtatctggctccccagaatacctgacagaggacctaccagatagtattcaagtaggtggcaggatatcacctcagacagtttgggattatgtggaaaaaataaaagcatcaggaaccaaggaaatttgtgtggttcgcttcacaccagtaactgaagaagatcaaatttcttatactttgctctttgcatacttcagtagcagaaagcgctatggagtagctgctaacaacatgaagcaggttaaagatatgtaccttattcctttgggtgccacagataaaattccacaccctcttgtgccttttgatggacctgggcttgaactgcatagacctaatctattgttgggcttaattattcgtcagaaactgaagcgacagcacagtgcctgtgctagtactagtcatatagctgagactcctgaaagtgcaccaccaatagcattgccacctgataaaaaaagtaaaatagaagtttctacagaagaagcaccagaggaagaaaatgacttttttaattcttttacaactgtattacacaagcagagaaataaacctcagcagaatcttcaggaagaccttccaacagcagttgaacctttaatggaagtcaccaaacaggagccaccaaaacctttaagatttcttcctggcgtgttgattggctgggagaatcaacctactactctggaattagcaaataaacctcttcctgtggatgatatacttcaaagccttttgggcaccactggtcaagtatatgaccaggcccagtcagtgatggaacaaaacactgttaaagaaattccatttttaaatgagcagaccaactcaaaaatagagaaaacagataatgtggaagtaactgatggtgaaaacaaggagataaaagttaaagtagataatatttcagaatctacagataagtcagcagaaatagaaacatcagtagtagggtcctcttccatttctgcagggtctttgacgagtcttagtctcagaggtaagccaccagatgtttctacagaagcatttttaacaaatttatcaattcagtcaaaacaagaggaaactgtggagagtaaagagaaaacattaaaaagacagcttcaggaagatcaagagaataatttgcaagataaccagacttcaaatagttctccatgcagatctaatgtaggaaaaggaaacatagatggtaatgtgagctgtagtgaaaaccttgttgctaatacagcgaggtctccacagtttatcaacctgaaaagggatcctaggcaagcagcaggacgaagtcagcctgtaactacttcagaaagcaaagatggagatagttgccggaatggagaaaaacacatgctgcctggcctgtcacacaacaaggagcacttaacagaacaaatcaatgtagaggaaaagttgtgttctgcagagaaaaactcgtgtgttcagcagagtgacaatttaaaagttgcacaaaactcaccatcagtagaaaacatacagacttctcaagcagaacaagcaaaacccttacaggaggatattttaatgcaaaatattgaaactgtgcacccatttcgaagaggatcagcagtagcgacatctcattttgaagttggaaacacatgtccatcagaatttccttctaaaagcatcacctttacttccagaagcaccagccccagaacaagtacaaacttttcacccatgaggccacagcagcccaaccttcagcatctcaagtctagcccacctggatttccatttccagggcctcctaattttcccccacaaagcatgtttggatttccaccacatttgccacctccattacttccccctccaggctttggctttgctcaaaatcccatggttccctggccacctgttgttcatctcccaggtcagccacagcgtatgatgggtcctctctcacaagcatcaaggtatataggcccgcagaatttttaccaggttaaagacattcggaggccagaaaggcgccatagtgacccttggggtaggcaagaccaacagcaactggataggccatttaataggggtaaaggggaccgccagagattttatagtgattcacaccatttgaaaagagagcgacatgaaaaggaatgggagcaagaatctgaaaggcatagacgcagagacagaagccaagacaaggacagagacagaaaaagcagggaggaagggcacaaagataaagagagggcacggttatcacatggtgatcgaggaacagatggaaaagcaagcagagatagtaggaatgtagacaagaagccagataaacctaaaagtgaagactatgagaaggacaaagaacgagagaaaagtaaacacagagaaggagaaaaggacagggataggtaccacaaagatagggaccacactgacagaactaaaagcaaaaggtaaaatttgcaggctgcttcaggattacatttaaataactgttaaaatgttgtatcttgtaaacaaaagaaagattgcctgctaggattgtgccatctttaaaatttttactattggtcatttgcagaacagtaaattctgtgtgttggtacagagtgctctgtaccagtgctcatcatcccttcttcataccaacggtccctagttataggaatttaatatttttaaaagttttacattgctgtatattcaaagatttgttttattaatatgcaataaaggcttagaaattttagttttattccttaattggtaaatatggttaactatggaatatatttacttcctctagtgaatgtcctttatataatgactaatttgggagtaatgtgtgctctgtaagtttgttttaaattgcactgtttttaaagaaactgtagaggagcaacaaaaatccaagcaacttcataatcagattatgctaatcatttagttgagcagtttttgaccaagaatcagaagcccaaggggtacatttattgctttaatctgcactcattgaagtcatttattaccatatactacagctttgtggtaggccattattttcattttcatttttggctcttcagaaacttgaatacttaagcttgtacatgatcttgtgttttgctatcctttttactgtaaaatgtaaatattttaagggatattttgattctaaatatgataaaataatttctcacctattttgtgtgtgtgacttgaaattcagtagtaaaagaatttcttctttaaagcttt

SEQ ID NO: 22073 - DNA, 4759 bp, Homo sapiens
  source 1..4759: mol_type = unassigned DNA
aagggcgctccgcgagcccgtctctcctcgaatgaaaggaaacaacctccggcgacagagccccgctctcaggcactgctggagaaccgagaccgacttctttctctttaccctcattggcgcttctctcctgcagtccgcctctgggccctgccgcatttcttgagacttaaagtggcattctaaaggcaatttaaaaatcatgtcaagctcagttgaacagaaaaaagggcctacaagacagcgcaaatgtggcttttgtaagtcaaatagagacaaggaatgtggacagttactaatatctgaaaaccagaaggtggcagcgcaccataagtgcatgctcttttcatctgctttggtatcatcacactctgataatgaaagtcttggtggattttctattgaagatgtccaaaaggaaattaaaagaggcacgaagctgatgtgttctttgtgccattgtcctggagcaacaattggttgtgatgtgaaaacatgtcacaggacataccactaccactgtgcattgcatgataaagctcaaatacgagagaaaccttcacaaggaatttacatggtctattgccgaaaacacaagaaaactgcacataactccgaagctgatttagaagaaagttttaatgaacatgaactggagccctcatcacctaaaagtaaaaagaaaagtcgcaaaggaaggccaagaaaaactaattttaaagggctgtcagaagataccaggtccacatcctcccatggaacagatgaaatggaaagtagttcctatagagataggtctccacacagaagcagccctagtgacaccaggcctaaatgtggattttgccatgtaggggaggaagaaaatgaagcacgaggaaaactgcatatatttaatgccaagaaggcagctgcccattataagtgcatgttgttttcttctggcacagtccagctcacaacaacatcaagagcagaatttggagactttgatattaaaactgtacttcaggagattaaacgaggaaaaagaatgaaatgtacactttgcagtcagcctggtgctactattggatgtgaaataaaagcctgtgttaagacttaccattaccactgtggagtacaagacaaagctaaatacattgaaaatatgtcacgaggaatttacaaactatactgtaaaaatcatagtggaaatgatgagagagatgaagaagatgaggaacgagagagtaaaagccgaggaaaagtagaaattgatcagcaacaactaactcagcagcaacttaatggaaactaggtatgaaagttaattatatgggatctgttgtcaggatacaatacacactgatatatacatgttgaagtaatggtatgcagtaagattttttttaatcctattatgtttagttaagagcatgttactaaaatgctgaggattttgtaggcttgcatagtagttgttttttaactagctgattttgtaaccataaaaacaagctatctgctttatcaataagtgtagttgtaatgtcaaatcaataagatattcacactcctcaataacattatattgattgtgttcccctcaagcatcatattttacatttttttatcatcttttaaacaggttcatgggacagagttagaaaactgggaatgaataagacatccataactactattcttttttcactgttttctaaaatcaaaaagggtttgtaactttttactgcccaactcttagatccttcattgaactgcctaaaaatgtcttgtttgttttatgagccctcactagaaggctgagtttgacatgttgatattacgtagctatagtttgcagtttctgggaagcaattgaaacactattaaccctgtgtatagtgtcaacagttaaagcagacgaaacgaagtaagctatatttctggactgaacaaagctctgctgtttagagcatttaagtttgtttagtggatccatactcaaaggaaagcataagcaaattttcctttacaatgcaaacatgccactggtggcagcacatggtaatttgtggatttttttttcatactcaagtaatggaggctagaaatgaagagaaccttctttttctcttgactttgacagcacatgctaaaaatctcttccaagaagtatgctaaagcttttcatttggttcctgttaaagttgttctcactgaccagcatggactcaggcaactggtaatgataagctatgagctccagtgcttttgccaaaattctcttgacagcacacctcctctctttccatgttatacaaaggacttctggcaaaatgattgagtccttcaagtttaaactaacatttggcaacagcaaattaaacgtttttaagatgtaaagaaagggttaccgcttgctaaggacttcagacaccatgtccgaaacctgttcctctcaagtgccctgttgtgtggaacacttcacatattggcgcacagtacgtaaggaggtctcatgtgctgtaggagtaaaaaagtctttgcataaaacagtatttatttttacttttgtgaccactattttagaaactttatttaatattttaatgttttcagtcattgctttggttatctataaaataggcttttgtgccctacttttcttcttgtagggcttggtggtgttttatcgattgtcagaattgtttttgaaagcctaagaacccagctttttagaaaggattttcacactggcatttctaggtagtgatattttcttccacttacctgctgaagcacatttatgcatttctttatggcaaaaccaaataactttagttgtggtctgcctgatactaccatagcacctcagtaccaaggggagggattttgactagttgaattattaagccaccacaataaagcagatttttaaataagaaataataatgttaacttgactgtacattgagatattctgcagctgatagagcagcattttaaaaatgtaacaggtggaaaattacactgtgcttaatgactgatttttttttaaactgcgagtcccttaagatcacgtttgtcaagtgtgtattcacacatttacttaaatcaagggactcaatgcttgcttttattttaaccatcttttactatttttagaaggaaactagctttagtagtgggttgccctgtatgttttctctttttgctcttaatatgccattgggtttttgtgtgtatgtgattttcaaaattcatgacttgaagtgcaaggacagatctagatgtttgtttaccaagctatgtgacttctcccaaaggatctgtactttctttccttacaacagcttgaaaatcattattttaaaatccttaaatcactgtgtctagatcattttttacattgtgtgccatagacttacccatgggacaacagagctccttcatttttggacaactactgtaatcattttttttttaggaaaaatggaaggtgccgggggtaatcatggccagtcaataattatataaaggagttcaaatactatagctgtcagttgatgaatttgttatgtagtaaaatgtatgactttgtatgggtttcttcagccctttttctgccactagcaaccagaatagcactttaccttttggttggctagataagtggctgactacctgtttttctcactgtggtgtgattggctaaacaatctcgcattaaaaattcaaatgtaaattgaattcacatgaaaaatcatgtttggttgtaaacctccaatgttttgattctctaatcatgttttcgtcacatgctgagtaaaagtgccttacaatgtaaaaattgtacagtacttatgttcccaagtagcatcatcatcttctgggtagtaattacattgtggtattaatatttagaaaaatggacctcagcagtgtatttactgtacatctcttaagtccttaactgtagttttaataagcatgacattatttgataagtatataacatttacatcatttcaaaaaatactgccgttactgtcttttatgcatattttagcctgaaattttgaagcgtcttttttctttcttttttctttttttgttttgttttttgttattgatattaaacagtgtaatctttgcaagcgtatattgaagattattctggagcatttattgccttaccagaaatgttagtaggaaatgttctttagagtagaaagatagacttgagtttctatacttttaagaagagctctttgttcctgggggaggggggcagggggtgaattttactttcatctcaagttattaaaaacccacaactgaagtaaattttatttcaagaatcagcagttttagaatttcagatagtacttgctcagaagtacatgctactcaagatattaagagataacaagatctgtagatctgctattgaatcagaatctgtgtacttgaacaaatgtgtgaatctcaaatatctcaaagcaaaagaaaaagtgttctagagtgttgttgcttttttaaaaaaagcgctgaagttagaccaaggtatacagttttgttctaacagacatttaggttaattgtaaagataaggaatgcattatgggtcaaaaatcaaacattcctctcatgttatgtatattttgttcctgttatattggctttattttcaaaattgtagtttgtagtattagtttccttttattggtattcttgcatatactattcattcaataaatgacttatgactttc

SEQ ID NO: 22074 - DNA, 4186 bp, Homo sapiens
  source 1..4186: mol_type = unassigned DNA
tccgcgagcccgtctctcctcgaatgaaaggaaacaacctccggcgacagagccccgctctcaggcactgctggagaaccgagaccgacttctttctctttaccctcattggcgcttctctcctgcagtccgcctctgggccctgccgcatttcttgagacttaaagtggcattctaaaggcaatttaaaaatcatgtcaagctcagttgaacagaaaaaagggcctacaagacagcgcaaatgtggcttttgtaagtcaaatagagacaaggaatgtggacagttactaatatctgaaaaccagaaggtggcagcgcaccataagtgcatgctcttttcatctgctttggtatcatcacactctgataatgaaagtcttggtggattttctattgaagatgtccaaaaggaaattaaaagaggcacgaagctgatgtgttctttgtgccattgtcctggagcaacaattggttgtgatgtgaaaacatgtcacaggacataccactaccactgtgcattgcatgataaagctcaaatacgagagaaaccttcacaaggaatttacatggtctattgccgaaaacacaagaaaactgcacataactccgaagcagctgatttagaagaaagttttaatgaacatgaactggagccctcatcacctaaaagtaaaaagaaaagtcgcaaaggaaggccaagaaaaactaattttaaagggctgtcagaagataccaggtccacatcctcccatggaacagatgaaatggaaagtagttcctatagagataggtctccacacagaagcagccctagtgacaccaggcctaaatgtggattttgccatgtaggggaggaagaaaatgaagcacgaggaaaactgcatatatttaatgccaagaaggcagctgcccattataagtgcatgttgttttcttctggcacagtccagctcacaacaacatcaagagcagaatttggagactttgatattaaaactgtacttcaggagattaaacgaggaaaaagaatgaaatgtacactttgcagtcagcctggtgctactattggatgtgaaataaaagcctgtgttaagacttaccattaccactgtggagtacaagacaaagctaaatacattgaaaatatgtcacgaggaatttacaagtaagaaaacaacagttgtctatttccctaaacatgttagtaaccgtccttaaatagatgacattagtttactcagtctctgttcttaaatggtgtttagttaagtatagaatactgagcacattatgtaaggaatgagtactacaattggcattttcctctgactacatatccctggattagcattcatccatccaatattagttaggcttcctatgtgccagccattgtgcttgaagctgggcatatgccagtgatcaaaactacatacactgggccgggtgcggtggctcacatctgtaatcccagcactttgggaggccgaggcgggtgaatcacctgaggtcagaagttcgagaccagcctgaccaacatggtgaaaccccgtctctactaaaatacaaaaattacccaggtgtggtggcaggcacctgtaatcccagctactcgggaggctgaggcaggagaatcgcttgaacccaggaggcagaggttgcagtgagccaagattgcgccattgcactccagcctgagcaacaagagtgaaattccatctcaaacaaacaaaaaaaaaacactacatatactctcctcatgaagcttacagtctattgggagagacctattatttaagtggccaaatatgcaattacaacatagcagcgtaagtgttctaaagaagttacaaagtgttatgagagcgtataagaaggaagagctaacctagtctgtagtggggagtatttaaaatgttctgaaggaaatagtgctcagctttaagctgagatattaaggacaaaggtgagccttggttgggggaggtattctgggcagagagaagagcatatgcaagagccccgggtgagacagaagcagaggtggaaatggggagatgtgttaggaggctagtgctggtggtccaggtgagaattattggtagcttagaataggatatggtagacagaaggcaaaagattctcttgagaagatggtgaaaaagtaaagtatgaagatttgggattgggggtcaccctcttttttatgggtcttccacttacctgtgctgccttgtgctaggtggtgttaatgtatatctgtaatggttccatttgtttaatcgactggagtataagttggtagggactcttgaagttttgatttgccatccagagttgtaaagcacttccttactctcacatgcctagaatgcaataaaccaatgacttccgggtctagtattctgtgtaaaagacaatgtacacaagcagtcaccaagtcatttgggtgcctacataaggcgctatgctgtataataaaatttgccaaattctgtttaataataaaggcacaaatgttttcaagtgagttctataaagcctttaaggaacaaataatcccaatgttatttaagaggtccagcacatagcaagagatggaaaacttattgattcattctgtaaagcttacataactgtggtaccaaacctaacaaagatacgttaaaagaaaaacaaacaaactgtagaccaatctccccttttttttttttttttactttgagacaggatctgactctgttgtccaggctggagtgcagtagtgtgatcatgactcactgcagccttgaccttctgccctcacgtgatcctcccaactcagcctcccgagtagctgggactataggcgcatgccatcatgcccagctaattttttttgttttgttttttgaggaggaggaagggttttgttttgttgcccagactggtctcaaactcctgggctcaagcgttctccctgcctcagtcttctaaagtgctaggattacaggcatgagccatgcccagccacaatctcacttttataaatatacaaaaattctaaataaaatattagtaaatcaaatccagctctgtattctaagaattgaaagactgttcaggctgggcacagtggctcacacttataatctcaacactttgggaggcttaggtgggaggattgcttgaggccaggagttccagatcagtgtgggcaacaaagcgagactctcatctctatataattttaaaaatagaaagaaaaaagactgttcaaaattaggaaatatattaatataatttattagaattagtagagtaaataatcttatcaccttccttatagatggtgaaaagacatttgataacattcaacatcaatttctgaattttaaagtaacgagtgctcttggtaagctaggaatcttaataggtgtttatgagaaaaacaacagcaaataacttatttattattaaagtgaaggagcaatggttcttaaccaggagtgagcctcagaatcactgtggggtggataaggccctcttttaaaatgttcatgtctaagccctacctgtagagatttaaatttagtaggtctgggttggtgcccaaaccatgcacttttctgactccccaggtgattcttatgttcccctctaattgagaaccattagactatactttaattcagattaggaagaagacaaggatgccaactactagcatgacttttaacattcttctagagggttaagctgatgcaagacaaaaagaaagaggcccagtgcattgactcacgtctataatcccacacttgggaggccaaagcgagaggattgcttgaggccaggaattcgagaccaacctgggcaacatagtgagaccccatctctacacaacatttaaaaattagccaggcaaagtggcacacgcctgtagccccagctatacaggaggcccagactggaggattgcctgagccctggaggtagagaccagcctgggcaacatagtgagaccctgtctcaatttaaaaaataaaagaaggccgggcgcagtggctcacgcctgtaatctcaacactttgggaggccgaggctggcagatcacgaggtcaggagtttgagaccagcttcgagatcgccccactgcactccagcctgggcgacagagcgaaactctgtctcaaaaaaaaaaaaaaaa

SEQ ID NO: 22075 - DNA, 1150 bp, Homo sapiens
  source 1..1150: mol_type = unassigned DNA
cccgctctcaggcactgctggagaaccgagaccgacttctttctctttaccctcattggcgcttctctcctgcagtccgcctctgggccctgccgcatttcttgagacttaaagtggcattctaaaggcaatttaaaaatcatgtcaagctcagttgaacagaaaaaagggcctacaagacagcgcaaatgtggcttttgtaagtcaaatagagacaaggaatgtggacagttactaatatctgaaaaccagaaggtggcagcgcaccataagtgcatgctcttttcatctgctttggtatcatcacactctgataatgaaagtcttggtggattttctattgaagatgtccaaaaggaaattaaaagaggcacgaagctgatgtgttctttgtgccattgtcctggagcaacaattggttgtgatgtgaaaacatgtcacaggacataccactaccactgtgcattgcatgataaagctcaaatacgagagaaaccttcacaaggaatttacatggtctattgccgaaaacacaagaaaactgcacataactccgaagcagctgatttagaagaaagttttaatgaacatgaactggagccctcatcacctaaaagtaaaaagaaaagtcgcaaaggaaggccaagaaaaactaattttaaagggctgtcagaagataccaggtccacatcctcccatggaacagatgaaatggaaagtagttcctatagagataggtctccacacagaagcagccctagtgacaccaggcctaaatgtggattttgccatgtaggggaggaagaaaatgaagcacgaggaaaactgcatatatttaatgccaagaaggcagctgcccattataagtgcatgttgttttcttctggcacagtccagctcacaacaacatcaagagcagaatttggagactttgatattaaaactgtacttcaggagattaaacgaggaaaaagaatggtctgtagtttttatatttgttatgcaacattacacttgatttgctgctttaaatttagagtacatcccaaatttatccagtcatcagaaaatttaaagtagttcgtatgttaaagcaaagtatatatttgacttatttgtaatataataaaggatgctgatgttactgaaa

SEQ ID NO: 22076 - DNA, 4489 bp, Homo sapiens
  source 1..4489: mol_type = unassigned DNA
cggcgcgctcgggacgtatcaacgctctgtgggtcgtgtgcgtgcgaggggggcgacgtaagggcgctccgcgagcccgtctctcctcgaatgaaaggaaacaacctccggcgacagagccccgctctcaggcactgctggagaaccgagaccgacttctttctctttaccctcattggcgcttctctcctgcagtccgcctctgggccctgccgcatttcttgagacttaaagtggcattctaaaggcaatttaaaaatcatgtcaagctcagttgaacagaaaaaagggcctacaagacagcgcaaatgtggcttttgtaagtcaaatagagacaaggaatgtggacagttactaatatctgaaaaccagaaggtggcagcgcaccataagtgcatgctcttttcatctgctttggtatcatcacactctgataatgaaagtcttggtggattttctattgaagatgtccaaaaggaaattaaaagaggcacgaagctgatgtgttctttgtgccattgtcctggagcaacaattggttgtgatgtgaaaacatgtcacaggacataccactaccactgtgcattgcatgataaagctcaaatacgagagaaaccttcacaaggaatttacatggtctattgccgaaaacacaagaaaactgcacataactccgaagctgatttagaagaaagttttaatgaacatgaactggagccctcatcacctaaaagtaaaaagaaaagtcgcaaaggaaggccaagaaaaactaattttaaagggctgtcagaagataccaggtccacatcctcccatggaacagatgaaatggaaagtagttcctatagagataggtctccacacagaagcagccctagtgacaccaggcctaaatgtggattttgccatgtaggggaggaagaaaatgaagcacgaggaaaactgcatatatttaatgccaagaaggcagctgcccattataagtgcatgttgttttcttctggcacagtccagctcacaacaacatcaagagcagaatttggagactttgatattaaaactgtacttcaggagattaaacgaggaaaaagaatgaaatgtacactttgcagtcagcctggtgctactattggatgtgaaataaaagcctgtgttaagacttaccattaccactgtggagtacaagacaaagctaaatacattgaaaatatgtcacgaggaatttacaaactatactgtaaaaatcatagtggaaatgatgagagagatgaagaagatgaggaacgagagagtaaaagccgaggaaaagtagaaattgatcagcaacaactaactcagcagcaacttaatggaaactaggttcatgggacagagttagaaaactgggaatgaataagacatccataactactattcttttttcactgttttctaaaatcaaaaagggtttgtaactttttactgcccaactcttagatccttcattgaactgcctaaaaatgtcttgtttgttttatgagccctcactagaaggctgagtttgacatgttgatattacgtagctatagtttgcagtttctgggaagcaattgaaacactattaaccctgtgtatagtgtcaacagttaaagcagacgaaacgaagtaagctatatttctggactgaacaaagctctgctgtttagagcatttaagtttgtttagtggatccatactcaaaggaaagcataagcaaattttcctttacaatgcaaacatgccactggtggcagcacatggtaatttgtggatttttttttcatactcaagtaatggaggctagaaatgaagagaaccttctttttctcttgactttgacagcacatgctaaaaatctcttccaagaagtatgctaaagcttttcatttggttcctgttaaagttgttctcactgaccagcatggactcaggcaactggtaatgataagctatgagctccagtgcttttgccaaaattctcttgacagcacacctcctctctttccatgttatacaaaggacttctggcaaaatgattgagtccttcaagtttaaactaacatttggcaacagcaaattaaacgtttttaagatgtaaagaaagggttaccgcttgctaaggacttcagacaccatgtccgaaacctgttcctctcaagtgccctgttgtgtggaacacttcacatattggcgcacagtacgtaaggaggtctcatgtgctgtaggagtaaaaaagtctttgcataaaacagtatttatttttacttttgtgaccactattttagaaactttatttaatattttaatgttttcagtcattgctttggttatctataaaataggcttttgtgccctacttttcttcttgtagggcttggtggtgttttatcgattgtcagaattgtttttgaaagcctaagaacccagctttttagaaaggattttcacactggcatttctaggtagtgatattttcttccacttacctgctgaagcacatttatgcatttctttatggcaaaaccaaataactttagttgtggtctgcctgatactaccatagcacctcagtaccaaggggagggattttgactagttgaattattaagccaccacaataaagcagatttttaaataagaaataataatgttaacttgactgtacattgagatattctgcagctgatagagcagcattttaaaaatgtaacaggtggaaaattacactgtgcttaatgactgatttttttttaaactgcgagtcccttaagatcacgtttgtcaagtgtgtattcacacatttacttaaatcaagggactcaatgcttgcttttattttaaccatcttttactatttttagaaggaaactagctttagtagtgggttgccctgtatgttttctctttttgctcttaatatgccattgggtttttgtgtgtatgtgattttcaaaattcatgacttgaagtgcaaggacagatctagatgtttgtttaccaagctatgtgacttctcccaaaggatctgtactttctttccttacaacagcttgaaaatcattattttaaaatccttaaatcactgtgtctagatcattttttacattgtgtgccatagacttacccatgggacaacagagctccttcatttttggacaactactgtaatcattttttttttaggaaaaatggaaggtgccgggggtaatcatggccagtcaataattatataaaggagttcaaatactatagctgtcagttgatgaatttgttatgtagtaaaatgtatgactttgtatgggtttcttcagccctttttctgccactagcaaccagaatagcactttaccttttggttggctagataagtggctgactacctgtttttctcactgtggtgtgattggctaaacaatctcgcattaaaaattcaaatgtaaattgaattcacatgaaaaatcatgtttggttgtaaacctccaatgttttgattctctaatcatgttttcgtcacatgctgagtaaaagtgccttacaatgtaaaaattgtacagtacttatgttcccaagtagcatcatcatcttctgggtagtaattacattgtggtattaatatttagaaaaatggacctcagcagtgtatttactgtacatctcttaagtccttaactgtagttttaataagcatgacattatttgataagtatataacatttacatcatttcaaaaaatactgccgttactgtcttttatgcatattttagcctgaaattttgaagcgtcttttttctttcttttttctttttttgttttgttttttgttattgatattaaacagtgtaatctttgcaagcgtatattgaagattattctggagcatttattgccttaccagaaatgttagtaggaaatgttctttagagtagaaagatagacttgagtttctatacttttaagaagagctctttgttcctgggggaggggggcagggggtgaattttactttcatctcaagttattaaaaacccacaactgaagtaaattttatttcaagaatcagcagttttagaatttcagatagtacttgctcagaagtacatgctactcaagatattaagagataacaagatctgtagatctgctattgaatcagaatctgtgtacttgaacaaatgtgtgaatctcaaatatctcaaagcaaaagaaaaagtgttctagagtgttgttgcttttttaaaaaaagcgctgaagttagaccaaggtatacagttttgttctaacagacatttaggttaattgtaaagataaggaatgcattatgggtcaaaaatcaaacattcctctcatgttatgtatattttgttcctgttatattggctttattttcaaaattgtagtttgtagtattagtttccttttattggtattcttgcatatactattcattcaataaatgacttatgactttca

SEQ ID NO: 22077 - DNA, 4432 bp, Homo sapiens
  source 1..4432: mol_type = unassigned DNA
aagggcgctccgcgagcccgtctctcctcgaatgaaaggaaacaacctccggcgacagagccccgctctcaggcactgctggagaaccgagaccgacttctttctctttaccctcattggcgcttctctcctgcagtccgcctctgggccctgccgcatttcttgagacttaaagtggcattctaaaggcaatttaaaaatcatgtcaagctcagttgaacagaaaaaagggcctacaagacagcgcaaatgtggcttttgtaagtcaaatagagacaaggaatgtggacagttactaatatctgaaaaccagaaggtggcagcgcaccataagtgcatgctcttttcatctgctttggtatcatcacactctgataatgaaagtcttggtggattttctattgaagatgtccaaaaggaaattaaaagaggcacgaagctgatgtgttctttgtgccattgtcctggagcaacaattggttgtgatgtgaaaacatgtcacaggacataccactaccactgtgcattgcatgataaagctcaaatacgagagaaaccttcacaaggaatttacatggtctattgccgaaaacacaagaaaactgcacataactccgaagcagctgatttagaagaaagttttaatgaacatgaactggagccctcatcacctaaaagtaaaaagaaaagtcgcaaaggaaggccaagaaaaactaattttaaagggctgtcagaagataccaggtccacatcctcccatggaacagatgaaatggaaagtagttcctatagagataggtctccacacagaagcagccctagtgacaccaggcctaaatgtggattttgccatgtaggggaggaagaaaatgaagcacgaggaaaactgcatatatttaatgccaagaaggcagctgcccattataagtgcatgttgttttcttctggcacagtccagctcacaacaacatcaagagcagaatttggagactttgatattaaaactgtacttcaggagattaaacgaggaaaaagaatgaaatgtacactttgcagtcagcctggtgctactattggatgtgaaataaaagcctgtgttaagacttaccattaccactgtggagtacaagacaaagctaaatacattgaaaatatgtcacgaggaatttacaaactatactgtaaaaatcatagtggaaatgatgagagagatgaagaagatgaggaacgagagagtaaaagccgaggaaaagtagaaattgatcagcaacaactaactcagcagcaacttaatggaaactaggttcatgggacagagttagaaaactgggaatgaataagacatccataactactattcttttttcactgttttctaaaatcaaaaagggtttgtaactttttactgcccaactcttagatccttcattgaactgcctaaaaatgtcttgtttgttttatgagccctcactagaaggctgagtttgacatgttgatattacgtagctatagtttgcagtttctgggaagcaattgaaacactattaaccctgtgtatagtgtcaacagttaaagcagacgaaacgaagtaagctatatttctggactgaacaaagctctgctgtttagagcatttaagtttgtttagtggatccatactcaaaggaaagcataagcaaattttcctttacaatgcaaacatgccactggtggcagcacatggtaatttgtggatttttttttcatactcaagtaatggaggctagaaatgaagagaaccttctttttctcttgactttgacagcacatgctaaaaatctcttccaagaagtatgctaaagcttttcatttggttcctgttaaagttgttctcactgaccagcatggactcaggcaactggtaatgataagctatgagctccagtgcttttgccaaaattctcttgacagcacacctcctctctttccatgttatacaaaggacttctggcaaaatgattgagtccttcaagtttaaactaacatttggcaacagcaaattaaacgtttttaagatgtaaagaaagggttaccgcttgctaaggacttcagacaccatgtccgaaacctgttcctctcaagtgccctgttgtgtggaacacttcacatattggcgcacagtacgtaaggaggtctcatgtgctgtaggagtaaaaaagtctttgcataaaacagtatttatttttacttttgtgaccactattttagaaactttatttaatattttaatgttttcagtcattgctttggttatctataaaataggcttttgtgccctacttttcttcttgtagggcttggtggtgttttatcgattgtcagaattgtttttgaaagcctaagaacccagctttttagaaaggattttcacactggcatttctaggtagtgatattttcttccacttacctgctgaagcacatttatgcatttctttatggcaaaaccaaataactttagttgtggtctgcctgatactaccatagcacctcagtaccaaggggagggattttgactagttgaattattaagccaccacaataaagcagatttttaaataagaaataataatgttaacttgactgtacattgagatattctgcagctgatagagcagcattttaaaaatgtaacaggtggaaaattacactgtgcttaatgactgatttttttttaaactgcgagtcccttaagatcacgtttgtcaagtgtgtattcacacatttacttaaatcaagggactcaatgcttgcttttattttaaccatcttttactatttttagaaggaaactagctttagtagtgggttgccctgtatgttttctctttttgctcttaatatgccattgggtttttgtgtgtatgtgattttcaaaattcatgacttgaagtgcaaggacagatctagatgtttgtttaccaagctatgtgacttctcccaaaggatctgtactttctttccttacaacagcttgaaaatcattattttaaaatccttaaatcactgtgtctagatcattttttacattgtgtgccatagacttacccatgggacaacagagctccttcatttttggacaactactgtaatcattttttttttaggaaaaatggaaggtgccgggggtaatcatggccagtcaataattatataaaggagttcaaatactatagctgtcagttgatgaatttgttatgtagtaaaatgtatgactttgtatgggtttcttcagccctttttctgccactagcaaccagaatagcactttaccttttggttggctagataagtggctgactacctgtttttctcactgtggtgtgattggctaaacaatctcgcattaaaaattcaaatgtaaattgaattcacatgaaaaatcatgtttggttgtaaacctccaatgttttgattctctaatcatgttttcgtcacatgctgagtaaaagtgccttacaatgtaaaaattgtacagtacttatgttcccaagtagcatcatcatcttctgggtagtaattacattgtggtattaatatttagaaaaatggacctcagcagtgtatttactgtacatctcttaagtccttaactgtagttttaataagcatgacattatttgataagtatataacatttacatcatttcaaaaaatactgccgttactgtcttttatgcatattttagcctgaaattttgaagcgtcttttttctttcttttttctttttttgttttgttttttgttattgatattaaacagtgtaatctttgcaagcgtatattgaagattattctggagcatttattgccttaccagaaatgttagtaggaaatgttctttagagtagaaagatagacttgagtttctatacttttaagaagagctctttgttcctgggggaggggggcagggggtgaattttactttcatctcaagttattaaaaacccacaactgaagtaaattttatttcaagaatcagcagttttagaatttcagatagtacttgctcagaagtacatgctactcaagatattaagagataacaagatctgtagatctgctattgaatcagaatctgtgtacttgaacaaatgtgtgaatctcaaatatctcaaagcaaaagaaaaagtgttctagagtgttgttgcttttttaaaaaaagcgctgaagttagaccaaggtatacagttttgttctaacagacatttaggttaattgtaaagataaggaatgcattatgggtcaaaaatcaaacattcctctcatgttatgtatattttgttcctgttatattggctttattttcaaaattgtagtttgtagtattagtttccttttattggtattcttgcatatactattcattcaataaatgacttatgactttc

SEQ ID NO: 22078 - DNA, 1626 bp, Homo sapiens
  source 1..1626: mol_type = unassigned DNA
aaggaaacaacctccggcgacagagccccgctctcaggcactgctggagaaccgagaccgacttctttctctttaccctcattggcgcttctctcctgcagtccgcctctgggccctgccgcatttcttgagacttaaagtggcattctaaaggcaatttaaaaatcatgtcaagctcagttgaacagaaaaaagggcctacaagacagcgcaaatgtggcttttgtaagtcaaatagagacaaggaatgtggacagttactaatatctgaaaaccagaaggtggcagcgcaccataagtgcatgatgtgttctttgtgccattgtcctggagcaacaattggttgtgatgtgaaaacatgtcacaggacataccactaccactgtgcattgcatgataaagctcaaatacgagagaaaccttcacaaggaatttacatggtctattgccgaaaacacaagaaaactgcacataactccgaagctgatttagaagaaagttttaatgaacatgaactggagccctcatcacctaaaagtaaaaagaaaagtcgcaaaggaaggccaagaaaaactaattttaaagggctgtcagaagataccaggtccacatcctcccatggaacagatgaaatggaaagtagttcctatagagataggtctccacacagaagcagccctagtgacaccaggcctaaatgtggattttgccatgtaggggaggaagaaaatgaagcacgaggaaaactgcatatatttaatgccaagaaggcagctgcccattataagtgcatgttgttttcttctggcacagtccagctcacaacaacatcaagagcagaatttggagactttgatattaaaactgtacttcaggagattaaacgaggaaaaagaatgaaatgtacactttgcagtcagcctggtgctactattggatgtgaaataaaagcctgtgttaagacttaccattaccactgtggagtacaagacaaagctaaatacattgaaaatatgtcacgaggaatttacaaactatactgtaaaaatcatagtggaaatgatgagagagatgaagaagatgaggaacgagagagtaaaagccgaggaaaagtagaaattgatcagcaacaactaactcagcagcaacttaatggaaactaggttcatgggacagagttagaaaactgggaatgaataagacatccataactactattcttttttcactgttttctaaaatcaaaaagggtttgtaactttttactgcccaactcttagatccttcattgaactgcctaaaaatgtcttgtttgttttatgagccctcactagaaggctgagtttgacatgttgatattacgtagctatagtttgcagtttctgggaagcaattgaaacactattaaccctgtgtatagtgtcaacagttaaagcagacgaaacgaagtaagctatatttctggactgaacaaagctctgctgtttagagcatttaagtttgtttagtggatccatactcaaaggaaagcataagcaaattttcctttacaatgcaaacatgccactggtggcagcacatggtaatttgtggatttttttttcatactcaagtaatggaggctag

SEQ ID NO: 22079 - DNA, 6062 bp, Homo sapiens
  source 1..6062: mol_type = unassigned DNA
gcggccgccagactaggcccaagccgcggtctccagtaggcccgaacggccgggccgaggggaatgttgtggaggaggctgctctgaagcaccgttgagcggctggcgccgcgcgacccagcggggggctcgaggggaaggcgagcgaggttcccggcggtacggggactatcccagaattcgacgcgcgtcgccgtaggggccggaactaccggacgagcctccgctgaggcgcttcgcagtcccggagctagcccggctgccggcgtgtcgctggggctgagctccgcgggcgtggagtccttgcagcccaaagcatgaggaggtccctgtaggattctggactgaagacgttcttgtcaggtttggggcgtgaggaggttcctgtcagttggggaagcgttaagattcctctatcgtccagagaggacgcgtgctgccgcctcccgcccctcttgacacgacgaacctggccggccgcagaacgctccagggccgagcgaagatggcctcggtgccggtgtattgcctctgccggctgccttacgatgtgacccgcttcatgatcgagtgtgacatgtgccaggactggtttcatggcagttgtgttggtgttgaagaggagaaggctgctgacattgacctctaccactgccccaactgtgaagtcttgcatgggccctccattatgaaaaaacgccgtggatcttcaaaggggcatgatacacacaaggggaaaccagtgaagaccgggagccctacgttcgtcagagagctccggagtaggacttttgacagctcagatgaagtgattctgaagcccactggaaatcaactgaccgtggaattcctggaagaaaatagcttcagtgtgcccatcctggtcctgaagaaggatgggttgggcatgacgctgccctcgccatcattcactgtgagggatgttgaacactatgttggttctgacaaagagattgatgtgattgatgtgacccgccaggctgactgcaagatgaagcttggtgattttgtgaaatactattacagcgggaagagggagaaagtcctcaatgtcattagtttggaattctctgataccagactttctaaccttgtggagacaccgaagattgttcgaaagctgtcatgggtcgaaaacttgtggccagaggaatgtgtctttgagagacccaatgtacagaagtactgcctcatgagtgtgcgagatagctatacagactttcacattgactttggtggcacctctgtctggtaccatgtactcaagggtgaaaagatcttctacctgatccgcccaacaaatgccaatctgactctctttgagtgctggagcagttcctctaatcagaatgagatgttctttggggaccaggtggacaagtgctacaagtgttccgtgaagcaaggacagacacttttcattcccacagggtggatccatgctgtgctgacgcctgtggactgccttgcctttggagggaacttcttacacagccttaacatcgagatgcagctcaaagcctatgagattgagaagcggctgagcacagcagacctcttcagattccccaactttgagaccatctgttggtatgtgggaaagcacatcctggacatctttcgcggtttgcgagagaacaggagacaccctgcctcctacctggtccatggtggcaaagccttgaacttggcctttagagcctggacaaggaaagaagctctgccagaccatgaggatgagatcccggagacagtgcgaaccgtacagctcattaaagatctggccagggagatccgcctggtggaagacatcttccaacagaacgttgggaagacgagcaatatctttgggctgcagaggatcttcccagccggctccattcccctaaccaggccagcccattccacttcagtgtccatgtccaggctgtcactgccctccaaaaatggttcaaagaagaaaggcctgaagcccaaggaactcttcaagaaggcagagcgaaagggcaaggagagttcagccttggggcctgctggccagttgagctataatctcatggacacatacagtcatcaggcactgaagacaggctctttccagaaagcaaagttcaacatcactggtgcctgcttgaatgactcagatgacgactcaccagacttggaccttgatggaaatgagagcccattggccctattgatgtctaacggcagtacgaaaagggtgaagagtttatccaaatctcggcgaaccaagatagcaaagaaggtagacaaggctaggctgatggcagaacaggtgatggaagacgaatttgacttggattcagatgatgagctgcagattgacgagagattgggaaaggagaaggcgaccctgataataagaccaaaatttccccggaaattgccccgtgcgaagccttgctctgaccccaaccgagttcgtgaaccaggagaagttgagtttgacattgaggaggactatacaacagatgaggacatggtggaaggggttgaaggcaagcttgggaatggtagtggcgctggtggcattcttgatctgctcaaggccagcaggcaggtggggggacctgactatgctgccctcaccgaggccccagcttctcccagcactcaggaggccatccagggcatgctgtgcatggccaacctgcagtcctcatcgtcctcaccggctacctctagcctgcaggcctggtggactgggggacaggatcgaagcagtgggagctccagcagtgggctgggcacagtgtctaacagtcctgcttcccagcgcaccccagggaagcggcccatcaagcggccagcatactggagaaccgagagcgaggaggaggaggagaacgccagtctggatgaacaggacagcttgggagcgtgcttcaaggatgcagagtatatctatccttcactggagtctgatgatgatgaccctgctttgaaatctcgacccaagaaaaagaagaattcagatgatgctccatggagtcctaaagcccgcgtgaccccaactctgccgaagcaggaccgtcctgtgcgtgaggggacccgggtagcctctattgagacaggtttggctgcagcagctgcaaagctggcccagcaggagctacagaaggcccaaaagaagaaatatatcaagaagaagcctttgctgaaggaggtagaacagcctcgccctcaagactccaatctcagtctgacagtaccagcccccactgtggctgccacaccacaacttgtcacctcctcctcacccctgcctcctcctgagcctaaacaagaggccctgtcaggaagtctcgctgaccatgagtacaccgctcgtcccaatgcctttggcatggcccaggcaaaccgcagcaccacacctatggcccccggtgtcttcttgacccagcggcgcccttcagttggctcccagagcaatcaggcaggacaaggaaagcgtcccaaaaagggcctggccacagcaaagcagagactcggccgtatcctgaaaatccacagaaatggcaaactacttctgtgagccctcctgtgtcccacccctcacccctttacccccattgccttctccattgtcaactcttggggcactcctggatcctatctgccctggacaaggtgctgaggtgcattgtcctgctttcttgggacttaccaaaggcacggacccctccaccgactccttctagttcccttccccactttcactagagcatcctgcctgccttctccactgaggagcaggtaaatgggagaggtttccagctgactagaaccctcttttctactcgtccaaaccactcccgtcacctgccttgtctgttctttattcttcatcccccgctagagctggaaggcaggatgaggagaggtatgaaggagcctgagccatgaagtgggaagcccagtgcttgacactttctgcaactctagccctatatccagaagcctgcccacctccacccattctgtttgccccatttccccagtccagtggacatgccccacctccagacttgctcatgggagaaggctgtggtctctgccccctcttgccaaatgcttcatggaaatgaagaggaaggcctagagcctccttcctgccccactgtgggccatttccagaagtggcctagaaatgccaacttcacttacctttcaaaagaaaggtgattcctatcacttgtcaaggtagggagaggtcagatgcccaagcctttgaccacggttttgtagcctgttggaggaagctacttttagctggctacacatgaggccacttgttttagggtgagctccagggatttgcctggattttgaaatcatgtagaacattatccacgtggctgtggctgtggctgtggctgggccctggcaggtggaaaaccatctcccagaaacctgaaagcacctgccaatgacgcagataaccctggccctacagcctgcttgctccgcctataccacagagcacagcctggacattatggagggtgtggcgggacggcccacacctgggtcctccatcgggaacttttcatgcttctttctccacctgaggtcttggtctgaagaagacctcaggactcacatcttcactcctgggcctttgcacttccagacgacaggtcatcgttcaagcagaatgcagacaggccattcacgagcccaagttgaagagaagagacgcccatccgtgaaggagcagaccatccatccgatcctccccttcccctgtccttccttcgtggattgtctccattgtccagacagtgcccccacctcccaccgccttgcctcactggcaatctggactcgatggagaacatccccccacctccatttggcactacccaagtggagtgtacccttgccctttccacctgtaccacccactccaacctcaccccagcttgcccaatgcttctggggaatttaatagctaccatgcaggccacagggaatttgtgaggcttcttttgtcatctttgtatctccagtttgtctttcttttctccatagccctgcctctactttccttccttggaatcaggggttcctttagcccatttgctttctctaccttggggaccccaggggccaagcagttctccatctagtcacaccaaaggcaaaaagcctggctacctcccccctagcacgtgagtccctactcccctcccctctgtttctgcccagctttgcttattttggggatttcaaggcagcagagggtagtgaggggagagcaggagaagcctctgtcctgtataggcaactgcctgactatgcggtgactgctgtaaccaagatcaggtccccagcccttttgtccattaacaccccttcttgatctttcaaaggcagctaattgctagcaaatccccccgattccggccttttccctctatttctttgttagaagttttctgtggagctgaaacccagcctctgtttgactgggtttcatttagcttagttgggttcttagagccccctgtttgttgttttgtgttgtttccaatgaaaagcaagtttaccctcagagttatgcttttccaaagaggctgatgtctttgtttttgttttttttaatgtttcaggttctaagtgaagtgagttggggaggggttgggagtgttagtaatcaaggtttagaacaccatgagatagttacccctgatctccagtccctagctgggggctggacagggggaagggagagaggatttctattcacctttaatatatttttacaaaaaaagcaaacaatttaaaaacaagcccaccgcttctgtacatgtctaaatatatttttagaagtgggtaggattgtgaatttctgatgcagggcctttttataaataggttagggtagcatcattcagacttctctgttgtttttgtccctgtctttttcttatgttgtgttactaatgtaatttatattttttttagatcctccctttcctatagagataaaagtgatttatcttggcaattgc

SEQ ID NO: 22080 - DNA, 4651 bp, Homo sapiens
  source 1..4651: mol_type = unassigned DNA
gcggccgccagactaggcccaagccgcggtctccagtaggcccgaacggccgggccgaggggaatgttgtggaggaggctgctctgaagcaccgttgagcggctggcgccgcgcgacccagcggggggctcgaggggaaggcgagcgaggttcccggcggtacggggactatcccagaattcgacgcgcgtcgccgtaggggccggaactaccggacgagcctccgctgaggcgcttcgcagtcccggagctagcccggctgccggcgtgtcgctggggctgagctccgcgggcgtggagtccttgcagcccaaagcatgaggaggtccctgtaggattctggactgaagacgttcttgtcaggtttggggcgtgaggaggttcctgtcagttggggaagcgttaagattcctctatcgtccagagaggacgcgtgctgccgcctcccgcccctcttgacacgacgaacctggccggccgcagaacgctccagggccgagcgaagatggcctcggtgccggtgtattgcctctgccggctgccttacgatgtgacccgcttcatgatcgagtgtgacatgtgccaggactggtttcatggcagttgtgttggtgttgaagaggagaaggctgctgacattgacctctaccactgccccaactgtgaagtcttgcatgggccctccattatgaaaaaacgccgtggatcttcaaaggggcatgatacacacaaggggaaaccagtgaagaccgggagccctacgttcgtcagagagctccggagtaggacttttgacagctcagatgaagtgattctgaagcccactggaaatcaactgaccgtggaattcctggaagaaaatagcttcagtgtgcccatcctggtcctgaagaaggatgggttgggcatgacgctgccctcgccatcattcactgtgagggatgttgaacactatgttggttctgacaaagagattgatgtgattgatgtgacccgccaggctgactgcaagatgaagcttggtgattttgtgaaatactattacagcgggaagagggagaaagtcctcaatgtcattagtttggaattctctgataccagactttctaaccttgtggagacaccgaagattgttcgaaagctgtcatgggtcgaaaacttgtggccagaggaatgtgtctttgagagacccaatgtacagaagtactgcctcatgagtgtgcgagatagctatacagactttcacattgactttggtggcacctctgtctggtaccatgtactcaagggtgaaaagatcttctacctgatccgcccaacaaatgccaatctgactctctttgagtgctggagcagttcctctaatcagaatgagatgttctttggggaccaggtggacaagtgctacaagtgttccgtgaagcaaggacagacacttttcattcccacagggtggatccatgctgtgctgacgcctgtggactgccttgcctttggagggaacttcttacacagccttaacatcgagatgcagctcaaagcctatgagattgagaagcggctgagcacagcagacctcttcagattccccaactttgagaccatctgttggtatgtgggaaagcacatcctggacatctttcgcggtttgcgagagaacaggagacaccctgcctcctacctggtccatggtggcaaagccttgaacttggcctttagagcctggacaaggaaagaagctctgccagaccatgaggatgagatcccggagacagtgcgaaccgtacagctcattaaagatctggccagggagatccgcctggtggaattcaacatcactggtgcctgcttgaatgactcagatgacgactcaccagacttggaccttgatggaaatgagagcccattggccctattgatgtctaacggcagtacgaaaagggtgaagagtttatccaaatctcggcgaaccaagatagcaaagaaggtagacaaggctaggctgatggcagaacaggtgatggaagacgaatttgacttggattcagatgatgagctgcagattgacgagagattgggaaaggagaaggcgaccctgataataagaccaaaatttccccggaaattgccccgtgcgaagccttgctctgaccccaaccgagttcgtgaaccaggagaagttgagtttgacattgaggaggactatacaacagatgaggacatggtggaaggggttgaaggcaagcttgggaatggtagtggcgctggtggcattcttgatctgctcaaggccagcaggcaggtggggggacctgactatgctgccctcaccgaggccccagcttctcccagcactcaggaggccatccagggcatgctgtgcatggccaacctgcagtcctcatcgtcctcaccggctacctctagcctgcaggcctggtggactgggggacaggatcgaagcagtgggagctccagcagtgggctgggcacagtgtctaacagtcctgcttcccagcgcaccccagggaagcggcccatcaagcggccagcatactggagaaccgagagcgaggaggaggaggagaacgccagtctggatgaacaggacagcttgggagcgtgcttcaaggatgcagagtatatctatccttcactggagtctgatgatgatgaccctgctttgaaatctcgacccaagaaaaagaagaattcagatgatgctccatggagtcctaaagcccgcgtgaccccaactctgccgaagcaggaccgtcctgtgcgtgaggggacccgggtagcctctattgagacaggtttggctgcagcagctgcaaagctggcccagcaggagctacagaaggcccaaaagaagaaatatatcaagaagaagcctttgctgaaggaggtagaacagcctcgccctcaagactccaatctcagtctgacagtaccagcccccactgtggctgccacaccacaacttgtcacctcctcctcacccctgcctcctcctgagcctaaacaagaggccctgtcaggaagtctcgctgaccatgagtacaccgctcgtcccaatgcctttggcatggcccaggcaaaccgcagcaccacacctatggcccccggtgtcttcttgacccagcggcgcccttcagttggctcccagagcaatcaggcaggacaaggaaagcgtcccaaaaagggcctggccacagcaaagcagagactcggccgtatcctgaaaatccacagaaatggcaaactacttctacgacaggtcatcgttcaagcagaatgcagacaggccattcacgagcccaagttgaagagaagagacgcccatccgtgaaggagcagaccatccatccgatcctccccttcccctgtccttccttcgtggattgtctccattgtccagacagtgcccccacctcccaccgccttgcctcactggcaatctggactcgatggagaacatccccccacctccatttggcactacccaagtggagtgtacccttgccctttccacctgtaccacccactccaacctcaccccagcttgcccaatgcttctggggaatttaatagctaccatgcaggccacagggaatttgtgaggcttcttttgtcatctttgtatctccagtttgtctttcttttctccatagccctgcctctactttccttccttggaatcaggggttcctttagcccatttgctttctctaccttggggaccccaggggccaagcagttctccatctagtcacaccaaaggcaaaaagcctggctacctcccccctagcacgtgagtccctactcccctcccctctgtttctgcccagctttgcttattttggggatttcaaggcagcagagggtagtgaggggagagcaggagaagcctctgtcctgtataggcaactgcctgactatgcggtgactgctgtaaccaagatcaggtccccagcccttttgtccattaacaccccttcttgatctttcaaaggcagctaattgctagcaaatccccccgattccggccttttccctctatttctttgttagaagttttctgtggagctgaaacccagcctctgtttgactgggtttcatttagcttagttgggttcttagagccccctgtttgttgttttgtgttgtttccaatgaaaagcaagtttaccctcagagttatgcttttccaaagaggctgatgtctttgtttttgttttttttaatgtttcaggttctaagtgaagtgagttggggaggggttgggagtgttagtaatcaaggtttagaacaccatgagatagttacccctgatctccagtccctagctgggggctggacagggggaagggagagaggatttctattcacctttaatatatttttacaaaaaaagcaaacaatttaaaaacaagcccaccgcttctgtacatgtctaaatatatttttagaagtgggtaggattgtgaatttctgatgcagggcctttttataaataggttagggtagcatcattcagacttctctgttgtttttgtccctgtctttttcttatgttgtgttactaatgtaatttatattttttttagatcctccctttcctatagagataaaagtgatttatcttggc

SEQ ID NO: 22081 - DNA, 6024 bp, Homo sapiens
  source 1..6024: mol_type = unassigned DNA
tttcctctcatcccccctcctctcccctcccctcaggctatagtcagaaaattgtgggacaggtgcaaacaaatccttgaactgtatttgaactgaagtgaaacagtagggtcaaagaagagttcagagggagttgtggagttggcagcagctttacagaggaactacactgagggcctggggacagaacgcgggtagcacagggcacaaggttcaacgtccctgctccgggactcaagtcacttggcttctcgaagcccctgccttcatttggtgataatcacagagcttccttcacagggggaagaaccaacaacgcagagaccgtgggaaagagcccagcctatcgaaggtgctcaatgaacaggagccgcgctatcgtccagagaggacgcgtgctgccgcctcccgcccctcttgacacgacgaacctggccggccgcagaacgctccagggccgagcgaagatggcctcggtgccggtgtattgcctctgccggctgccttacgatgtgacccgcttcatgatcgagtgtgacatgtgccaggactggtttcatggcagttgtgttggtgttgaagaggagaaggctgctgacattgacctctaccactgccccaactgtgaagtcttgcatgggccctccattatgaaaaaacgccgtggatcttcaaaggggcatgatacacacaaggggaaaccagtgaagaccgggagccctacgttcgtcagagagctccggagtaggacttttgacagctcagatgaagtgattctgaagcccactggaaatcaactgaccgtggaattcctggaagaaaatagcttcagtgtgcccatcctggtcctgaagaaggatgggttgggcatgacgctgccctcgccatcattcactgtgagggatgttgaacactatgttggttctgacaaagagattgatgtgattgatgtgacccgccaggctgactgcaagatgaagcttggtgattttgtgaaatactattacagcgggaagagggagaaagtcctcaatgtcattagtttggaattctctgataccagactttctaaccttgtggagacaccgaagattgttcgaaagctgtcatgggtcgaaaacttgtggccagaggaatgtgtctttgagagacccaatgtacagaagtactgcctcatgagtgtgcgagatagctatacagactttcacattgactttggtggcacctctgtctggtaccatgtactcaagggtgaaaagatcttctacctgatccgcccaacaaatgccaatctgactctctttgagtgctggagcagttcctctaatcagaatgagatgttctttggggaccaggtggacaagtgctacaagtgttccgtgaagcaaggacagacacttttcattcccacagggtggatccatgctgtgctgacgcctgtggactgccttgcctttggagggaacttcttacacagccttaacatcgagatgcagctcaaagcctatgagattgagaagcggctgagcacagcagacctcttcagattccccaactttgagaccatctgttggtatgtgggaaagcacatcctggacatctttcgcggtttgcgagagaacaggagacaccctgcctcctacctggtccatggtggcaaagccttgaacttggcctttagagcctggacaaggaaagaagctctgccagaccatgaggatgagatcccggagacagtgcgaaccgtacagctcattaaagatctggccagggagatccgcctggtggaagacatcttccaacagaacgttgggaagacgagcaatatctttgggctgcagaggatcttcccagccggctccattcccctaaccaggccagcccattccacttcagtgtccatgtccaggctgtcactgccctccaaaaatggttcaaagaagaaaggcctgaagcccaaggaactcttcaagaaggcagagcgaaagggcaaggagagttcagccttggggcctgctggccagttgagctataatctcatggacacatacagtcatcaggcactgaagacaggctctttccagaaagcaaagttcaacatcactggtgcctgcttgaatgactcagatgacgactcaccagacttggaccttgatggaaatgagagcccattggccctattgatgtctaacggcagtacgaaaagggtgaagagtttatccaaatctcggcgaaccaagatagcaaagaaggtagacaaggctaggctgatggcagaacaggtgatggaagacgaatttgacttggattcagatgatgagctgcagattgacgagagattgggaaaggagaaggcgaccctgataataagaccaaaatttccccggaaattgccccgtgcgaagccttgctctgaccccaaccgagttcgtgaaccaggagaagttgagtttgacattgaggaggactatacaacagatgaggacatggtggaaggggttgaaggcaagcttgggaatggtagtggcgctggtggcattcttgatctgctcaaggccagcaggcaggtggggggacctgactatgctgccctcaccgaggccccagcttctcccagcactcaggaggccatccagggcatgctgtgcatggccaacctgcagtcctcatcgtcctcaccggctacctctagcctgcaggcctggtggactgggggacaggatcgaagcagtgggagctccagcagtgggctgggcacagtgtctaacagtcctgcttcccagcgcaccccagggaagcggcccatcaagcggccagcatactggagaaccgagagcgaggaggaggaggagaacgccagtctggatgaacaggacagcttgggagcgtgcttcaaggatgcagagtatatctatccttcactggagtctgatgatgatgaccctgctttgaaatctcgacccaagaaaaagaagaattcagatgatgctccatggagtcctaaagcccgcgtgaccccaactctgccgaagcaggaccgtcctgtgcgtgaggggacccgggtagcctctattgagacaggtttggctgcagcagctgcaaagctggcccagcaggagctacagaaggcccaaaagaagaaatatatcaagaagaagcctttgctgaaggaggtagaacagcctcgccctcaagactccaatctcagtctgacagtaccagcccccactgtggctgccacaccacaacttgtcacctcctcctcacccctgcctcctcctgagcctaaacaagaggccctgtcaggaagtctcgctgaccatgagtacaccgctcgtcccaatgcctttggcatggcccaggcaaaccgcagcaccacacctatggcccccggtgtcttcttgacccagcggcgcccttcagttggctcccagagcaatcaggcaggacaaggaaagcgtcccaaaaagggcctggccacagcaaagcagagactcggccgtatcctgaaaatccacagaaatggcaaactacttctgtgagccctcctgtgtcccacccctcacccctttacccccattgccttctccattgtcaactcttggggcactcctggatcctatctgccctggacaaggtgctgaggtgcattgtcctgctttcttgggacttaccaaaggcacggacccctccaccgactccttctagttcccttccccactttcactagagcatcctgcctgccttctccactgaggagcaggtaaatgggagaggtttccagctgactagaaccctcttttctactcgtccaaaccactcccgtcacctgccttgtctgttctttattcttcatcccccgctagagctggaaggcaggatgaggagaggtatgaaggagcctgagccatgaagtgggaagcccagtgcttgacactttctgcaactctagccctatatccagaagcctgcccacctccacccattctgtttgccccatttccccagtccagtggacatgccccacctccagacttgctcatgggagaaggctgtggtctctgccccctcttgccaaatgcttcatggaaatgaagaggaaggcctagagcctccttcctgccccactgtgggccatttccagaagtggcctagaaatgccaacttcacttacctttcaaaagaaaggtgattcctatcacttgtcaaggtagggagaggtcagatgcccaagcctttgaccacggttttgtagcctgttggaggaagctacttttagctggctacacatgaggccacttgttttagggtgagctccagggatttgcctggattttgaaatcatgtagaacattatccacgtggctgtggctgtggctgtggctgggccctggcaggtggaaaaccatctcccagaaacctgaaagcacctgccaatgacgcagataaccctggccctacagcctgcttgctccgcctataccacagagcacagcctggacattatggagggtgtggcgggacggcccacacctgggtcctccatcgggaacttttcatgcttctttctccacctgaggtcttggtctgaagaagacctcaggactcacatcttcactcctgggcctttgcacttccagacgacaggtcatcgttcaagcagaatgcagacaggccattcacgagcccaagttgaagagaagagacgcccatccgtgaaggagcagaccatccatccgatcctccccttcccctgtccttccttcgtggattgtctccattgtccagacagtgcccccacctcccaccgccttgcctcactggcaatctggactcgatggagaacatccccccacctccatttggcactacccaagtggagtgtacccttgccctttccacctgtaccacccactccaacctcaccccagcttgcccaatgcttctggggaatttaatagctaccatgcaggccacagggaatttgtgaggcttcttttgtcatctttgtatctccagtttgtctttcttttctccatagccctgcctctactttccttccttggaatcaggggttcctttagcccatttgctttctctaccttggggaccccaggggccaagcagttctccatctagtcacaccaaaggcaaaaagcctggctacctcccccctagcacgtgagtccctactcccctcccctctgtttctgcccagctttgcttattttggggatttcaaggcagcagagggtagtgaggggagagcaggagaagcctctgtcctgtataggcaactgcctgactatgcggtgactgctgtaaccaagatcaggtccccagcccttttgtccattaacaccccttcttgatctttcaaaggcagctaattgctagcaaatccccccgattccggccttttccctctatttctttgttagaagttttctgtggagctgaaacccagcctctgtttgactgggtttcatttagcttagttgggttcttagagccccctgtttgttgttttgtgttgtttccaatgaaaagcaagtttaccctcagagttatgcttttccaaagaggctgatgtctttgtttttgttttttttaatgtttcaggttctaagtgaagtgagttggggaggggttgggagtgttagtaatcaaggtttagaacaccatgagatagttacccctgatctccagtccctagctgggggctggacagggggaagggagagaggatttctattcacctttaatatatttttacaaaaaaagcaaacaatttaaaaacaagcccaccgcttctgtacatgtctaaatatatttttagaagtgggtaggattgtgaatttctgatgcagggcctttttataaataggttagggtagcatcattcagacttctctgttgtttttgtccctgtctttttcttatgttgtgttactaatgtaatttatattttttttagatcctccctttcctatagagataaaagtgatttatcttggcaattgc

SEQ ID NO: 22082 - DNA, 2726 bp, Homo sapiens
  source 1..2726: mol_type = unassigned DNA
atgagtgtgcgagatagctatacagactttcacattgactttggtggcacctctgtctggtaccatgtactcaagggtgaaaagatcttctacctgatccgcccaacaaatgccaatctgactctctttgagtgctggagcagttcctctaatcagaatgagatgttctttggggaccaggtggacaagtgctacaagtgttccgtgaagcaaggacagacacttttcattcccacagggtggatccatgctgtgctgacgcctgtggactgccttgcctttggagggaacttcttacacagccttaacatcgagatgcagctcaaagcctatgagattgagaagcggctgagcacagcagacctcttcagattccccaactttgagaccatctgttggtatgtgggaaagcacatcctggacatctttcgcggtttgcgagagaacaggagacaccctgcctcctacctggtccatggtggcaaagccttgaacttggcctttagagcctggacaaggaaagaagctctgccagaccatgaggatgagatcccggagacagtgcgaaccgtacagctcattaaagatctggccagggagatccgcctggtggaagacatcttccaacagaacgttgggaagacgagcaatatctttgggctgcagaggatcttcccagccggctccattcccctaaccaggccagcccattccacttcagtgtccatgtccaggctgtcactgccctccaaaaatggttcaaagaagaaaggcctgaagcccaaggaactcttcaagaaggcagagcgaaagggcaaggagagttcagccttggggcctgctggccagttgagctataatctcatggacacatacagtcatcaggcactgaagacaggctctttccagaaagcaaagttcaacatcactggtgcctgcttgaatgactcagatgacgactcaccagacttggaccttgatggaaatgagagcccattggccctattgatgtctaacggcagtacgaaaagggtgaagagtttatccaaatctcggcgaaccaagatagcaaagaaggtagacaaggctaggctgatggcagaacaggtgatggaagacgaatttgacttggattcagatgatgagctgcagattgacgagagattgggaaaggagaaggcgaccctgataataagaccaaaatttccccggaaattgccccgtgcgagccttgctctgaccccaaccgagttcgtgaaccaggagaagttgagtttgacattgaggaggactatacaacagatgaggacatggtggaaggggttgaaggcaagcttgggaatggtagtggcgctggtggcattcttgatctgctcaaggccagcaggcaggtggggggacctgactatgctgccctcaccgaggccccagcttctcccagcactcaggaggccatccagggcatgctgtgcatggccaacctgcagtcctcatcgtcctcaccggctacctctagcctgcaggcctggtggactgggggacaggatcgaagcagtgggagctccagcagtgggctgggcacagtgtctaacagtcctgcttcccagcgcaccccagggaagcggcccatcaagcggccagcatactggagaaccgagagcgaggaggaggaggagaacgccagtctggatgaacaggacagcttgggagcgtgcttcaaggatgcagagtatatctatccttcactggagtctgatgatgatgaccctgctttgaaatctcgacccaagaaaaagaagaattcagatgatgctccatggagtcctaaagcccgcgtgaccccaactctgccgaagcaggaccgtcctgtgcgtgaggggacccgggtagcctctattgagacaggtttggctgcagcagctgcaaagctggcccagcaggtgaagaaaatgaagctctcattaactgactcaggataatacagccagtaaatggaggagacaactcaaactcatatcctctaacttcaaatttcatattactttctatttaaataaatgcttatgtagttcagtcattacatcctatttaaatagtgtttaaatctttggcaatcttctttgaccagaacttctgtctcttatgtatatcccaatacagtgtaagctgtaatttgaaaaagggggttctactgttttatataaatataaattaagtaaagctgtgaaaattactcttagtgccttttaaggagctaaattctgtttgggatgatcagagataacctcaaagaagaggttttgaaattggggaggggctttgcaagctaagcttctggtaggggccagggaggcattctaaaagaagggacttccttcgtatagcacacaaagccctcttaaagtcctcttgatttggtctctagtcatctccctgacctccttccagcccctcatgcacaccttttatacagccatagtgcactgcaatactcatagtcccctcagtgagtatatcagattgtctcatgcttttgtgcctttacacaagatgttccttttacccattgagaatcataccctatcagatcccttacctaacagcccttcatactacctaccaccactttatttcagaggcctttttctatatgcttctacaacattcgtggtacttacaatcataaatgtatgttttggtgtttcttattaaactatgaatacttc

SEQ ID NO: 22083 - DNA, 5753 bp, Homo sapiens
  source 1..5753: mol_type = unassigned DNA
gcggccgccagactaggcccaagccgcggtctccagtaggcccgaacggccgggccgaggggaatgttgtggaggaggctgctctgaagcaccgttgagcggctggcgccgcgcgacccagcggggggctcgaggggaaggcgagcgaggttcccggcggtacggggactatcccagaattcgacgcgcgtcgccgtaggggccggaactaccggacgagcctccgctgaggcgcttcgcagtcccggagctagcccggctgccggcgtgtcgctggggctgagctccgcgggcgtggagtccttgcagcccaaagcatgaggaggtccctgtaggattctggactgaagacgttcttgtcaggtttggggcgtgaggaggttcctgtcagttggggaagcgttaagattcctctatcgtccagagaggacgcgtgctgccgcctcccgcccctcttgacacgacgaacctggccggccgcagaacgctccagggccgagcgaagatggcctcggtgccggtgtattgcctctgccggctgccttacgatgtgacccgcttcatgatcgagtgtgacatgtgccaggactggtttcatggcagttgtgttggtgttgaagaggagaaggctgctgacattgacctctaccactgccccaactgtgaagtcttgcatgggccctccattatgaaaaaacgccgtggatcttcaaaggggcatgatacacacaaggggaaaccagtgaagaccgggagccctacgttcgtcagagagctccggagtaggacttttgacagctcagatgaagtgattctgaagcccactggaaatcaactgaccgtggaattcctggaagaaaatagcttcagtgtgcccatcctggtcctgaagaaggatgggttgggcatgacgctgccctcgccatcattcactgtgagggatgttgaacactatgttggttctgacaaagagattgatgtgattgatgtgacccgccaggctgactgcaagatgaagcttggtgattttgtgaaatactattacagcgggaagagggagaaagtcctcaatgtcattagtttggaattctctgataccagactttctaaccttgtggagacaccgaagattgttcgaaagctgtcatgggtcgaaaacttgtggccagaggaatgtgtctttgagagacccaatgtacagaagtactgcctcatgagtgtgcgagatagctatacagactttcacattgactttggtggcacctctgtctggtaccatgtactcaagggtgaaaagatcttctacctgatccgcccaacaaatgccaatctgactctctttgagtgctggagcagttcctctaatcagaatgagatgttctttggggaccaggtggacaagtgctacaagtgttccgtgaagcaaggacagacacttttcattcccacagggtggatccatgctgtgctgacgcctgtggactgccttgcctttggagggaacttcttacacagccttaacatcgagatgcagctcaaagcctatgagattgagaagcggctgagcacagcagacctcttcagattccccaactttgagaccatctgttggtatgtgggaaagcacatcctggacatctttcgcggtttgcgagagaacaggagacaccctgcctcctacctggtccatggtggcaaagccttgaacttggcctttagagcctggacaaggaaagaagctctgccagaccatgaggatgagatcccggagacagtgcgaaccgtacagctcattaaagatctggccagggagatccgcctggtggaattcaacatcactggtgcctgcttgaatgactcagatgacgactcaccagacttggaccttgatggaaatgagagcccattggccctattgatgtctaacggcagtacgaaaagggtgaagagtttatccaaatctcggcgaaccaagatagcaaagaaggtagacaaggctaggctgatggcagaacaggtgatggaagacgaatttgacttggattcagatgatgagctgcagattgacgagagattgggaaaggagaaggcgaccctgataataagaccaaaatttccccggaaattgccccgtgcgaagccttgctctgaccccaaccgagttcgtgaaccaggagaagttgagtttgacattgaggaggactatacaacagatgaggacatggtggaaggggttgaaggcaagcttgggaatggtagtggcgctggtggcattcttgatctgctcaaggccagcaggcaggtggggggacctgactatgctgccctcaccgaggccccagcttctcccagcactcaggaggccatccagggcatgctgtgcatggccaacctgcagtcctcatcgtcctcaccggctacctctagcctgcaggcctggtggactgggggacaggatcgaagcagtgggagctccagcagtgggctgggcacagtgtctaacagtcctgcttcccagcgcaccccagggaagcggcccatcaagcggccagcatactggagaaccgagagcgaggaggaggaggagaacgccagtctggatgaacaggacagcttgggagcgtgcttcaaggatgcagagtatatctatccttcactggagtctgatgatgatgaccctgctttgaaatctcgacccaagaaaaagaagaattcagatgatgctccatggagtcctaaagcccgcgtgaccccaactctgccgaagcaggaccgtcctgtgcgtgaggggacccgggtagcctctattgagacaggtttggctgcagcagctgcaaagctggcccagcaggagctacagaaggcccaaaagaagaaatatatcaagaagaagcctttgctgaaggaggtagaacagcctcgccctcaagactccaatctcagtctgacagtaccagcccccactgtggctgccacaccacaacttgtcacctcctcctcacccctgcctcctcctgagcctaaacaagaggccctgtcaggaagtctcgctgaccatgagtacaccgctcgtcccaatgcctttggcatggcccaggcaaaccgcagcaccacacctatggcccccggtgtcttcttgacccagcggcgcccttcagttggctcccagagcaatcaggcaggacaaggaaagcgtcccaaaaagggcctggccacagcaaagcagagactcggccgtatcctgaaaatccacagaaatggcaaactacttctgtgagccctcctgtgtcccacccctcacccctttacccccattgccttctccattgtcaactcttggggcactcctggatcctatctgccctggacaaggtgctgaggtgcattgtcctgctttcttgggacttaccaaaggcacggacccctccaccgactccttctagttcccttccccactttcactagagcatcctgcctgccttctccactgaggagcaggtaaatgggagaggtttccagctgactagaaccctcttttctactcgtccaaaccactcccgtcacctgccttgtctgttctttattcttcatcccccgctagagctggaaggcaggatgaggagaggtatgaaggagcctgagccatgaagtgggaagcccagtgcttgacactttctgcaactctagccctatatccagaagcctgcccacctccacccattctgtttgccccatttccccagtccagtggacatgccccacctccagacttgctcatgggagaaggctgtggtctctgccccctcttgccaaatgcttcatggaaatgaagaggaaggcctagagcctccttcctgccccactgtgggccatttccagaagtggcctagaaatgccaacttcacttacctttcaaaagaaaggtgattcctatcacttgtcaaggtagggagaggtcagatgcccaagcctttgaccacggttttgtagcctgttggaggaagctacttttagctggctacacatgaggccacttgttttagggtgagctccagggatttgcctggattttgaaatcatgtagaacattatccacgtggctgtggctgtggctgtggctgggccctggcaggtggaaaaccatctcccagaaacctgaaagcacctgccaatgacgcagataaccctggccctacagcctgcttgctccgcctataccacagagcacagcctggacattatggagggtgtggcgggacggcccacacctgggtcctccatcgggaacttttcatgcttctttctccacctgaggtcttggtctgaagaagacctcaggactcacatcttcactcctgggcctttgcacttccagacgacaggtcatcgttcaagcagaatgcagacaggccattcacgagcccaagttgaagagaagagacgcccatccgtgaaggagcagaccatccatccgatcctccccttcccctgtccttccttcgtggattgtctccattgtccagacagtgcccccacctcccaccgccttgcctcactggcaatctggactcgatggagaacatccccccacctccatttggcactacccaagtggagtgtacccttgccctttccacctgtaccacccactccaacctcaccccagcttgcccaatgcttctggggaatttaatagctaccatgcaggccacagggaatttgtgaggcttcttttgtcatctttgtatctccagtttgtctttcttttctccatagccctgcctctactttccttccttggaatcaggggttcctttagcccatttgctttctctaccttggggaccccaggggccaagcagttctccatctagtcacaccaaaggcaaaaagcctggctacctcccccctagcacgtgagtccctactcccctcccctctgtttctgcccagctttgcttattttggggatttcaaggcagcagagggtagtgaggggagagcaggagaagcctctgtcctgtataggcaactgcctgactatgcggtgactgctgtaaccaagatcaggtccccagcccttttgtccattaacaccccttcttgatctttcaaaggcagctaattgctagcaaatccccccgattccggccttttccctctatttctttgttagaagttttctgtggagctgaaacccagcctctgtttgactgggtttcatttagcttagttgggttcttagagccccctgtttgttgttttgtgttgtttccaatgaaaagcaagtttaccctcagagttatgcttttccaaagaggctgatgtctttgtttttgttttttttaatgtttcaggttctaagtgaagtgagttggggaggggttgggagtgttagtaatcaaggtttagaacaccatgagatagttacccctgatctccagtccctagctgggggctggacagggggaagggagagaggatttctattcacctttaatatatttttacaaaaaaagcaaacaatttaaaaacaagcccaccgcttctgtacatgtctaaatatatttttagaagtgggtaggattgtgaatttctgatgcagggcctttttataaataggttagggtagcatcattcagacttctctgttgtttttgtccctgtctttttcttatgttgtgttactaatgtaatttatattttttttagatcctccctttcctatagagataaaagtgatttatcttggc

SEQ ID NO: 22084 - DNA, 687 bp, Homo sapiens
  source 1..687: mol_type = unassigned DNA
gcgacccagcggggggctcgaggggaaggcgagcgaggttcccggcggtacggggactatcccagaattcgacgcgcgtcgccgtaggggccggaactaccggacgagcctccgctgaggcgcttcgcagtcccggagctagcccggctgccggcgtgtcgctggggctgagctccgcgggcgtggagtccttgcagcccaaagcatgaggaggtccctgtaggattctggactgaagacgttcttgtcagctatcgtccagagaggacgcgtgctgccgcctcccgcccctcttgacacgacgaacctggccggccgcagaacgctccagggccgagcgaagatggcctcggtgccggtgtattgcctctgccggctgccttacgatgtgacccgcttcatgatcgagtgtgacatgtgccaggactggtttcatggcagttgtgttggtgttgaagaggagaaggctgctgacattgacctctaccactgccccaactgtgaagtcttgcatgggccctccattatgaaaaaacgccgtggatcttcaaaggggcatgatacacacaaggggaaaccagtgaagaccgggagccctacgttcgtcagagagctccggagtaggacttttgacagctcagatgaagtgattctgaagcccactggaaatcaactgaccgtggaatt

SEQ ID NO: 22085 - DNA, 565 bp, Homo sapiens
  source 1..565: mol_type = unassigned DNA
gaaagaaattctaagggccgggtggactttctctggttgccccctacagccgcaccagctgtgttgcatcccggcggcgtgttatttgtgcctagctatcgtccagagaggacgcgtgctgccgcctcccgcccctcttgacacgacgaacctggccggccgcagaacgctccagggccgagcgaagatggcctcggtgccggtgtattgcctctgccggctgccttacgatgtgacccgcttcatgatcgagtgtgacatgtgccaggactggtttcatggcagttgtgttggtgttgaagaggagaaggctgctgacattgacctctaccactgccccaactgtgaagtcttgcatgggccctccattatgaaaaaacgccgtggatcttcaaaggggcatgatacacacaaggggaaaccagtgaagaccgggagccctacgttcgtcagagagctccggagtaggacttttgacagctcagatgaagtgattctgaagcccactggaaatcaactgaccgtggaattcctggaagaaaatagcttcagtgtgcccatcctg

SEQ ID NO: 22086 - DNA, 555 bp, Homo sapiens
  source 1..555: mol_type = unassigned DNA
gtgtgaaagaaattctaagggccgggtggactttctctggttgccccctacagccgcaccagctgtgttgcatcccggcggcggtaactctattggagaactgagggttggtgcaagggggtggggggcgggggctgattcactctgtaaaaagtgttatttgtgcctagctatcgtccagagaggacgcgtgctgccgcctcccgcccctcttgacacgacgaacctggccggccgcagaacgctccagggccgagcgaagatggcctcggtgccggtgtattgcctctgccggctgccttacgatgtgacccgcttcatgatcgagtgtgacatgtgccaggactggtttcatggcagttgtgttggtgttgaagaggagaaggctgctgacattgacctctaccactgccccaactgtgaagtcttgcatgggccctccattatgaaaaaacgccgtggatcttcaaaggggcatgatacacacaaggggaaaccagtgaagaccgggagccctacgttcgtcagagagctccggagtaggacttttgacag

SEQ ID NO: 22087 - DNA, 555 bp, Homo sapiens
  source 1..555: mol_type = unassigned DNA
atatatgtagagaaatgaattggaaaagatcctgctgaggttccctctagagagggggaagaaccaacaacgcagagaccgtgggaaagagcccagcctatcgaaggtgctcaatgaacaggagccgcgagaggacgcgtgctgccgcctcccgcccctcttgacacgacgaacctggccggccgcagaacgctccagggccgagcgaagatggcctcggtgccggtgtattgcctctgccggctgccttacgatgtgacccgcttcatgatcgagtgtgacatgtgccaggactggtttcatggcagttgtgttggtgttgaagaggagaaggctgctgacattgacctctaccactgccccaactgtgaagtcttgcatgggccctccattatgaaaaaacgccgtggatcttcaaaggggcatgatacacacaaggggaaaccagtgaagaccgggagccctacgttcgtcagagagctccggagtaggacttttgacagctcagatgaagtgattctgaagcccactggaaatcaactgaccgtggaattc

SEQ ID NO: 22088 - DNA, 475 bp, Homo sapiens
  source 1..475: mol_type = unassigned DNA
agtgagagatgaaagaagcttcccgaaaaggcttcaggtattttcttgaaacccggaaagaagttatcactgacaacggggccgaagaagctatcgtccagagaggacgcgtgctgccgcctcccgcccctcttgacacgacgaacctggccggccgcagaacgctccagggccgagcgaagatggcctcggtgccggtgtattgcctctgccggctgccttacgatgtgacccgcttcatgatcgagtgtgacatgtgccaggactggtttcatggcagttgtgttggtgttgaagaggagaaggctgctgacattgacctctaccactgccccaactgtgaagtcttgcatgggccctccattatgaaaaaacgccgtggatcttcaaaggggcatgatacacacaaggggaaaccagtgaagaccgggagccctacgttcgtcagagagctccggagtaggacttttgacag

SEQ ID NO: 22089 - DNA, 534 bp, Homo sapiens
  source 1..534: mol_type = unassigned DNA
aaaagatcctgctgaggttccctctagagagggggaagaaccaacaacgcagagaccgtgggaaagagcccagcctatcgaaggtgctcaatgaacaggagccgcgctatcgtccagagaggacgcgtgctgccgcctcccgcccctcttgacacgacgaacctggccggccgcagaacgctccagggccgagcgaagatggcctcggtgccggtgtattgcctctgccggctgccttacgatgtgacccgcttcatgatcgagtgtgacatgtgccaggactggtttcatggcagttgtgttggtgttgaagaggagaaggctgctgacattgacctctaccactgccccaactgtgaagtcttgcatgggccctccattatgaaaaaacgccgtggatcttcaaaggggcatgatacacacaaggggaaaccagtgaagaccgggagccctacgttcgtcagagagctccggagtaggacttttgacagctcagatgaagtgattctgaagcccactggaaatcaactgacc

SEQ ID NO: 22090 - DNA, 2921 bp, Homo sapiens
  source 1..2921: mol_type = unassigned DNA
ataatagagggagccctgtgaaacaggggtcagctaggggagggttcagtgagagatgaaagaagcttcccgaaaaggcttcagctatcgtccagagaggacgcgtgctgccgcctcccgcccctcttgacacgacgaacctggccggccgcagaacgctccagggccgagcgaagatggcctcggtgccggtgtattgcctctgccggctgccttacgatgtgacccgcttcatgatcgagtgtgacatgtgccaggactggtttcatggcagttgtgttggtgttgaagaggagaaggctgctgacattgacctctaccactgccccaactgtgaagtcttgcatgggccctccattatgaaaaaacgccgtggatcttcaaaggggcatgatacacacaaggggaaaccagtgaagaccgggagccctacgttcgtcagagagctccggagtaggacttttgacagctcagatgaagtgattctgaagcccactggaaatcaactgaccgtggaattcctggaagaaaatagcttcagtgtgcccatcctggtcctgaagaaggatgggttgggcatgacgctgccctcgccatcattcactgtgagggatgttgaacactatgttggttctgacaaagagattgatgtgattgatgtgacccgccaggctgactgcaagatgaagcttggtgattttgtgaaatactattacagcgggaagagggagaaagtcctcaatgtcattagtttggaattctctgataccagactttctaaccttgtggagacaccgaagattgttcgaaagctgtcatgggtcgaaaacttgtggccagaggaatgtgtctttgagagacccaatgtacagaagtactgcctcatgagtgtgcgagatagctatacagactttcacattgactttggtggcacctctgtctggtaccatgtactcaagggtgaaaagatcttctacctgatccgcccaacaaatgccaatctgactctctttgagtgctggagcagttcctctaatcagaatgagatgttctttggggaccaggtggacaagtgctacaagtgttccgtgaagcaaggacagacacttttcattcccacagggtggatccatgctgtgctgacgcctgtggactgccttgcctttggagggaacttcttacacagccttaacatcgagatgcagctcaaagcctatgagattgagaagcggctgagcacagcagacctcttcagattccccaactttgagaccatctgttggtatgtgggaaagcacatcctggacatctttcgcggtttgcgagagaacaggagacaccctgcctcctacctggtccatggtggcaaagccttgaacttggcctttagagcctggacaaggaaagaagctctgccagaccatgaggatgagatcccggagacagtgcgaaccgtacagctcattaaagatctggccagggagatccgcctggtggaagacatcttccaacagaacgttgggaagacgagcaatatctttgggctgcagaggatcttcccagccggctccattcccctaaccaggccagcccattccacttcagtgtccatgtccaggctgtcactgccctccaaaaatggttcaaagaagaaaggcctgaagcccaaggaactcttcaagaaggcagagcgaaagggcaaggagagttcagccttggggcctgctggccagttgagctataatctcatggacacatacagtcatcaggcactgaagacaggctctttccagaaagcaaagttcaacatcactggtgcctgcttgaatgactcagatgacgactcaccagacttggaccttgatggaaatgagagcccattggccctattgatgtctaacggcagtacgaaaagggtgaagagtttatccaaatctcggcgaaccaagatagcaaagaaggtagacaaggctaggctgatggcagaacaggtgatggaagacgaatttgacttggattcagatgatgagctgcagattgacgagagattgggaaaggagaaggcgaccctgataataagaccaaaatttccccggaaattgccccgtgcgaagccttgctctgaccccaaccgagttcgtgaaccaggagaagttgagtttgacattgaggaggactatacaacagatgaggacatggtggaaggggttgaaggctatcagacagcaacccccgctcccgcccaaggtgccagcgaggccccagcttctcccagcactcaggaggccatccagggcatgctgtgcatggccaacctgcagtcctcatcgtcctcaccggctacctctagcctgcaggcctggtggactgggggacaggatcgaagcagtgggagctccagcagtgggctgggcacagtgtctaacagtcctgcttcccagcgcaccccagggaagcggcccatcaagcggccagcatactggagaaccgagagcgaggaggaggaggagaacgccagtctggatgaacaggacagcttgggagcgtgcttcaaggatgcagagtatatctatccttcactggagtctgatgatgatgaccctgctttgaaatctcgacccaagaaaaagaagaattcagatgatgctccatggagtcctaaagcccgcgtgaccccaactctgccgaagcaggaccgtcctgtgcgtgaggggacccgggtagcctctattgagacaggtttggctgcagcagctgcaaagctggcccagcaggtgaagaaaatgaagctctcattaactgactcaggataatacagccagtaaatggaggagacaactcaaactcatatcctctaacttcaaatttcatattactttctatttaaataaatgcttatgtagttcagtcattacatccta

SEQ ID NO: 22091 - DNA, 2352 bp, Homo sapiens
  source 1..2352: mol_type = unassigned DNA
attttgagaacttgcaaaaacagcttgcaaggaaaatgaagcttcctattttcatagcagatgcattcacagcaagagcatttcgtgggaatcctgctgctgtttgcctcctagaaaatgaattggatgaagacatgcatcagaaaattgcaagggagatgaacctctctgaaactgcttttatccgaaaactgcacccgacagacaactttgcacaaaaaaacatgaatagcacgctcacgtttgtcactctgagtggagaactaagggccagacgagcagaggatggcatcgtcctggacttgcctctttatccagcccacccccaggacttccatgaagtagaggacttgataaagactgccataggcaacacactggtccaggacatctgttattctccagatacccaaaagctcctcgtccgcctcagtgacgtttacaacaggtaagatttttggctgcatcagcactttggggagggctgagtacccagatttatagctcttccttagtctggctgtgctgtgtccagtcaaaccatgatttacgcagccagagtgtttctttccctgataggaagacattcccacttgttcttccttcccctcctgttaagctctttgagcaagctgcaccctggcctgcttcacagagtctgtgtggtgagtgggctgtgaaatgggtttgtcctaatccatcttgtttatgaacaaggtcgtttctggagaacctgaaagtgaacacggagaatctgctgcaagttgaaaacacagggaaggtgaaagggcttattcttacccttaaaggagagcctggtgggcagacccaagcatttgacttttactcaagatattttgcaccgtgggttggtgtggctgaagacccagtgacaggtactttttacttgagcccaggggagggttaaacaatggaagaggaggatcacaaatagttatttaagtgcacttcctgtgacctttcaggtggcttgagttttgagctgccttgttcctctatctttccccatccctgccatcccttcactgaagtcttccatgaaaaacataaaatagagcaggtggataacagggttaaacctgagtgtcagacagcctgggtttacattcctagcttcctagcttttgaccttgggcaagtgacttgacttttaaaagtctcagttccctcctctataaattgtatataatacctcatagggctataaaagcacaatgcatgttaagggcttaatacagtgcctggcacctagtaagtgcccaataactactagctattatattgtattattatatctttttgagacatagtctcacttcatcacccaggctagaacggagtggcatgatcccggctcactgcaacctcagcctcccaggttcaagtgattctcctgccttggcctccccagtagctggaactacaggcgtctgccactacacccggctaatttttgtatttttactagagataggatttcatcatgttggccaggatggtcccaaactcctgacctcaaatgatccctcctcggcctcccaaagtgctgggattacaggcatgagccactgcgcctagctaactactagctattttaataataacaacaaaactagctccttgagccaacacttctagattgtccaccacctgggagcagagggatgagtcaaaggtgggcagaaatgtcatgactcctactctccctctctttgggaacagtgggctgcactgcaaaggacgagaatgcttgatgtgggaggatggtgggtgggatggtgaaggggccacaggaggctgggcagacccttcagggctcctgttctggtcagatggcagggcctggatggctcagttactctctgagtaacaaaacacgtgaaattcaaaactcagcaaacaagcacttttaagactcaggaaaatgcccaaccatatccagagtgcagcttccccatggaagaaaagttccaagcagattgcacaagcacagctgcttcacaaagattttaattggcacagagtgcaagtttgtttgtttgtttgtttgtttgtttttccccgtaatgcttttctagagtataaaggcctttggactttgataaccaacatctgagtttgcttgggactgaagggtttctcagggctcagaactttcagtgctaaaaccagaacagtctcaggcaaaccaggcaggatggttggttgccttacttgaacatcccataacacttttttttttttttttttgcccaggctggagtgcaatggcacgttctcagctccctgcaacctctatctcccaagttcaagagattctcctgcctcagc

SEQ ID NO: 22092 - DNA, 2165 bp, Homo sapiens
  source 1..2165: mol_type = unassigned DNA
gcctcctttgtcctggatttgggagttgagcaccttcgtcgccattggctttcctcccccagctccagcctctctcatcttgggaatctgcgtcagaagtcactcgcagtcccgtcagcccagaagaagacgtaaagcaggctaccagcaattttgagaacttgcaaaaacagcttgcaaggaaaatgaagcttcctattttcatagcagatgcattcacagcaagagcatttcgtgggaatcctgctgctgtttgcctcctagaaaatgaattggatgaagacatgcatcagaaaattgcaagggagatgaacctctctgaaactgcttttatccgaaaactgcacccgacagacaactttgcacaaagttcctgctttggactgagatggtttacaccagcgagtgaggtcccactctgtggccatgccaccctggcttctgcagctgtgctgtttcacaaaataaaaaacatgaatagcacgctcacgtttgtcactctgagtggagaactaagggccagacgagcagaggatggcatcgtcctggacttgcctctttatccagcccacccccaggacttccatgaagtagaggacttgataaagactgccataggcaacacactggtccaggacatctgttattctccagatacccaaaagctcctcgtccgcctcagtgacgtttacaacaggtcgtttctggagaacctgaaagtgaacacggagaatctgctgcaagttgaaaacacagggaaggtgaaagggcttattcttacccttaaaggagagcctggtgggcagacccaagcatttgacttttactcaagatattttgcaccgtgggttggtgtggctgaagacccagtgacagggtctgcacacgctgttctcagcagctactggtcccagcatctggggaagaaagaaatgcatgcttttcagtgttcccaccgaggaggagagctgggaatttcccttcgtccagacggaagggttgacattagaggaggtgcagctgttgttttagagggcacactgacagcctagaggtggttatgctgtgacgctgctgtctctaaccaccaagtattttctgcttaaaaagaaatgtaaggggctgcctttagcaaatgtgcgtagtagtctacttaatcctcatgttaaaaatcgaaaaatgggccaggcgcagtggctcatgcctgtaatcgtagcactttgagaggccaaggtgggtggatcacctgaggtcaggggttcgacaccagcctggccaacatggtgaaacctcgtctctactacaaatacaaaaattagctgggtgtggtgccacatgcctgtaattccagctacttgggaggctgaggcatggagaatcgcttgaacccaggaggcagaagttgcagtgagcagagatcacaccactgcactccagcctgggcaacagagtaagactccatccacacacacacacacacacacaaaattgaaaagtgaagacattttaatggagatttaatagtgcttccagactaatgaactaatggagttttggctccactcatgagtgtatttgaaatgtaagtaaccagctacaaagaataatgtcacttcatttgattatgactaccaatcaagagaaggaggaatacatttctgaggagtgatactaaaccatttgagcttaaatgagtacctgattttgcagccattaaaatgagtcaataactatgtggaaatatagaaaaatattttataatataatactaagaaagaggacagtaggccataaagtgttagcagtgttatgctatgtctatataaataagcatgggccattaaaaatagcaaactgaaaacagttcatgtgtggggggcaagtttagaagtaattttaatgtatctaagaagtgatttcctttattgttgtactcaggtacgaagactaaaaatcaggatgaatccagaaaattaacacaaaaaagtatgtattaggctacttcctgtcatagtgaaattaaacactcaaagtaatgtaatctcagctgggcgtggcggctcatgcctgtaatcccagcactttggcaggacaaggcaggaggatcacttgaacctaggagttcgagaccagcctgggcaacacagcgagaacttgtctctatt

SEQ ID NO: 22093 - DNA, 2449 bp, Homo sapiens
  source 1..2449: mol_type = unassigned DNA
aagtgccttgaattccttggtaattatttccttttaagcgtgtaactcttattattgctaaactgctttttaagttaatggtagttgttgtccaaaggaagtctgatctgtgtttttgaaacctcaatgatcgtctgtttctaattaaggaattggatgaagacatgcatcagaaaattgcaagggagatgaacctctctgaaactgcttttatccgaaaactgcacccgacagacaactttgcacaaagttcctgctttggactgagatggtttacaccagcgagtgaggtcccactctgtggccatgccaccctggcttctgcagctgtgctgtttcacaaaataaaaaacatgaatagcacgctcacgtttgtcactctgagtggagaactaagggccagacgagcagaggatggcatcgtcctggacttgcctctttatccagcccacccccaggacttccatgaagtagaggacttgataaagactgccataggcaacacactggtccaggacatctgttattctccagatacccaaaagctcctcgtccgcctcagtgacgtttacaacaggtcgtttctggagaacctgaaagtgaacacggagaatctgctgcaagttgaaaacacagggaaggtgaaagggcttattcttacccttaaaggagagcctggtgggcagacccaagcatttgacttttactcaagatattttgcaccgtgggttggtgtggctgaagacccagtgacagggtctgcacacgctgttctcagcagctactggtcccagcatctggggaagaaagaaatgcatgcttttcagtgttcccaccgaggaggagagctgggaatttcccttcgtccagacggaagggttgacattagaggaggtgcagctgttgttttagagggcacactgacagcctagaggtggttatgctgtgacgctgctgtctctaaccaccaagtattttctgcttaaaaagaaatgtaaggggctgcctttagcaaatgtgcgtagtagtctacttaatcctcatgttaaaaatcgaaaaatgggccaggcgcagtggctcatgcctgtaatcgtagcactttgagaggccaaggtgggtggatcacctgaggtcaggggttcgacaccagcctggccaacatggtgaaacctcgtctctactacaaatacaaaaattagctgggtgtggtgccacatgcctgtaattccagctacttgggaggctgaggcatggagaatcgcttgaacccaggaggcagaagttgcagtgagcagagatcacaccactgcactccagcctgggcaacagagtaagactccatccacacacacacacacacacacaaaattgaaaagtgaagacattttaatggagatttaatagtgcttccagactaatgaactaatggagttttggctccactcatgagtgtatttgaaatgtaagtaaccagctacaaagaataatgtcacttcatttgattatgactaccaatcaagagaaggaggaatacatttctgaggagtgatactaaaccatttgagcttaaatgagtacctgattttgcagccattaaaatgagtcaataactatgtggaaatatagaaaaatattttataatataatactaagaaagaggacagtaggccataaagtgttagcagtgttatgctatgtctatataaataagcatgggccattaaaaatagcaaactgaaaacagttcatgtgtggggggcaagtttagaagtaattttaatgtatctaagaagtgatttcctttattgttgtactcaggtacgaagactaaaaatcaggatgaatccagaaaattaacacaaaaaagtatgtattaggctacttcctgtcatagtgaaattaaacactcaaagtaatgtaatctcagctgggcgtggcggctcatgcctgtaatcccagcactttggcaggacaaggcaggaggatcacttgaacctaggagttcgagaccagcctgggcaacacagcgagaacttgtctctattaaaaaaaaaaaaaggaatgtaatttcaatctttttcttgatatatggcttgagaatgataatgtaaaaggaattcttctcttacttcaataaaatgggttttaacataactttaaattcagttaaatatacaatattgaatacctatagttgactttgggatggggactttttcaagtcattaagagtgtttgtttaaggtgatctcattgatggtagttctcagccgtctcaaaaactgcaagctaatcagtcagacattctttaatgaccccaattttttcactttaattgttaccatgttttctatttttactgatttttgctaaagcatgtaagagtgaatttattatagcagtaatcttgtgtttctcctgatgtgcaataaatcaataattcaccagc

SEQ ID NO: 22094 - DNA, 2587 bp, Homo sapiens
  source 1..2587: mol_type = unassigned DNA
gaattacaaaggaggccgtctgcctcctttgtcctggatttgggagttgagcaccttcgtcgccattggctttcctcccccagctccagcctctctcatcttgggaatctgcgtcagaagtcactcgcagtcccgtcagcccagaagacgtaaagcaggctaccagcaattttgagaacttgcaaaaacagcttgcaaggaaaatgaagcttcctattttcatagcagatgcattcacagcaagagcatttcgtgggaatcctgctgctgtttgcctcctagaaaatgaattggatgaagacatgcatcagaaaattgcaagggagatgaacctctctgaaactgcttttatccgaaaactgcacccgacagacaactttgcacaaagttcctgctttggactgagatggtttacaccagcgagtgaggtcccactctgtggccatgccaccctggcttctgcagctgtgctgtttcacaaaataaaaaacatgaatagcacgctcacgtttgtcactctgagtggagaactaagggccagacgagcagaggatggcatcgtcctggacttgcctctttatccagcccacccccaggacttccatgaagtagaggacttgataaagactgccataggcaacacactggtccaggacatctgttattctccagatacccaaaagctcctcgtccgcctcagtgacgtttacaacaggtcgtttctggagaacctgaaagtgaacacggagaatctgctgcaagttgaaaacacagggaaggtgaaagggcttattcttacccttaaaggagagcctggtgggcagacccaagcatttgacttttactcaagatattttgcaccgtgggttggtgtggctgaagacccagtgacagggtctgcacacgctgttctcagcagctactggtcccagcatctggggaagaaagaaatgcatgcttttcagtgttcccaccgaggaggagagctgggaatttcccttcgtccagacggaagggttgacattagaggaggtgcagctgttgttttagagggcacactgacagcctagaggtggttatgctgtgacgctgctgtctctaaccaccaagtattttctgcttaaaaagaaatgtaaggggctgcctttagcaaatgtgcgtagtagtctacttaatcctcatgttaaaaatcgaaaaatgggccaggcgcagtggctcatgcctgtaatcgtagcactttgagaggccaaggtgggtggatcacctgaggtcaggggttcgacaccagcctggccaacatggtgaaacctcgtctctactacaaatacaaaaattagctgggtgtggtgccacatgcctgtaattccagctacttgggaggctgaggcatggagaatcgcttgaacccaggaggcagaagttgcagtgagcagagatcacaccactgcactccagcctgggcaacagagtaagactccatccacacacacacacacacacacaaaattgaaaagtgaagacattttaatggagatttaatagtgcttccagactaatgaactaatggagttttggctccactcatgagtgtatttgaaatgtaagtaaccagctacaaagaataatgtcacttcatttgattatgactaccaatcaagagaaggaggaatacatttctgaggagtgatactaaaccatttgagcttaaatgagtacctgattttgcagccattaaaatgagtcaataactatgtggaaatatagaaaaatattttataatataatactaagaaagaggacagtaggccataaagtgttagcagtgttatgctatgtctatataaataagcatgggccattaaaaatagcaaactgaaaacagttcatgtgtggggggcaagtttagaagtaattttaatgtatctaagaagtgatttcctttattgttgtactcaggtacgaagactaaaaatcaggatgaatccagaaaattaacacaaaaaagtatgtattaggctacttcctgtcatagtgaaattaaacactcaaagtaatgtaatctcagctgggcgtggcggctcatgcctgtaatcccagcactttggcaggacaaggcaggaggatcacttgaacctaggagttcgagaccagcctgggcaacacagcgagaacttgtctctattaaaaaaaaaaaaaggaatgtaatttcaatctttttcttgatatatggcttgagaatgataatgtaaaaggaattcttctcttacttcaataaaatgggttttaacataactttaaattcagttaaatatacaatattgaatacctatagttgactttgggatggggactttttcaagtcattaagagtgtttgtttaaggtgatctcattgatggtagttctcagccgtctcaaaaactgcaagctaatcagtcagacattctttaatgaccccaattttttcactttaattgttaccatgttttctatttttactgatttttgctaaagcatgtaagagtgaatttattatagcagtaatcttgtgtttctcctgatgtgcaataaatcaataattcaccagc

SEQ ID NO: 22095 - DNA, 1224 bp, Homo sapiens
  source 1..1224: mol_type = unassigned DNA
gaattacaaaggaggccgtctgcctcctttgtcctggatttgggagttgagcaccttcgtcgccattggctttcctcccccagctccagcctctctcatcttgggaatctgcgtcagaagtcactcgcagtcccgtcagcccagaagacgtaaagcaggctaccagcaattttgagaacttgcaaaaacagcttgcaaggaaaatgaagcttcctattttcatagcagatgcattcacagcaagagcatttcgtgggaatcctgctgctgtttgcctcctagaaaatgaattggatgaagacatgcatcagaaaattgcaagggagatgaacctctctgaaactgcttttatccgaaaactgcacccgacagacaactttgcacaaagttcctgctttggactgagatggtttacaccagcgagtgaggtcccactctgtggccatgccaccctggcttctgcagctgtgctgtttcacaaaataaaaaacatgaatagcacgctcacgtttgtcactctgagtggagaactaagggccagacgagcagaggatggcatcgtcctggacttgcctctttatccagcccacccccaggacttccatgaagtagaggacttgataaagactgccataggcaacacactggtccaggacatctgttattctccagatacccaaaagctcctcgtccgcctcagtgacgtttacaacaggtcgtttctggagaacctgaaagtgaacacggagaatctgctgcaagttgaaaacacagggaaggtgaaagggcttattcttacccttaaaggagagcctggtgggcagacccaagcatttgacttttactcaagatattttgcaccgtgggttggtgtggctgaagacccagtgacagggtctgcacacgctgttctcagcagctactggtcccagcatctggggaagaaagaaatgcatggtaggacagctctttaccaatttcttttttatttgcctaattcgaagctagtgttccttctcatatgtactatccccttgaaaatgtaatacaatgtcatgtatcacccatgtgaaaatgaaaggttttaaaattccttcacccttaaagatcctccaccccaaacagccttcacctctgcctcccccaacatacagagactgtacagacacagatacagtaactgcccaataagtgtttgttgaataaaatagctgtataactttg

SEQ ID NO: 22096 - DNA, 1841 bp, Homo sapiens
  source 1..1841: mol_type = unassigned DNA
tttcaagggtgacttgatttcgcctgatcctggtcggcagggtggggtttcttggcattcctcaggccgggggatgcgacgtctgggtgtggaggtgatgagctaggggttctgtggcactccggctctgctcagggcgacctgcgtaggggcctctggggcaggcccgctttctgtcaaaatggcagcgcccagcgtgcgcgggtatctctgaagttggggtttaagattcttgcccgtgagagcgaacgagcctgccgtacttctgattttgaaacacctgggtctgggcttcccgggcgagcggtggaacctgtgagaagtttctacaatggtgggctcagctctcaggagaggtgcccatgcatatgtctacctggtgagtaaggccagtcacatctccagaggccatcagcaccaggcctggggatcgaggcctcctgcagcagagtgtgccacccaaagagctccaggcagtgtggtggagctgctgggcaaatcctaccctcaggacgaccacagcaacctcacccggaaggtcctcaccagagttggcaggaacctgcacaaccagcagcatcaccctctgtggctgatcaaggagagggtgaaggagcacttctacaagcagtatgtgggccgctttgggaccccgttgttctcggtctacgacaacctttctccagtggtcacgacctggcagaactttgacagcctgctcatcccagctgatcaccccagcaggaagaagggggacaactattacctgaatcggactcacatgctgagagcgcacacgtctgcacaccagtgggacttgctgcacgcgggactggatgccttcctggtggtgggtgatgtctacaggcgtgaccagatcgactcccagcactaccctattttccaccagctggaggccgtgcggctcttctccaagcatgagttatttgctggtataaaggatggagaaagcctgcagctctttgaacaaagttctcgctctgcgcataaacaagagacacacaccatggaggccgtgaagcttgtagagtttgatcttaagcaaacgcttaccaggctcatggcacatctttttggagatgagctggagataagatgggtagactgctacttcccttttacacatccttcctttgagatggagatcaactttcatggagaatggctggaagttcttggctgcggggtgatggaacaacaactggtcaattcagctggtgctcaagaccgaatcggctgggcttttggcctaggattagaaaggctagccatgatcctctacgacatccctgatatccgtctcttctggtgtgaggacgagcgcttcctgaagcagttctgtgtatccaacattaatcagaaggtgaagtttcagcctcttagcaaatatccggctgtgatcaatgatatttcattctggttgccctctgagaattacgcagaaaatgatttctatgacttagtccgaacaattggaggagacctggtggaaaaggttgatctcatagacaagtttgtacatccaaagacgcacaagaccagccactgctaccgcatcacgtaccgccacatggaacggactctgtcccagagagaggtcaggcacatccaccaggccttgcaggaggctgcagtccagctgttgggtgtggagggcaggttctgatgtcaccacttcactcaggctgcagccctcttggggctccaggatttgctgaaagagaaaaagatatggtttgtgaactggggcatcaatcatcttttgataaatggatcagttttaggactttcagaaaataaaagatcgctcttgaaaagct

SEQ ID NO: 22097 - DNA, 1528 bp, Homo sapiens
  source 1..1528: mol_type = unassigned DNA
aacctgtgagaagtttctacaatggtgggctcagctctcaggagaggtgcccatgcatatgtctacctggtgagtaaggccagtcacatctccagaggccatcagcaccaggcctggggatcgaggcctcctgcagcagagtgtgccacccaaagagctccaggcagtgtggtggagctgctgggcaaatcctaccctcaggacgaccacagcaacctcacccggaaggtcctcaccagagttggcaggaacctgcacaaccagcagcatcaccctctgtggctgatcaaggagagggtgaaggagcacttctacaagcagtatgtgggccgctttgggaccccgttgttctcggtctacgacaacctttctccagtggtcacgacctggcagaactttgacagcctgctcatcccagctgatcaccccagcaggaagaagggggacaactattacctgaatcggactcacatgctgagagcgcacacgtctgcacaccagtgggacttgctgcacgcgggactggatgccttcctggtggtgggtgatgtctacaggcgtgaccagatcgactcccagcactaccctattttccaccagctggaggccgtgcggctcttctccaagcatgagttatttgctggtataaaggatggagaaagcctgcagctctttgaacaaagttctcgctctgcgcataaacaagagacacacaccatggaggccgtgaagcttgtagagtttgatcttaagcaaacgcttaccaggctcatggcacatctttttggagatgagctggagataagatgggtagactgctacttcccttttacacatccttcctttgagatggagatcaactttcatggagaatggctggaagttcttggctgcggggtgatggaacaacaactggtcaattcagctggtgctcaagaccgaatcggctgggcttttggcctaggattagaaaggctagccatgatcctctacgacatccctgatatccgtctcttctggtgtgaggacgagcgcttcctgaagcagttctgtgtatccaacattaatcagaaggtgaagtttcagcctcttagcaaatatccggctgtgatcaatgatatttcattctggttgccctctgagaattacgcagaaaatgatttctatgacttagtccgaacaattggaggagacctggtggaaaaggttgatctcatagacaagtttgtacatccaaagacgcacaagaccagccactgctaccgcatcacgtaccgccacatggaacggactctgtcccagagagaggtcaggcacatccaccaggccttgcaggaggctgcagtccagctgttgggtgtggagggcaggttctgatgtcaccacttcactcaggctgcagccctcttggggctccaggatttgctgaaagagaaaaagatatggtttgtgaactggggcatcaatcatcttttgataaatggatcagttttaggactttcagaaaataaaagatcgctcttgaaaa

SEQ ID NO: 22098 - DNA, 1249 bp, Homo sapiens
  source 1..1249: mol_type = unassigned DNA
tttcaagggtgacttgatttcgcctgatcctggtcggcagggtggggtttcttggcattcctcaggccgggggatgcgacgtctgggtgtggaggtgatgagctaggggttctgtggcactccggctctgctcagggcgacctgcgtaggggcctctggggcaggcccgctttctgtcaaaatggcagcgcccagcgtgcgcgggtatctctgaagttggggtttaagattcttgcccgtgagagcgaacgagcctgccgtacttctgattttgaaacacctgggtctgggcttcccgggcgagcggtggaacctgtgagaagtttctacaatggtgggctcagctctcaggagaggtgcccatgcatatgtctacctggtgagtaaggccagtcacatctccagaggccatcagcaccaggcctggggatcgaggcctcctgcagcagagtgtgccacccaaagagctccaggcagtgtggtggagctgctgggcaaatcctaccctcaggacgaccacagcaacctcacccggaaggtcctcaccagagttggcaggaacctgcacaaccagcagcatcaccctctgtggctgatcaaggagagggtgaaggagcacttctacaagcagtatgtgggccgctttgggaccccgttgttctcggtctacgacaacctttctccagtggtcacgacctggcagaactttgacagcctgctcatcccagctgatcaccccagcaggaagaagggggacaactattacctgaatcggactcacatgctgagagcgcacacgtctgcacaccagtgggacttgctgcacgcgggactggatgccttcctggtggtgggtgatgtctacaggcgtgaccagatcgactcccagcactaccctattttccaccagctggaggccgtgcggctcttctccaagcatgagttatttgctggtataaaggatggagaaagcctgcagctctttgaacaaagttctcgctctgcgcataaacaagagacacacaccatggaggccgtgaagcttgtagagtttgatcttaagcaaacgcttaccaggctcatggcacatctttttggagatgagctggagataagatgggtagactgctacttcccttttacacatccttcctttgagatggagatcaactttcatggagaatggctggaagttcttggctgcggggtgatggaacaacaactggtcaattcaggcggcgccacctga

SEQ ID NO: 22099 - DNA, 434 bp, Homo sapiens
  source 1..434: mol_type = unassigned DNA
ttatttgctggtataaaggatggagaaagcctgcagctctttgaacaaagttctcgctctgcgcataaacaagagacacacaccatggaggccgtgaagcttgtagagtttgatcttaagcaaacgcttaccaggctcatggcacatctttttggagatgagctggagataagatgggtagactgctacttcccttttacacatccttcctttgagatggagatcaactttcatggagaatggctggaagttcttggctgcggggtgatggaacaacaactggtcaattcaggcggcgccacctgactgagagaaaatggaaacacgaggttgctgattgaattctacgcatatctataggcatttcagaaagatctgtctggctcttttctgtaagaccattgcttaataaaaatgatggcttctaaatgtaa

SEQ ID NO: 22100 - DNA, 1157 bp, Homo sapiens
  source 1..1157: mol_type = unassigned DNA
ggacgattgccgctgcagccgccgccccactcacctccggtgtgtctgcagcccggacactaagggagatggatgaatgggtggggaggatgcggcgcacatggccccgggcggctcggcggtcagctgccgcccccacagcggaccggtcggggcgggggtcgggcggtagaaaaaagggccgcgaggcgagcggggcactgggcggaccgcggcggcagcatgagcggcgcagaccgtagccccaatgcgggcgcagcccctgactcggccccgggccaggcggcggtggcttcggcctaccagcgcttcgagccgcgcgcctacctccgcaacaactacgcgccccctcgcggggacctgtgcaacccgaacggcgtcgggccgtggaagctgcgctgcttggcgcagaccttcgccaccggtgaagtgtccggacgcaccctcatcgacattggttcaggccccaccgtgtaccagctgctcagtgcctgcagccactttgaggacatcaccatgacagatttcctggaggtcaaccgccaggagctggggcgctggctgcaggaggagccgggggccttcaactggagcatgtacagccaacatgcctgcctcattgagggcaagggggaatgctggcaggataaggagcgccagctgcgagccagggtgaaacgggtcctgcccatcgacgtgcaccagccccagcccctgggtgctgggagcccagctcccctgcctgctgacgccctggtctctgccttctgcttggaggctgtgagcccagatcttgccagctttcagcgggccctggaccacatcaccacgctgctgaggcctggggggcacctcctcctcatcggggccctggaggagtcgtggtacctggctggggaggccaggctgacggtggtgccagtgtctgaggaggaggtgagggaggccctggtgcgtagtggctacaaggtccgggacctccgcacctatatcatgcctgcccaccttcagacaggcgtagatgatgtcaagggcgtcttcttcgcctgggctcagaaggttgggctgtgagggctgtacctggtgccctgtggcccccacccacctggattccctgttctttgaagtggcacctaataaagaaataataccctgcc

SEQ ID NO: 22101 - DNA, 821 bp, Homo sapiens
  source 1..821: mol_type = unassigned DNA
gctgcgagggggaaactggggaaagggcctaattccccagtctccacctcgaatcaggaaagagaaggggcgggctgctgggcaaaagaggtgaagtgtccggacgcaccctcatcgacattggttcaggccccaccgtgtaccagctgctcagtgcctgcagccactttgaggacatcaccatgacagatttcctggaggtcaaccgccaggagctggggcgctggctgcaggaggagccgggggccttcaactggagcatgtacagccaacatgcctgcctcattgagggcaagggggaatgctggcaggataaggagcgccagctgcgagccagggtgaaacgggtcctgcccatcgacgtgcaccagccccagcccctgggtgctgggagcccagctcccctgcctgctgacgccctggtctctgccttctgcttggaggctgtgagcccagatcttgccagctttcagcgggccctggaccacatcaccacgctgctgaggcctggggggcacctcctcctcatcggggccctggaggagtcgtggtacctggctggggaggccaggctgacggtggtgccagtgtctgaggaggaggtgagggaggccctggtgcgtagtggctacaaggtccgggacctccgcacctatatcatgcctgcccaccttcagacaggcgtagatgatgtcaagggcgtcttcttcgcctgggctcagaaggttgggctgtgagggctgtacctggtgccctgtggcccccacccacctggattccctgttctttgaagtggcacctaataaagaaataataccctg

SEQ ID NO: 22102 - DNA, 741 bp, Homo sapiens
  source 1..741: mol_type = unassigned DNA
atggaagaagccaaaagccaaagtttggaggaagactttgaaggacaggccacacatacaggacccaaaggagtaataaatgattggagaaagtttaaattagagagtcaagacagtgattcaattccacctagcaagaaggagattctcaggcaaatgtcttctcctcagagtaggaatggcaaagattcaaaggaacgagtcagcagaaagatgagcattcaagaatatgaactaatccataaagagaaagaggatgaaaactgccttcgtaaataccgtagacagtgtatgcaggatatgcaccagaagctgagttttgggcctagatatgggtttgtgtatgagctggaaactggaaagcaattcctagaaacaattgaaaaggaactgaagatcaccacaattgttgttcacatttatgaagatggtattaagggttgtgatgctctaaacagtagtttaacatgccttgcagcagaataccctatagttaagttttgtaaaataaaagcttcgaatacaggtgctggggaccgcttttccttagatgtacttcctacactgctcatctataaaggtggggaactcataagcaattttattagtgttgctgaacagtttgctgaagaattttttgctggggatgtggagtctttcctaaatgaatatgggttactacctgaaagagaggtacatgtcctagagcataccaaaatagaagaagaagatgttgaatga

SEQ ID NO: 22103 - DNA, 1242 bp, Homo sapiens
  source 1..1242: mol_type = unassigned DNA
acgagttcagtagacagggattctcacccactcaacaaggacaccaggcacagagatccaaactattatatcaaatccagtccctaaaatggaagaagccaaaagccaaagtttggaggaagactttgaaggacaggccacacatacaggacccaaaggagtaataaatgattggagaaagtttaaattagagagtcaagacagtgattcaattccacctagcaagaaggagattctcaggcaaatgtcttctcctcagagtaggaatggcaaagattcaaaggaacgagtcagcagaaagatgagcattcaagaatatgaactaatccataaagagaaagaggatgaaaactgccttcgtaaataccgtagacagtgtatgcaggatatgcaccagaagctgagttttgggcctagatatgggtttgtgtatgagctggaaactggaaagcaattcctagaaacaattgaaaaggaactgaagatcaccacaattgttgttcacatttatgaagatggtattaagggttgtgatgctctaaacagtagtttaacatgccttgcagcagaataccctatagttaagttttgtaaaataaaagcttcgaatacaggtgctggggaccgcttttccttagatgtacttcctacactgctcatctataaaggtggggaactcataagcaattttattagtgttgctgaacagtttgctgaagaattttttgctggggatgtggagtctttcctaaatgaatatgggttactacctgaaagagaggtacatgtcctagagcataccaaaatagaagaagaagatgttgaatgaagattcactatgtcaatatctcatgtttatcctttaggtattggatgatggttttggtagtatctatattgctttagtgaacacagagtatgggcacggctatgctaacttgacaaaaatgactgatgcaacaatcgagttattagcatttcttagtattagttactcaaattgatacaatgcttgactacaaaacagagctgtcttcagcaacattattagtagacaaagaggatgtggataatattatgacatttttcaaaaatccctttcaagttatgttttgtcttttttactccattttccctcatcactgttattatttggacttttcaaattacattattcattataattttctttgtgtaataaaaatgaaatctcatgagaaaataaattttctatttgaagtc

SEQ ID NO: 22104 - DNA, 699 bp, Homo sapiens
  source 1..699: mol_type = unassigned DNA
gcaagaaggagattctcaggcaaatgtcttctcctcagagtaggaatggcaaagattcaaaggaacgagtcagcagaaagatgagcattcaagaatatgaactaatccataaagagaaagaggatgaaaactgccttcgtaaataccgtagacagtgtatgcaggatatgcaccagaagctgagttttgggcctagatatgggtttgtgtatgagctggaaactggaaagcaattcctagaaacaattgaaaaggaactgaagatcaccacaattgttgttcacatttatgaagatggtattaagggttgtgatgctctaaacagtagtttaacatgccttgcagcagaataccctatagttaagttttgtaaaataaaagcttcgaatacaggtgctggggaccgcttttccttagatgtacttcctacactgctcatctataaaggtggggaactcataagcaattttattagtgttgctgaacagtttgctgaagaattttttgctggggatgtggagtctttcctaaatgaatatgggttactacctgaaagagaggtacatgtcctagagcataccaaaatagaagaagaagatgttgaatgaagattcactatgtcaatatctcatgtttatcctttaggtattggatgatggttttggtagtatctatattgctttagtgaacacagagtat

SEQ ID NO: 22105 - DNA, 1174 bp, Homo sapiens
  source 1..1174: mol_type = unassigned DNA
aaatgtgtggagatttattttataatagcaatgtgaggaataccttcctaattatgacaaaaacaaaaacaacaacaaaaagaccattgaagaaaaggacccaaaggagtaataaatgattggagaaagtttaaattagagagtcaagacagtgattcaattccacctagcaagaaggagattctcaggcaaatgtcttctcctcagagtaggaatggcaaagattcaaaggaacgagtcagcagaaagatgagcattcaagaatatgaactaatccataaagagaaagaggatgaaaactgccttcgtaaataccgtagacagtgtatgcaggatatgcaccagaagctgagttttgggcctagatatgggtttgtgtatgagctggaaactggaaagcaattcctagaaacaattgaaaaggaactgaagatcaccacaattgttgttcacatttatgaagatggtattaagggttgtgatgctctaaacagtagtttaacatgccttgcagcagaataccctatagttaagttttgtaaaataaaagcttcgaatacaggtgctggggaccgcttttccttagatgtacttcctacactgctcatctataaaggtggggaactcataagcaattttattagtgttgctgaacagtttgctgaagaattttttgctggggatgtggagtctttcctaaatgaatatgggttactacctgaaagagaggtacatgtcctagagcataccaaaatagaagaagaagatgttgaatgaagattcactatgtcaatatctcatgtttatcctttaggtattggatgatggttttggtagtatctatattgctttagtgaacacagagtatgggcacggctatgctaacttgacaaaaatgactgatgcaacaatcgagttattagcatttcttagtattagttactcaaattgatacaatgcttgactacaaaacagagctgtcttcagcaacattattagtagacaaagaggatgtggataatattatgacatttttcaaaaatccctttcaagttatgttttgtcttttttactccattttccctcatcactgttattatttggacttttcaaattacattattcattataattttctttgtgtaataaaaatgaaatctcatgagaaaataaa

SEQ ID NO: 22106 - DNA, 2813 bp, Homo sapiens
  source 1..2813: mol_type = unassigned DNA
cgcaggaaggccgcctcattggtccgcgctgtcgggcttcggcggcttttctctttagcgctcagggcgctgacccactgctcttcctcttaagaaagtgctccattccttccggcgcccggagctgctggcccaaagggatccggagcgagctagggcagacaccatgaccacccttgatgataagttgctgggggagaaactgcagtactactatagcagcagtgaggatgaggacagtgaccacgaggacaaggaccgaggcagatgtgccccagccagcagttctgtgcctgcagaggctgagctggcaggcgaaggcatctcagttaacacaggcccaaaaggtgtgatcaatgactggcgccgcttcaagcagttggagacagagcagagggaggagcagtgccgggagatggaaaggctgatcaagaagctgtcaatgacttgcaggtcccatctggatgaagaggaggagcaacagaaacagaaagacctccaggagaagatcagtgggaagatgactctgaaggagtttgccataatgaatgaggaccaagatgatgaagagtttctgcagcagtaccggaagcagcgaatggaagagatgcggcagcagcttcacaaggggccccaattcaagcaggtttttgagatctccagtggagaagggtttttagacatgattgataaagaacagaaaagcattgtcatcatggttcatatttatgaggatggcattccagggaccgaagccatgaatggttgcatgatctgccttgccgcagagtacccagctgtcaagttctgcaaggtgaagagctcagttattggcgccagcagtcagttcaccaggaatgcccttcctgccctgctgatctataaggggggtgaattgatcggcaattttgttcgtgttactgaccagctgggggatgatttctttgctgtggaccttgaagcttttctccaggaatttggattactcccagaaaaggaagtcttggtgctgacatctgtgcgtaactctgccacgtgtcacagtgaggatagcgacctggaaatagattgaactgatagtctagttgcatagatttctcattgtttgggttggaatacacgtcattgtttatttttgttcctttgtcttctggcttttcagctgttctttgtagtcccttttattatgcataaaataaagaaattcttagattaaatcagaatgctgaataaccttgtagctagcaataaggtgacttacagttgtataaacaggaagccaggcttttgaactgtttacttaagattctgtggtgtgacatctctgttattgtttccagtcaatatttacaaagcatcctaaagacagggtcttggaaattgtcttcagatgatcttagaggtctctgccaagtctgagagtataattctgtaggtattgtgttatttgcaacgtaaatagtgcattttcttaatcaaatgattgtaaattatatttacttgtaatcagttccatagctttagacggtggttagattttttttttccccaccagggtcttgtttaaaggggtgagccaccgcacccagtcctgaggggtggcctctgctgctggatttcatgtcttcctccagcatgactaagtctggaacagcaggaagggttgatgcttactgacctggtgatgttagaagacaagtagtttatggatttaaacattagagctggagtggggctggaaatctttgtaaaggaagttctttcagtaagatgcccctgcttgtctttgtctcttttttgtttaacaaggtaactttttgtttaacaaggtaactttttgtttaacctagattttttttaaaactttttttttttttcatattggaaaagtaattcatattcagtagaggaaaactgaccaaaacagaagcaaaaataagaaaattaaaataatctctaatcctactacctagaataaaacactattaatattttggtctgtttcctgccaaggtgttttctgtgtatacatggatattttgtttgtttttaaacaaaacgatgggatcattctgaacatactgttctatagtatggtcagctaataatatatcagacctttttttatattattaaatattctacaactttttaaaaatgtctattaatattccatcgtatagatgtgatataatttgcttgatggttgtctcttaaaaagaaagatagcaaatactttttttaaattacaaaagtgatagatgttcattgtagaaaatgtaataaacactgttaagacttaaaagccatataattccaccaaccaaaattaatcccttttgtcatatttctagtcatttttatagcctttttttctatgtatttataataattatcatttgcgtttttttcctttttttaactttaaaaatgtatattctagggtcaggggaaatgtaatctggaattaaatattagccttaaaattcacaattttgattttcctggcttttcaggaattgactaactgtaaaagagtcttgaaagtatttagtcaacaaacagagtgcattttttttttttttgactaagaaagctcgttgtagtagaaagggtggaatgtattgaaaattattagaagcagggaagtattgttagtctagcttatttcctttcagtcttttttcaatatttttataaacattgagtacttactgaatttagttctgtgctcttccttatttagtgttgtatcataaatactttgatgtttcaaacattctaaataaataattttcagtggcttcataata

SEQ ID NO: 22107 - DNA, 595 bp, Homo sapiens
  source 1..595: mol_type = unassigned DNA
actgcagtactactatagcagcagtgaggatgaggacagtgaccacgaggacaaggaccgaggcagatgtgccccagccagcagttctgtgcctgcagaggctgagctggcaggcgaaggcatctcagttaacacaggcccaaaaggtgtgatcaatgactggcgccgcttcaagcagttggagacagagcagagggaggagcagtgccgggagatggaaaggctgatcaagaagctgtcaatgacttgcaggtcccatctggatgaagaggaggagcaacagaaacagaaagacctccaggagaagatcagtgggaaggagagatgaggctttgccatgttggccaggctggtcttgaactcctgacctcaagtgatccgctcgtctcagcctcccaaagtgctaggattacaggcgtgagccaccgcgcccggcccatattaactgttatcacgagtgttcagttttcatatttatgctcacttgctggtccgcctgcagatgactctgaaggagtttgccataatgaatgaggaccaagatgatgaagagtttctgcagcagtaccggaagcagcgaatggaagagatgcgg

SEQ ID NO: 22108 - DNA, 404 bp, Homo sapiens
  source 1..404: mol_type = unassigned DNA
atgtgccccagccagcagttctgtgcctgcagaggctgagctggcaggcgaaggcatctcagttaacacaggcccaaaaggtgtgatcaatgactggcgccgcttcaagcagttggagacagagcagagggaggagcagtgccgggagatggaaaggctgatcaagaagctgtcaatgacttgcaggtcccatctggatgaagaggaggagcaacagaaacagaaagacctccaggagaagatcagtgggaagaaatcttgggcaattctgtaagaagagaattgaagtaactgagaggaattttagggcacaggtttgctgaagactgtgctgaaaccacctttacagggaaatgatcttttaatttatttccacatctttctctattaaaaaaaaatcaatg

SEQ ID NO: 22109 - DNA, 861 bp, Homo sapiens
  source 1..861: mol_type = unassigned DNA
gaagcgggcgctcttccagcctggagaaggctgcgggtctccatccgtggcgcctcgccagctgcaggacgacgcgggctcttgaggggcagagcagcgcatcatgcaggatcccaatgaagatacagaatggaatgacattttaagagatttcggcattcttcctcctaaagaagagtcaaaagatgaaattgaagaaatggttttacgtttacagaaagaagcaatggtgaaaccatttgaaaagatgactcttgcacagctaaaggaagctgaagatgaatttgatgaagaagatatgcaggctgttgaaacatatagaaagaagcggttacaggaatggaaagctcttaagaaaaaacaaaaatttggagaattaagagaaatttctggaaatcagtatgtgaatgaagtcacaaatgcagaagaagatgtgtgggttataattcatctatacagatcaagcatcccaatgtgtttgttggttaaccagcatcttagtcttctagcaagaaagtttccagaaactaaatttgttaaagccatcgtgaatagctgtattcaacactaccatgacaattgtttaccaacaatttttgtgtataaaaatggtcagatagaagccaaattcattggaattatagaatgtggagggataaatctcaagctggaagaacttgaatggaagctagcagaagttggagcaatacagactgatttggaagaaaaccccagaaaagacatggtagatatgatggtatcttcaattagaaacacttctattcatgatgacagtgatagctccaacagtgataatgataccaaatagagagaaatattcaataaatagcttttagtata

SEQ ID NO: 22110 - DNA, 1337 bp, Homo sapiens
  source 1..1337: mol_type = unassigned DNA
gtctttacaggtttgggccggcagctggaaaaggcacacggccccgggctcctcctccacccagccccacccctcctccgctgaagaccagccctaataaggcagccaccagaattagaaccaggtcaagtgcactccgagcaggacagtaggcagatcctatctggcgcatgcgaacgcttctgtgccagttccttgaagagcaggcgcagactcaaggctgttgcttccgcccttactccccgccgctcgtccctgggcggggcgaaggctgggctgggggaagaggcgtggcggcgctgtgcgcgtgcacaaaagagagctgaggggcgggggcgctgcggcacagctggtttgagcaactgaactggaaacaagatgcaggaccccaacgcagacactgaatggaatgacatcttacgcaaaaagggtatcttaccccccaaggaaagtctgaaagaattggaagaggaggcagaagaggagcagcgcatcctccagcagtcagtggtgaaaacatatgaagatatgactttggaagagctggaggatcatgaagacgagtttaatgaggaggatgaacgtgctattgaaatgtacagacggcggagactggctgagtggaaagcaactaaactgaagaataaattcggagaagttttggagatctcagggaaggattatgttcaagaagttaccaaagctggcgagggcttgtgggtcatcttgcacctttacaaacaaggaattcccctctgtgccctgataaatcagcacctcagtggacttgccaggaagtttcctgatgtcaaatttatcaaagccatttcaacaacctgcatacccaattatcctgataggaatctgcccacgatatttgtttacctggaaggagatatcaaggctcagtttattggtcctctggtgtttggcggcatgaacctgacaagagatgagttggaatggaaactgtctgaatctggagcaattatgacagacctggaggaaaaccctaagaagccgattgaagacgtgttgctgtcctcagtgcggcgctctgtcctcatgaagagggacagcgattccgagggtgactgaggctacagcttctatcacatgccgaactttcttgtgacaaattgtctggattttttaaaaaaggaaaaagcaagaatgaatccttgtggtttttagttttgtataaattatgtttcaaatctttacattttggaaataatcattgctggagattctgttaaatattttggaactctttttttttttaaattatagtatttcctctaaaaaaaattaaaaccagccatttgtatggcaaa

SEQ ID NO: 22111 - DNA, 5597 bp, Homo sapiens
  source 1..5597: mol_type = unassigned DNA
cccgggcgtctccccgcaacctcctcaacttccctagtcagtgacgcggcgccggccagaaatccgaccggaccgggctcgggggagcgtgagttgcagcatgtgccgaagcgccacctcagaagataaaaagaaatgagtctcatatttggcattcttttagttaaaagaagatggatgcacagtgttcagccaaggtcaatgcaaggaagaggagaaaagaggcgcccggacccaacggggcaacagaagaagatggggttccttccaaagtgcagcgctgtgcagtgggcttacggcaaccagctcctttttctgatgaaattgaagttgactttagtaagccctatgtcagggtaactatggaagaagccagcagaggaactccttgtgagcgacctgtgagagtttatgccgatggaatatttgacttatttcactctggtcacgcccgagctctgatgcaagcgaagaaccttttccctaatacgtacctcattgtgggagtttgcagtgatgagctcacacacaacttcaaaggcttcacggtgatgaacgagaatgagcgctatgacgcagtccagcactgccgctacgtggatgaggtggtgaggaatgcgccctggacgctgacacccgagttcctggccgaacaccggattgattttgtagcccatgatgatattccttattcatctgctggcagtgatgatgtttataagcacatcaaggaggcaggcatgtttgctccaacacagaggacagaaggtatctccacatcagacatcatcacccgaattgtgcgggattatgatgtgtatgcgaggcggaacctgcagaggggctacacagcaaaggagctcaatgtcagctttatcaacgagaagaaataccacttgcaggagagggttgacaaagtaaagaagaaagtgaaagatgtggaggaaaagtcaaaagaatttgttcagaaggtggaggaaaaaagcattgacctcattcagaagtgggaggagaagtcccgagaattcattggaagttttctggaaatgtttggtccggaaggagcactgaaacatatgctgaaagaggggaagggccggatgctgcaggccatcagcccgaagcagagccccagcagcagccctactcgcgagcgctccccctccccctctttccgatggcccttctccggcaagacttccccaccttgctccccagcaaatctctccaggcacaaggctgcagcctatgatatcagtgaggatgaagaagactaatgtttcctccctcctttcctgtcctccctttctgtcccattaccttcagaagctctctgttgaattccaaattgtgaccccaacactaaacctaaggacagctacaaaggaaagacaactggggaaagaagacctaggactgggggaacccaaacagcctgtcctgcaagtgacatcactcacccacacgaaggagggggactgcaccttagaagcctgctctgcatccatttacccccccccaagggctttgtttcactgtttatgttcacgtgatctcaacagggaaattgtcattttcattaattttttaaaaaattcgtctttcaaatgtagaactaattttttgcccctgaggagtgggcagaagaaggaggtagtgtaatacgcagaggccttttcttcccggtatactatagcatttgccttccgttctgaagctatgtggcttgccaagtccttcacgaaatgagccacgctgatgggtaatttgtggagaaatatcttaattttgatttccttaaggaaaagcgaaaagcagagttacagtcacaaatcccctgaacgtactgctgtcaccagtgtcattgtggctgcgggaaggagatctgaacctaacttttcttactccctgaggagtttcttgttggacccaatggggtccatgaagacactgatggggatggaagcagacccatggcatcaactgcagtgtttctgctgtgttcatcttctcagaaaactctgtgacccagttctttgggagcttttgtcagtctctttcgtgccatctaccttcgaaggaaggaacacttttagagttacaatgatgaggagaggagcgggacaatactcaatcctataccaagtcgattgagattagtttcctactgggagtaagtgcctggccctgctactcctatttgaatgctattaatattacctagccttttacaaaggatactttgtaaatgtctgctgttggaacttgatgttaatccattttggtcatagccatattagagagatttgcacagaatgtaaaggcaaaagcataggaaacaccttcctttctaaagcaacagccttatcaccttgacctctgtccctcttcagaacattcttccctggaaccagtgctccacatctttcttttcctctgagagctgcagctggcagggacctccctctgctgctcctccagcaagccacagagcataccctcacgtgacaagagtgtggtaggttttctccccacttttcacacacgcctggtggttgtggttccatctgccttgttggcttgcccggggggattcaacacttgactttcaaatcaaagaatgctaatgcttagcacttgctgttgagcatgctctaacttttaaagccctggcctcctgtctccttagctgcttagctacgcggcctagcagatcatcacccatcagtaatcctgtggctagatccaggggaaaattgcttatgtccaggccccacccctgtcactcataaataccccttgtgggggtggaattttagtgttttcagctaagaaaaccacattttctctttccttgcctctgctaggactgtgagcatctcatagtccactccctaaacactttctggtaacacctagttttccgcctgagggtcagaggctagaatcattgcctgcacagcaggactaccttggttcttaaaacttggatcacccaggcaaggcgtggtggctcacgcctgtcatctcagcactttgggagactgaggctggtggatcacttgaggccacgagtttgagaccagcctgaccaacgtggtgaaaccccatctctactaaaaatacaaaaattagccaggcgtggtggtgggcacctgtaatcccagctacttgggaggctgaggcaggagaatcccttgaacccaggaggcggaggttgcagtgagcagagatggtgccgctgcagtccagcctgggtgacagagcgagactctgtctccaaaacaaaacaaaaaccacacacacatacagaaataaagagaaataatcaactagaaaaaaaacaaaacttggatcacccagaaagagcgtcacagaggcgagggagaatgaagcctcttgttatcctgatcgcctatgacaacgacatttctaactcttctttgaagcgcagttcttactcttaaatctggtcatacaagctttggcttggaatcctgtctgtctttgaaacagctgaagttagtgttttcctgtgttacccagtgttacatagtctcatctttgaacttttctgcgtcagccttctctctttgggaatgctgcctgtttctgtctaacttattctccctggtgtggtgtggcagtgaagtctgtgctgaagcccatctgcttggttcctccaagtgcacattatgcaagtgtatttggatagacagggagatgcccggaacgtggttttcctcctccctccctattggagccatacctcctaaatatattgtctgggtcccaaatgtttgagccctcttcctctgctctcagtgggctgctcttggcatgccctgtgcttggaacgggacctgcaggctgacaggcctctgagactgctagggccagcaaacgtacatgttattgggaaactccctttccccttttggtgagcttctaccacctcagtctaatcgttttgactgaaagctatttgtctgactgaaagctaaaatcttttatagtgtggcctgttagatactttggggtaaatgtggtctgaggtgctggactagcacgggtagatggagaaagctgttgggaagttgcataatgtggtcatctgtgcctaattaaatgaggttagaggtgtgcacaccaccacaatgcctgggatctaaatcttcagatattaacgtttgaggctatggagctgtttccctgaatcacacacgagaaagcagtcaacatgggtgggccaaatgtggccaagatgagagagccagaagtgttggccttagagcagagcctctgtgtgtgagacattagaaggccagagccggggaggtgccggcgcagccactgccttccggtgggccggacggaaagcttggtcttatgctagattcagaagcactgaagaatggaggttgacactttagaggactaggaagggatcatttgtgctcttgcagctattgctgatagctagagccaaagaccattatattgctgaggcttgggtaagaaagttagggatgtgaggaggttgaaaatcctgaagaagagaaaaaatatgagggaggctaaggaaacttagccactttctgatcactgatgactccttaggctgcacctgagtgatggtggtgtttttggaggctgtacctgagtgatggtggtttttggggggctgcacctgagcgatagtgatttttttttggaggctgcacagctggtcagaccatctctagatgttctttccacagtggttcatagggcgtcattcccccttcctggattattttgactatgggtagcttattttcaagagctctttgcctttttaatcctgttccagatcacttatccaaaatctttccaaatcaattatattttgctgcttttctttaattccctaaaagccatagcttctagattttctatcagcacacattctcaccagaagttgaaccaatacaggtagaaaaagaaagcccccttaatgtttttaactgatgatatttttttaagcttaccaatataagtatttttaaaggttctatttttcaaagtcataacaatgattgttcttgttttctctcatagaatagactgccatcggataaagagtggtccctagcttctatttttccaagtaaataagtagaacatgttcttgggattataccattaaatgttaattttcttgaagaagaaagattgttgtctgccaagattttatgttagcgctcggattgaggcagaaaacggaagcaccaggtttaacactgggatgacttgggttgtgttcctggaggtttgaagtgggccttcccgccttttgagggggaaaactgactgttttgaacacatatcctggattagttgggttgttttgtattgaggatccctaaaagacaaaagagtcttggaaaggactgctggcttcgtcttgaacgttcgccccatcaccagtgtgagtccgtggggaagtcttcctcaagtggggttcagtctgtaattttcctgtctgttcttagtttgttctgagttattttggattttgttctttagccaaataaaggcagtgtggttttacctga

SEQ ID NO: 22112 - DNA, 1084 bp, Homo sapiens
  source 1..1084: mol_type = unassigned DNA
atcagctgccttccccgggcgtctccccgcaacctcctcaacttccctagtcagtgacgcggcgccggccagaaatccgaccggaccgggctcgggggagcgtgagttgcaggtgtgtgcctatctttgcgtctctgtttgagaggacaaactgtggggctgggaccgcgaggtgactgtgactgaggaagagtgttaaaagaagatggatgcacagtgttcagccaaggtcaatgcaaggaagaggagaaaagaggcgcccggacccaacggggcaacagaagaagatggggttccttccaaagtgcagcgctgtgcagtgggcttacggcaaccagctcctttttctgatgaaattgaagttgactttagtaagccctatgtcagggtaactatggaagaagccagcagaggaactccttgtgagcgacctgtgagagtttatgccgatggaatatttgacttatttcactctggtcacgcccgagctctgatgcaagcgaagaaccttttccctaatacgtacctcattgtgggagtttgcagtgatgagctcacacacaacttcaaaggcttcacggtgatgaacgagaatgagcgctatgacgcagtccagcactgccgctacgtggatgaggtggtgaggaatgcgccctggacgctgacacccgagttcctggccgaacaccggattgattttgtagcccatgatgatattccttattcatctgctggcagtgatgatgtttataagcacatcaaggaggcaggcatgtttgctccaacacagaggacagaaggtatctccacatcagacatcatcacccgaattgtgcgggattatgatgtgtatgcgaggcggaacctgcagaggggctacacagcaaaggagctcaatgtcagctttatcaacgagaagaaataccacttgcaggagagggttgacaaagtaaagaagaaagtgaaagatgtggaggaaaagtcaaaagaatttgttcagaaggtggaggaaaaaagcattgacctcattcagaagtgggaggagaagtcccgagaattcattggaagttttctggaaatgttt

SEQ ID NO: 22113 - DNA, 499 bp, Homo sapiens
  source 1..499: mol_type = unassigned DNA
gcggccgcgaggggactccgacccagagcagtgacttcgaggggctgacttggagaagaggatggcatccgtgatgggcgatggcgctttaaaagaagatggatgcacagtgttcagccaaggtcaatgcaaggaagaggagaaaagaggcgcccggacccaacggggcaacagaagaagatggggttccttccaaagtgcagcgctgtgcagtgggcttacggcaaccagctcctttttctgatgaaattgaagttgactttagtaagccctatgtcagggtaactatggaagaagccagcagaggaactccttgtgagcgacctgtgagagtttatgccgatggaatatttgacttatttcactctggtcacgcccgagctctgatgcaagcgaagaaccttttccctaatacgtacctcattgtgggagtttgcagtgatgagctcacacacaacttcaaaggcttcacggtgatgaacgagaatgagcgctatga

SEQ ID NO: 22114 - DNA, 1598 bp, Homo sapiens
  source 1..1598: mol_type = unassigned DNA
atcagctgccttccccgggcgtctccccgcaacctcctcaacttccctagtcagtgacgcggcgccggccagaaatccgaccggaccgggctcgggggagcgtgagttgcagttaaaagaagatggatgcacagtgttcagccaaggtcaatgcaaggaagaggagaaaagaggcgcccggacccaacggggcaacagaagaagccagcagaggaactccttgtgagcgacctgtgagagtttatgccgatggaatatttgacttatttcactctggtcacgcccgagctctgatgcaagcgaagaaccttttccctaatacgtacctcattgtgggagtttgcagtgatgagctcacacacaacttcaaaggcttcacggtgatgaacgagaatgagcgctatgacgcagtccagcactgccgctacgtggatgaggtggtgaggaatgcgccctggacgctgacacccgagttcctggccgaacaccggattgattttgtagcccatgatgatattccttattcatctgctggcagtgatgatgtttataagcacatcaaggaggcaggcatgtttgctccaacacagaggacagaaggtatctccacatcagacatcatcacccgaattgtgcgggattatgatgtgtatgcgaggcggaacctgcagaggggctacacagcaaaggagctcaatgtcagctttatcaacgagaagaaataccacttgcaggagagggttgacaaagtaaagaagaaagtgaaagatgtggaggaaaagtcaaaagaatttgttcagaaggtggaggaaaaaagcattgacctcattcagaagtgggaggagaagtcccgagaattcattggaagttttctggaaatgtttggtccggaaggagcactgaaacatatgctgaaagaggggaagggccggatgctgcaggccatcagcccgaagcagagccccagcagcagccctactcgcgagcgctccccctccccctctttccgatggcccttctccggcaagacttccccaccttgctccccagcaaatctctccaggcacaaggctgcagcctatgatatcagtgaggatgaagaagactaatgtttcctccctcctttcctgtcctccctttctgtcccattaccttcagaagctctctgttgaattccaaattgtgaccccaacactaaacctaaggacagctacaaaggaaagacaactggggaaagaagacctaggactgggggaacccaaacagcctgtcctgcaagtgacatcactcacccacacgaaggagggggactgcaccttagaagcctgctctgcatccatttacccccccccaagggctttgtttcactgtttatgttcacgtgatctcaacagggaaattgtcattttcattaattttttaaaaaattcgtctttcaaatgtagaactaattttttgcccctgaggagtgggcagaagaaggaggtagtgtaatacgcagaggccttttcttcccggtatactatagcatttgccttccgttctgaagctatgtggcttgccaagtccttcacgaaatgagccacgctgatgggtaa

SEQ ID NO: 22115 - DNA, 1482 bp, Homo sapiens
  source 1..1482: mol_type = unassigned DNA
atcccgggggcctctgaggaggcggaactactgtgtcaggagtcgtggttttcaaggagaagtcgtggtcggattgacagaggtaggggaagtaggcggaacttccggctggctcttccatcagctgccttccccgggcgtctccccgcaacctcctcaacttccctagtcagtgacgcggcgccggccagaaatccgaccggaccgggctcgggggagcgtgagttgcagttaaaagaagatggatgcacagtgttcagccaaggtcaatgcaaggaagaggagaaaagaggcgcccggacccaacggggcaacagaagaagatggggttccttccaaagtgcagcgctgtgcagtgggcttacggcaaccagctcctttttctgatgaaattgaagttgactttagtaagccctatgtcagggtaactatggaagaagccagcagaggaactccttgtgagcgacctgtgagagtttatgccgatggaatatttgacttatttcactctggtcacgcccgagctctgatgcaagcgaagaaccttttccctaatacgtacctcattgtgggagtttgcagtgatgagctcacacacaacttcaaaggcttcacggtgatgaacgagaatgagcgctatgacgcagtccagcactgccgctacgtggatgaggtggtgaggaatgcgccctggacgctgacacccgagttcctggccgaacaccggattgattttgtagcccatgatgatattccttattcatctgctggcagtgatgatgtttataagcacatcaaggaggcaggcatgtttgctccaacacagaggacagaaggtatctccacatcagacatcatcacccgaattgtgcgggattatgatgtgtatgcgaggcggaacctgcagaggggctacacagcaaaggagctcaatgtcagctttatcaacgagaagaaataccacttgcaggagagggttgacaaagtaaagaagaaagtgaaagatgtggaggaaaagtcaaaagaatttgttcagaaggtggaggaaaaaagcattgacctcattcagaagtgggaggagaagtcccgagaattcattggaagttttctggaaatgtttggtccggaaggagcactgaaacatatgctgaaagaggggaagggccggatgctgcaggccatcagcccgaagcagagccccagcagcagccctactcgcgagcgctccccctccccctctttccgatggcccttctccggcaagacttccccaccttgctccccagcaaatctctccaggcacaaggctgcagcctatgatatcagtgaggatgaagaagactaatgtttcctccctcctttcctgtcctccctttctgtcccattaccttcagaagctctctgttgaattccaaattgtgaccccaacactaaacctaaggacagctacaaaggaaagacaactggggaaagaagacctag

SEQ ID NO: 22116 - DNA, 549 bp, Homo sapiens
  source 1..549: mol_type = unassigned DNA
acatccgtatcccacttcaaggagacgtcttcgctgcatcctccggttccgggtggaggctgaccctgggccattccgtctccggtctctggtatttctgctgggtcacttcatcccgggggcctctgaggaggcggaactactgtgtcaggagtcgtggttttcaaggagaagtcgtggtcggattgacagagttaaaagaagatggatgcacagtgttcagccaaggtcaatgcaaggaagaggagaaaagaggcgcccggacccaacggggcaacagaagaagatggggttccttccaaagtgcagcgctgtgcagtgggcttacggcaaccagctcctttttctgatgaaattgaagttgactttagtaagccctatgtcagggtaactatggaagaagccagcagaggaactccttgtgagcgacctgtgagagtttatgccgatggaatatttgacttatttcactctggtcacgcccgagctctgatgcaagcgaagaaccttttccctaatacgtacctcattgtgggagtttgcagtgat

SEQ ID NO: 22117 - DNA, 6172 bp, Homo sapiens
  source 1..6172: mol_type = unassigned DNA
aagggactcacacactgaaagaatatctttgatgaagacaattcaggcaagcagaatgattcttgcaacagaattacatgattaattgagatcttgaagtgggtccggtgaatcctggccacctaacttatcatgatttgggggagtttcacgagaatccagttttgataaaacaattgtttttttcctccccaagtgactatacatttaaatagctaaaacatctgttcagcaacatagtaaaacatatatactcggaacgcttgagagaagagcctgccaaacagggactttgctgagggagagcaccaagataaagcaacactgtttgttttgtctagtcagggggaaagccaaggcaaccaatattttggtttttataattttcatttgtgaagaattatttgagaaagggtggcgaggggagatttcctgacggcagtttcttaagctgtccattagtagaagagcaagaaagccttggatgtcaacgcctcgctcttgagaccagccaccaaaccacgaaaagtgactttcttctcgtgtgctctctacggcccttctgatggaagcagaaacagggagcagcgtggagactggaaagaaggccaacagaggcactcgaattgccctggtcgtgtttgtcggtggcaccctagttctgggcacgatcctctttctagtgagtcaaggtctcttaagtctccaagctaaacaggagtactgcctgaagccagaatgcatcgaagcggctgctgccatcttaagtaaagtaaatctgtctgtggatccttgtgataatttcttccggttcgcttgtgatggctggataagcaataatccaattcccgaagatatgccaagctatggggtttatccttggctgagacataatgttgacctcaagttgaaggaacttttggagaaatcaatcagtagaaggcgggacaccgaagccatacagaaagccaaaatcctttattcatcctgcatgaatgagaaagcgattgaaaaagcagatgccaagccactgctacacatcctacggcattcacctttccgctggcccgtgcttgaatctaatattggccctgaaggggtttggtcagagagaaagttcagccttctgcagacacttgcaacgtttcgtggtcaatacagcaattctgtgttcatccgtttgtatgtgtcccctgatgacaaagcatccaatgaacatatcttgaagctggaccaagcaacactctccctggccgtgagggaagactaccttgataacagtacagaagccaagtcttatcgggatgccctttacaagttcatggtggatactgccgtgcttttaggagctaacagttccagagcagagcatgacatgaagtcagtgctcagattggaaattaagatagctgagataatgattccacatgaaaaccgaaccagcgaggccatgtacaacaaaatgaacatttctgaactgagtgctatgattccccagttcgactggctgggctacatcaagaaggtcattgacaccagactctacccccatctgaaagacatcagcccctccgagaatgtggtggtccgcgtcccgcagtactttaaagatttgtttaggatattagggtctgagagaaagaagaccattgccaactatttggtgtggagaatggtttattccagaattccaaaccttagcaggcgctttcagtatagatggctggaattctcaagggtaatccaggggaccacaactttgctgcctcaatgggacaaatgtgtaaactttattgaaagtgccctcccttatgttgttggaaagatgtttgtagatgtgtacttccaggaagataagaaggaaatgatggaggaattggttgagggcgttcgctgggcctttattgacatgctagagaaagaaaatgagtggatggatgcaggaacgaaaaggaaagccaaagaaaaggcgagagctgttttggcaaaagttggctatccagagtttataatgaatgatactcatgttaatgaagacctcaaagctatcaagttttcagaagccgactactttggcaacgtcctacaaactcgcaagtatttagcacagtctgatttcttctggctaagaaaagccgttccaaaaacagagtggtttacaaatccgacgactgtcaatgccttctacagtgcatccaccaaccagatccgatttccagcaggagagctccagaagcctttcttttggggaacagaatatcctcgatctctgagttatggtgctataggagtaattgtcggacatgaatttacacatggatttgataataatggtagaaaatatgataaaaatggaaacctggatccttggtggtctactgaatcagaagaaaagtttaaggaaaaaacaaaatgcatgattaaccagtatagcaactattattggaagaaagctggcttaaatgtcaaggggaagaggaccctgggagaaaatattgctgataatggaggcctgcgggaagcttttagggcttacaggaaatggataaatgacagaaggcagggacttgaggagcctcttctaccaggcatcacattcaccaacaaccagctcttcttcctgagttatgctcatgtgaggtgcaattcctacagaccagaagctgcccgagaacaagtccaaattggtgctcacagtccccctcagtttagggtcaatggtgcaattagtaactttgaagaattccagaaagcttttaactgtccacccaattccacgatgaacagaggcatggactcctgccgactctggtagctgggacgctggtttatggcatcctgagacagttgcacagtgccagcggaggctgcactgagccttcatcgcccattgctttaggcctggagactttcatttttagtgcattttcattatttgggtaggtgacctgcttggatctagacagcatctgttcaaagttgtagggcttataaagtggaatataagaatgaactaagtatgtttctttagaaaatcaaaccaacaaaaataaatccctaggctacttttgttaaaatgctatctgctaaattgttgctattgtccattttagggtgttggccacagttatgtggtacatagcatttcaatctatagctttgtgggaagcctaaattgatgtatcctttaaaagttcaatctattaaacttgtagcctctcaatgatgaagacatgtgcatgaatacctgggagggcttgctgctctgtggaatgcagtgcacgtttttatggacagtaattacacagcattcctcaactgtaaggtagttaaattagaaatatgtttgatctccattttacactttttgatgaagttcttgccttcagctttggagtctgttggaatgaaactgtgtctcacagcttgcatctgatgtagcagattgccctgttcaagtcagcatgaacaaagctcgcagaaaggctactaggtaacggatttgagtttattcagtagaaaaaaagggaatgaggacatatctttaggtcccagaagcagcaaaacctcctagttacataacagcagggaaactaggagatgaaatctccaaaattttgtccagtctgtatgaactgcagtgattgtctgtctgctagacacttttttttagcctaattcttgttcgtttcattaccttcatatgtgtgcattgtactggttttgaaatgagcagacattgagaaaacaattttctgattccccattaggaacatatgattttcatttccctttagtgcaaaggaacaaacatcacattgaggagggagaagtgtacccttctttttcagcttaatgttacctctctttaaaaaaaaaacatttttgaaaaatttcttgactgatgacattctagaatttattgattcaatttaaaattccctgcatagtccaaataaacataatttttactcttcaagtcatctaaagagttgtgagaaagagcagtactatgtgttttatccttagagcattatccttctaagtgaactcctttcttattactgagcgtgtgtgtgtgtgtgtgtgtgtgtgtgtgtgtaggataaaattgtaatggccttaaagttgttacctggcatttttggtttcttaaaataggcatccccctactccctttacattattcattagacatgaggtgctgggttaagtgggccaataggaaaatctcaaaagcaaaatgacaaattcagattaaccacaggaagccattgtgtgtccctgtgatttgtgattcttttaaaaaaaaaaaaaatatatatatatatatatatatatatatatatgtatatctacctaagtgtgtgccatgtccttttgtagccatgggaacgtttgaatggagaaaaatggaggggcaccatcatgaggaaacaattatactgcattagtcagaggagagcgattttccctttgacttcttcctctctgaatggataaacttgtgaagggcagctaccttgtcctcctcttaacctggcttaatgtgaccttagtttgtatttccaaaaacaagcagtattaggttggaattgtatgtgtcttttctctggaggaagcattctgacttggtttagacatataagatactctgttttattcctggacttgggtgtttaaaatcagctgaggtttatcatgcttatatgaatagtgtttcccttctagatttcctttataaactccaaataaacacattcctgcaggtcagagaaagtgtttgataaaagcatagaattatggctttggaaagacaaactaagtcacttgttggtttagcaaaactggttggtgattagttggggccctcacagtttctagatgagaagcttaccttatcctgattaactttacttgctgtaactgttataccgaaaattgtaggtaggatgtccattactcaaacaaagcagaacaaaacaacaaaccaaaagcagcaataccaaatcatcactactagctagaacaatgagaaggattgaatttccaaatacatgcttatgtttaactcaactcttccaattacattctcattgtcctttctcttggataccgattgctaagataaacagacactgattaagtggtagaaagagaaaggtaaaatgcaactggaagggaaagaaaaaagtagggagaagctggcctatggatgtggctttgaagagaagacaggattttggcattccttgctaagcacgttcaatggaggagagccatgaagttttacaaaaataattatggtaaattaaaaggatattagatattggatctcagactagggctgctataatacagttctctgattcgcacaccagatgttctgccagcgaactgttgtctgggcattggaaggagttaggttttttgtgtttgtgaaaatctcctggattagtaaaaaaattttctagatataaagtggttttatttgggctcatgaccattgcccaaagtgtactgagcttttcactaagtgctcagcattggcctcctgttctcatttattcattttatgagatggacttggacatcactaatgcaaacacaggattcataaattattctgaagtttatttagtgccttgcctcaatggagcttaaagcatagcacataaattttatcttatttagccctggagcatcactaagaagcagctaggaactatggcttgccagacagattatgcttgtgccagagaagtggagaagcctgaaatcccttgtcaagtattccacaggaaggaaaggtagtctttgggctttggtctactgacctgtggattaaactctatcccttagattatcccatttctaaatacatttattcaatcagtatttctataatcacttagcatttgataggcttcttccttgatacatttaacataacgcctcagttgcatattacattatggaagaatatacgattgcttcatataacaacattctcatcaccagtgacagtgtcctactggtttgaagaaagatattcttggattatgtgttttatatctaaatggttattctgagactggttgtattttcttctcctactcgtgaaacgatgtgaacaagcattttaaggacaataaaaagttagctggttgaa

SEQ ID NO: 22118 - DNA, 1788 bp, Homo sapiens
  source 1..1788: mol_type = unassigned DNA
accatatggtgttttaggtaggatagggatgctctgaagaatggaggcatgttactttctgtgtttttatttgtttttttttgagacacagtcttgctgtgtcatccaggctggggtgcagtggtgtgatcttggctcattgcaacctctgcctcccgggttcaagtgattctcctgccttagcctctcgagtagctgggattacaggtgccggccaccacacctagctaatttttgtatttttgatagagatgggattggccaggctggtctcaaactcctgacctcaaatgatccacctgcctcggcctcccaaagtgctgggattacagttcgactggctgggctacatcaagaaggtcattgacaccagactctacccccatctgaaagacatcagcccctccgagaatgtggtggtccgcgtcccgcagtactttaaagatttgtttaggatattagggtctgagagaaagaagaccattgccaactatttggtgtggagaatggtttattccagaattccaaaccttagcaggcgctttcagtatagatggctggaattctcaagggtaatccaggggaccacaactttgctgcctcaatgggacaaatgtgtaaactttattgaaagtgccctcccttatgttgttggaaagatgtttgtagatgtgtacttccaggaagataagaaggaaatgatggaggaattggttgagggcgttcgctgggcctttattgacatgctagagaaagaaaatgagtggatggatgcaggaacgaaaaggaaagccaaagaaaaggcgagagctgttttggcaaaagttggctatccagagtttataatgaatgatactcatgttaatgaagacctcaaagctatcaagttttcagaagccgactactttggcaacgtcctacaaactcgcaagtatttagcacagtctgatttcttctggctaagaaaagccgttccaaaaacagagtggtttacaaatccgacgactgtcaatgccttctacagtgcatccaccaaccagatccgatttccagcaggagagctccagaagcctttcttttggggaacagaatatcctcgatctctgagttatggtgctataggagtaattgtcggacatgaatttacacatggatttgataataatggtagaaaatatgataaaaatggaaacctggatccttggtggtctactgaatcagaagaaaagtttaaggaaaaaacaaaatgcatgattaaccagtatagcaactattattggaagaaagctggcttaaatgtcaaggggaagaggaccctgggagaaaatattgctgataatggaggcctgcgggaagcttttagggcttacaggaaatggataaatgacagaaggcagggacttgaggagcctcttctaccaggcatcacattcaccaacaaccagctcttcttcctgagttatgctcatgtgaggtgcaattcctacagaccagaagctgcccgagaacaagtccaaattggtgctcacagtccccctcagtttagggtcaatggtgcaattagtaactttgaagaattccagaaagcttttaactgtccacccaattccacgatgaacagaggcatggactcctgccgactctggtagctgggacgctggtttatggcatcctgagacagttgcacagtgccagcggaggctgcactgagccttcatcgcccattgctttaggcctggagactttcatttttagtgcattttcattatttgggtaggtgacctgctt

SEQ ID NO: 22119 - DNA, 2891 bp, Homo sapiens
  source 1..2891: mol_type = unassigned DNA
atatttgagcatgtatcggaatcacctggggggcttgttaaaccgcagatggctgggccccacccccagggtttctgagtcaagatcttggagtggctttctaacaagcttccaggtgcagcagcagcagctgctgctgctctagagaccacactcttaggagctctggtctagttatactcacttatcttacgtacgagagaactgagtttcaaagcaaccaagagtcttaccaaggttatttagctagcagctagagtctggtttcgtgacattgaaccaactgggttttggaataccgtgtcaacactgagaaggatgaactgatatcaaatatcttgcgtatgtttccgagggtggtttaccggatggtggtctgctacaactcagccatttattgtggtctgttttttcagtgagtcaaggtctcttaagtctccaagctaaacaggagtactgcctgaagccagaatgcatcgaagcggctgctgccatcttaagtaaagtaaatctgtctgtggatccttgtgataatttcttccggttcgcttgtgatggctggataagcaataatccaattcccgaagatatgccaagctatggggtttatccttggctgagacataatgttgacctcaagttgaaggaacttttggagaaatcaatcagtagaaggcgggacaccgaagccatacagaaagccaaaatcctttattcatcctgcatgaatgagaaagcgattgaaaaagcagatgccaagccactgctacacatcctacggcattcacctttccgctggcccgtgcttgaatctaatattggccctgaaggggtttggtcagagagaaagttcagccttctgcagacacttgcaacgtttcgtggtcaatacagcaattctgtgttcatccgtttgtatgtgtcccctgatgacaaagcatccaatgaacatatcttgaagctggaccaagcaacactctccctggccgtgagggaagactaccttgataacagtacagaagccaagtcttatcgggatgccctttacaagttcatggtggatactgccgtgcttttaggagctaacagttccagagcagagcatgacatgaagtcagtgctcagattggaaattaagatagctgagataatgattccacatgaaaaccgaaccagcgaggccatgtacaacaaaatgaacatttctgaactgagtgctatgattccccagttcgactggctgggctacatcaagaaggtcattgacaccagactctacccccatctgaaagacatcagcccctccgagaatgtggtggtccgcgtcccgcagtactttaaagatttgtttaggatattagggtctgagagaaagaagaccattgccaactatttggtgtggagaatggtttattccagaattccaaaccttagcaggcgctttcagtatagatggctggaattctcaagggtaatccaggggaccacaactttgctgcctcaatgggacaaatgtgtaaactttattgaaagtgccctcccttatgttgttggaaagatgtttgtagatgtgtacttccaggaagataagaaggaaatgatggaggaattggttgagggcgttcgctgggcctttattgacatgctagagaaagaaaatgagtggatggatgcaggaacgaaaaggaaagccaaagaaaaggcgagagctgttttggcaaaagttggctatccagagtttataatgaatgatactcatgttaatgaagacctcaaagctatcaagttttcagaagccgactactttggcaacgtcctacaaactcgcaagtatttagcacagtctgatttcttctggctaagaaaagccgttccaaaaacagagtggtttacaaatccgacgactgtcaatgccttctacagtgcatccaccaaccagatccgatttccagcaggagagctccagaagcctttcttttggggaacagaatatcctcgatctctgagttatggtgctataggagtaattgtcggacatgaatttacacatggatttgataataatggtagaaaatatgataaaaatggaaacctggatccttggtggtctactgaatcagaagaaaagtttaaggaaaaaacaaaatgcatgattaaccagtatagcaactattattggaagaaagctggcttaaatgtcaaggggaagaggaccctgggagaaaatattgctgataatggaggcctgcgggaagcttttagggcttacaggaaatggataaatgacagaaggcagggacttgaggagcctcttctaccaggcatcacattcaccaacaaccagctcttcttcctgagttatgctcatgtgaggtgcaattcctacagaccagaagctgcccgagaacaagtccaaattggtgctcacagtccccctcagtttagggtcaatggtgcaattagtaactttgaagaattccagaaagcttttaactgtccacccaattccacgatgaacagaggcatggactcctgccgactctggtagctgggacgctggtttatggcatcctgagacagttgcacagtgccagcggaggctgcactgagccttcatcgcccattgctttaggcctggagactttcatttttagtgcattttcattatttgggtaggtgacctgcttggatctagacagcatctgttcaaagttgtagggcttataaagtggaatataagaatgaactaagtatgtttctttagaaaatcaaaccaacaaaaataaatccctaggctacttttgttaaaatgctatctgctaaattgttgctattgtccattttagggtgttggccacagttatgtggtacatagcatttcaatctatagc

SEQ ID NO: 22120 - DNA, 2511 bp, Homo sapiens
  source 1..2511: mol_type = unassigned DNA
attagtagaagagcaagaaagccttggatgtcaacgcctcgctcttgagaccagccaccaaaccacgaaaagtgactttcttctcgtgtgctctctacggcccttctgatggaagcagaaacagggagcagcgtggagactggaaagaaggccaacagaggcactcgaattgccctggtcgtgtttgtcggtggcaccctagttctgggcacgatcctctttctagtgagtcaaggtctcttaagtctccaagctaaacaggagtactgcctgaagccagaatgcatcgaagcggctgctgccatcttaagtaaagtaaatctgtctgtggatccttgtgataatttcttccggttcgcttgtgatggctggataagcaataatccaattcccgaagatatgccaagctatggggtttatccttggctgagacataatgttgacctcaagttgaaggaacttttggagaaatcaatcagtagaaggcgggacaccgaagccatacagaaagccaaaatcctttattcatcctgcatgaatgagaaagcgattgaaaaagcagatgccaagccactgctacacatcctacggcattcacctttccgctggcccgtgcttgaatctaatattggccctgaaggggtttggtcagagagaaagttcagccttctgcagacacttgcaacgtttcgtggtcaatacagcaattctgtgttcatccgtttgtatgtgtcccctgatgacaaagcatccaatgaacatatcttgaagctggaccaagcaacactctccctggccgtgagggaagactaccttgataacagtacagaagccaagtcttatcgggatgccctttacaagttcatggtggatactgccgtgcttttaggagctaacagttccagagcagagcatgacatgaagtcagtgctcagattggaaattaagatagctgagataatgattccacatgaaaaccgaaccagcgaggccatgtacaacaaaatgaacatttctgaactgagtgctatgattccccagttcgactggctgggctacatcaagaaggtcattgacaccagactctacccccatctgaaagacatcagcccctccgagaatgtggtggtccgcgtcccgcagtactttaaagatttgtttaggatattagggtctgagagaaagaagaccattgccaactatttggtgtggagaatggtttattccagaattccaaaccttagcaggcgctttcagtatagatggctggaattctcaagggtaatccaggggaccacaactttgctgcctcaatgggacaaatgtgtaaactttattgaaagtgccctcccttatgttgttggaaagatgtttgtagatgtgtacttccaggaagataagaaggaaatgatggaggaattggttgagggcgttcgctgggcctttattgacatgctagagaaagaaaatgagtggatggatgcaggaacgaaaaggaaagccaaagaaaaggcgagagctgttttggcaaaagttggctatccagagtttataatgaatgatactcatgttaatgaagacctcaaagctatcaagttttcagaagccgactactttggcaacgtcctacaaactcgcaagtatttagcacagtctgatttcttctggctaagaaaagccgttccaaaaacagagtggtttacaaatccgacgactgtcaatgccttctacagtgcatccaccaaccagatccgatttccagcaggagagctccagaagcctttcttttggggaacagaatatcctcgatctctgagttatggtgctataggagtaattgtcggacatgaatttacacatggatttgataataatggtagaaaatatgataaaaatggaaacctggatccttggtggtctactgaatcagaagaaaagtttaaggaaaaaacaaaatgcatgattaaccagtatagcaactattattggaagaaagctggcttaaatgtcaaggggaagaggaccctgggagaaaatattgctgataatggaggcctgcgggaagcttttagggcttacaggaaatggataaatgacagaaggcagggacttgaggagcctcttctaccaggcatcacattcaccaacaaccagctcttcttcctgagttatgctcatggtcaatggtgcaattagtaactttgaagaattccagaaagcttttaactgtccacccaattccacgatgaacagaggcatggactcctgccgactctggtagctgggacgctggtttatggcatcctgagacagttgcacagtgccagcggaggctgcactgagccttcatcgcccattgctttaggcctggagactttcatttttagtgcattttcattatttgggtaggtgacctgcttggatctagacagcatctgttcaaagttgtagggcttataaagtggaatataagaatgaactaagtatgtttctttagaaaatcaaaccaac

SEQ ID NO: 22121 - DNA, 2959 bp, Homo sapiens
  source 1..2959: mol_type = unassigned DNA
cggaagcggaagaggctgcagggccgggaagcctctgtttggtccggccaggtcccgggatccgggccgccagctgcgatgccaagtccccggaggagcatggagggacggccgctgggcgtctccgcttcgagcagcagcagcagccccggcagcccagcccatggcggcggtggcggcggcagcaggtttgagttccagtccctgctcagcagccgcgccacggccgtggaccccacctgcgcccggctccgtgcatcggagagcccagttcaccgccgcggctccttccccctggccgcggcgggcccctcgcagtcgcccgcgcctccgctgcccgaggaggaccgcatggacttgaacccgtccttcctgggcatcgccctgcgctccctgctggccatcgacctgtggctgtccaagaagctgggggtgtgcgcgggagagagctcgtcgtggggcagcgtgcgaccccttatgaagctgctggagatctcgggacacggcatcccctggctgctgggcaccctctactgcctgtgcaggagcgacagctgggccgggcgcgaggtgctgatgaacctgctcttcgccctgctgttggacctgctgctggtggccttgatcaaagggctggtccgcaggcgccgcccggcccacaaccagatggacatgtttgtcactctctcggtggacaagtactccttcccctcgggccatgccacaagggccgccctgatgtcgaggttcatcctgaaccacctggtgctggccattccactgagggtgctggtggttctgtgggccttcgtcttgggcctatccagggtcatgctggggcggcacaatgtcaccgacgtagcttttggcttttttctgggctacatgcagtacagcatcgtggactattgctggctctcaccccataatgctccggtcctctttttactgtggagtcaacgatgacaccatctcattgattatggcaccaggaagtctgaaggtttccacattcgatgatgtcaacctaaaccagcagccatcccgcttgtccctcttaggcatttcaggcttcctttgggatttcaggtgtcccatgatcttgatgtgctgctaggctggagcacacactggccattactgaacacagccatattagggaaagcaaaaaaacccaaaaaatcctctattgtatatttattcaacaactgtttatgtttccaggacaactgcaaagaaaacaagctgaggtggttatactgttgctgttaaaagttggtatcagtaagatttgtgttttgtgataatccctaaatcaacataccacttgtaaactgaacttcgagaaagaaacatgatgttcattctgtaaatatacatgcagacaggtcatgtactaatcctagtccttttcctgaggtagattttaaacagtatttttaaagtccaagacataggtttttctagtttattccctgaagatctgttgccacagttgggagatttcttcttaatcctgattttcttggtaagcttttttactttattatctctataatttattatctctatccatatttgtggatcgggtagtgggaaaagagattataatacttgtctttctctcctctccctccatccctcaaaagatctttatgcatttcccactactcccttactgtcttttagcattcagagaaaaagccaacttgcttaaagaggaatcacttaaaaggtaggcatatctaagatgctcatagaagaggaagaatgggacatggccccatgcttatttttgtttacaacgtaacatggcatgagagagggcagagaaactaagttgctggggaaagttagaggaactgaaagtttgggaataggctgaccacatattatgccagtgaccagtatgacaggagatggggccctgctgccagtcatctccactgaataaagaataatgctcctctttcagggtaataaagtggggaaaaggaacgtcttctcaatgcaagaacataagctttctcgtatatacctgtatgctacagtttttcacatggaattccgttttctgaggtacagcacattttaggtaacagtatttaacttgaaattcatcatgggagtctgctgctataccaggcacaagataaaactccaaaatttctgtttacattgacctttacatttaaagctgttcatccatggtgcctccccaaatcataagaccaaagaccaccaaacgcagggtggactctgctcattattctttgacccagaaagactggagaaggtatgtgctttaagtgctgctctacctgaaaagaaatcctttaaattacctatggaagtgatgtcctcagataatcttaatgactattttggcatttataaatagaaatgattatggactttgatctgccatacggaggttcggaacctggagaacggctgtgataagtaggttttgattgagtgaaagcatgagcttgttcagagtgaggggcatagtgaaaaaggaacagccatgcctcaaaatcaaatcatttgcattcccacagcatcctgaataccgactacctcttcacttgctaaagcagctaaactgtgaagctctaagtggtttgggtttgttgtttaaccttagcgagatcctttaactgcagcaatattcaagccagatatttggaagcaaatgatatttcctcttgcagtgtccacaaatctgaatattaggggcatgaaattaggcttaccatctgatttgtaattacaattttggaattctctgttttagttgctgaggcctgagttttctggctcttaaagcatagatcatttcacctgatgtttttgaagcatcctaagtacagtagagtagaaaactgatttctttgttaattgtacactgaataatgccttttaaaaatcaaaataaaattaacaaataatggtg

SEQ ID NO: 22122 - DNA, 1082 bp, Homo sapiens
  source 1..1082: mol_type = unassigned DNA
agcggaagaggctgcagggccgggaagcctctgtttggtccggccaggtcccgggatccgggccgccagctgcgatgccaagtccccgcttcgagcagcagcagcagccccggcagcccagcccatggcggcggtggcggcggcagcaggtttgagttccagtccctgctcagcagccgcgccacggccgtggaccccacctgcgcccggctccgtgcatcggagagcccagttcaccgccgcggctccttccccctggccgcggcgggcccctcgcagtcgcccgcgcctccgctgcccgaggaggaccgcatggacttgaacccgtccttcctgggcatcgccctgcgctccctgctggccatcgacctgtggctgtccaagaagctgggggtgtgcgcgggagagagctcgtcgtggggcagcgtgcgaccccttatgaagctgctggagatctcgggacacggcatcccctggctgctgggcaccctctactgcctgtgcaggagcgacagctgggccgggcgcgaggtgctgatgaacctgctcttcgccctgctgttggacctgctgctggtggccttgatcaaagggctggtccgcaggcgccgcccggcccacaaccagatggacatgtttgtcactctctcggtggacaagtactccttcccctcgggccatgccacaagggccgccctgatgtcgaggttcatcctgaaccacctggtgctggccattccactgagggtgctggtggttctgtgggccttcgtcttgggcctatccagggtcatgctggggcggcacaatgtcaccgacgtagcttttggcttttttctgggctacatgcagtacagcatcgtggactattgctggctctcaccccataatgctccggtcctctttttactgtggagtcaacgatgacaccatctcattgattatggcaccaggaagtctgaaggtttccacattcgatgatgtcaacctaaaccagcagccatcccgcttgtccctcttaggcatttcaggcttcctttgggatttcaggtgtcccatgatcttgatgtgctgctaggctg

SEQ ID NO: 22123 - DNA, 2041 bp, Homo sapiens
  source 1..2041: mol_type = unassigned DNA
cgctggggcagccggggcagccggggcagcccggtcaccccgcccccaggcccacactaagggtgtccgcggcctgccctccaggcggaggagcccggactgcggaaggatggagctggccgccggaagcttctcggaggagcagttctgggaggcctgcgccgagctccagcagcccgctctggccggggccgactggcagctcctagtggagacctcgggcatcagcatctaccggctgctggacaagaagactggactttatgagtataaagtctttggtgttctggaggactgctcaccaactctactggcagacatctatatggactcagattacagaaaacaatgggaccagtatgttaaagaactctatgaacaagaatgcaacggagagactgtggtctactgggaagtgaagtacccttttcccatgtccaacagagactatgtctaccttcggcagcggcgagacctggacatggaagggaggaagatccatgtgatcctggcccggagcacctccatgcctcagcttggcgagaggtctggggtgatccgggtgaagcaatacaagcagagcctggcgatcgagagtgacggcaagaaggggagcaaagttttcatgtattacttcgataacccgggtggccaaattccgtcctggctcattaactgggccgccaagaatggagttcctaacttcttgaaagacatggcaagagcctgtcagaactacctcaagaaaacctaagaaagagaactgggaacattgcatccatgggttgatgtctctggaagtgcaaccacccaatgtctctggaagtgccacctggaagtgccacctggaagtgtctctggaagagcacccaccactgttcagccttcccctgctgtttctgtcttcagaggcctacacactaccacatcctttctaagcatgtttgcctgacatccagctcactcgtctgcttcctttctcgctccccccatcctgggctgggctgccttcttctacagttcaatatggggcagactagggaaacctttgcttgcttactattaggaggggaagtcttcagtagggaacacgatcattccattgtgcaattttacggggatgggtgggcggagggacacaacaaaatttaagaatgactatttgggcgggctggctcttttgcagcttgtgatttcttccagcttgggaggggctgctggaagtggcatttcgttcagagctgactttcagtgcacccaaactggatgacgtgccaatgtccatttgccttatgctttgtggagctgattaggctgggatttgaggtgataatccagtaagtctttcctcgttcctacttgtggaggatcagtagctgttatgatgccagaccatttggagaagtatcagaggcctgaccggacacataatatgacaaccacatttttcctcatcatccatgaggaaatggatgatttctcttttccatatgtcactgggggaaaggctgcctgtacctctcaagctttgcattttactggaaactgaggcgtcaagatggctgtggcagctagcaaaagcaaagatgctttgtgcatagccttgtgaaaaagtatctttctatgcaataagatgaattttcctcccagaatatttagaaatgtagaagggataacagttcacagccaggtaaaatttaactggtggcttaatgactctgcacctttttctcaggaattctgcctaagttgtctgccttttctaccaccaaaaagacttttagttttctatgctttctcctgaattttggtagggtaaggtatttctatgtcaaaggcacagccttgatgatctcagggaaaaattttaatcactgtgtataatgatactgaaccttgattaataacagaaattcaggatgtaaagccacagaatgggatttattaatgtgggatacctcagactgtttgttttctttctgggaagaaaagtgtgttctataatgaataaatatagagtggtttttacttgtcctgtgta

SEQ ID NO: 22124 - DNA, 1869 bp, Homo sapiens
  source 1..1869: mol_type = unassigned DNA
ctagcgcaggggcggtgcctccaagtgactgccgtgcagatccaggggagttggaaggtcacaggagttcagcctcagaagactggactttatgagtataaagtctttggtgttctggaggactgctcaccaactctactggcagacatctatatggactcagattacagaaaacaatgggaccagtatgttaaagaactctatgaacaagaatgcaacggagagactgtggtctactgggaagtgaagtacccttttcccatgtccaacagagactatgtctaccttcggcagcggcgagacctggacatggaagggaggaagatccatgtgatcctggcccggagcacctccatgcctcagcttggcgagaggtctggggtgatccgggtgaagcaatacaagcagagcctggcgatcgagagtgacggcaagaaggggagcaaagttttcatgtattacttcgataacccgggtggccaaattccgtcctggctcattaactgggccgccaagaatggagttcctaacttcttgaaagacatggcaagagcctgtcagaactacctcaagaaaacctaagaaagagaactgggaacattgcatccatgggttgatgtctctggaagtgcaaccacccaatgtctctggaagtgccacctggaagtgccacctggaagtgtctctggaagagcacccaccactgttcagccttcccctgctgtttctgtcttcagaggcctacacactaccacatcctttctaagcatgtttgcctgacatccagctcactcgtctgcttcctttctcgctccccccatcctgggctgggctgccttcttctacagttcaatatggggcagactagggaaacctttgcttgcttactattaggaggggaagtcttcagtagggaacacgatcattccattgtgcaattttacggggatgggtgggcggagggacacaacaaaatttaagaatgactatttgggcgggctggctcttttgcagcttgtgatttcttccagcttgggaggggctgctggaagtggcatttcgttcagagctgactttcagtgcacccaaactggatgacgtgccaatgtccatttgccttatgctttgtggagctgattaggctgggatttgaggtgataatccagtaagtctttcctcgttcctacttgtggaggatcagtagctgttatgatgccagaccatttggagaagtatcagaggcctgaccggacacataatatgacaaccacatttttcctcatcatccatgaggaaatggatgatttctcttttccatatgtcactgggggaaaggctgcctgtacctctcaagctttgcattttactggaaactgaggcgtcaagatggctgtggcagctagcaaaagcaaagatgctttgtgcatagccttgtgaaaaagtatctttctatgcaataagatgaattttcctcccagaatatttagaaatgtagaagggataacagttcacagccaggtaaaatttaactggtggcttaatgactctgcacctttttctcaggaattctgcctaagttgtctgccttttctaccaccaaaaagacttttagttttctatgctttctcctgaattttggtagggtaaggtatttctatgtcaaaggcacagccttgatgatctcagggaaaaattttaatcactgtgtataatgatactgaaccttgattaataacagaaattcaggatgtaaagccacagaatgggatttattaatgtgggatacctcagactgtttgttttctttctgggaagaaaagtgtgttctataatgaataaatatagagtggtttttacttgtcctgtgta

SEQ ID NO: 22125 - DNA, 2273 bp, Homo sapiens
  source 1..2273: mol_type = unassigned DNA
cgctggggcagccggggcagccggggcagcccggtcaccccgcccccaggcccacactaagggtgtccgcggcctgccctccaggcggaggagcccggactgcggaaggatggagctggccgccggaagcttctcggaggagcagttctgggaggcctgcgccgagctccagcagcccgctctggccggggccgactggcagctcctagtggagacctcgggcatcagcatctaccggctgctggacaaggtagcggccaacccgctggaggaccgcggggcctagaatgcgccggggtcgacctccccgcagggagtgcggggcggcagtcgcggaagggacaggggcgcgtcttctccggctcaggaaggagctccgcccggaccctgtctcaagctctggagctagcgcaggggcggtgcctccaagtgactgccgtgcagatccaggggagttggaaggtcacaggagttcagcctcagaagactggactttatgagtataaagtctttggtgttctggaggactgctcaccaactctactggcagacatctatatggactcagattacagaaaacaatgggaccagtatgttaaagaactctatgaacaagaatgcaacggagagactgtggtctactgggaagtgaagtacccttttcccatgtccaacagagactatgtctaccttcggcagcggcgagacctggacatggaagggaggaagatccatgtgatcctggcccggagcacctccatgcctcagcttggcgagaggtctggggtgatccgggtgaagcaatacaagcagagcctggcgatcgagagtgacggcaagaaggggagcaaagttttcatgtattacttcgataacccgggtggccaaattccgtcctggctcattaactgggccgccaagaatggagttcctaacttcttgaaagacatggcaagagcctgtcagaactacctcaagaaaacctaagaaagagaactgggaacattgcatccatgggttgatgtctctggaagtgcaaccacccaatgtctctggaagtgccacctggaagtgccacctggaagtgtctctggaagagcacccaccactgttcagccttcccctgctgtttctgtcttcagaggcctacacactaccacatcctttctaagcatgtttgcctgacatccagctcactcgtctgcttcctttctcgctccccccatcctgggctgggctgccttcttctacagttcaatatggggcagactagggaaacctttgcttgcttactattaggaggggaagtcttcagtagggaacacgatcattccattgtgcaattttacggggatgggtgggcggagggacacaacaaaatttaagaatgactatttgggcgggctggctcttttgcagcttgtgatttcttccagcttgggaggggctgctggaagtggcatttcgttcagagctgactttcagtgcacccaaactggatgacgtgccaatgtccatttgccttatgctttgtggagctgattaggctgggatttgaggtgataatccagtaagtctttcctcgttcctacttgtggaggatcagtagctgttatgatgccagaccatttggagaagtatcagaggcctgaccggacacataatatgacaaccacatttttcctcatcatccatgaggaaatggatgatttctcttttccatatgtcactgggggaaaggctgcctgtacctctcaagctttgcattttactggaaactgaggcgtcaagatggctgtggcagctagcaaaagcaaagatgctttgtgcatagccttgtgaaaaagtatctttctatgcaataagatgaattttcctcccagaatatttagaaatgtagaagggataacagttcacagccaggtaaaatttaactggtggcttaatgactctgcacctttttctcaggaattctgcctaagttgtctgccttttctaccaccaaaaagacttttagttttctatgctttctcctgaattttggtagggtaaggtatttctatgtcaaaggcacagccttgatgatctcagggaaaaattttaatcactgtgtataatgatactgaaccttgattaataacagaaattcaggatgtaaagccacagaatgggatttattaatgtgggatacctcagactgtttgttttctttctgggaagaaaagtgtgttctataatgaataaatatagagtggtttttacttgtcctgtgt

SEQ ID NO: 22126 - DNA, 1697 bp, Homo sapiens
  source 1..1697: mol_type = unassigned DNA
tctctcttcggcgaacctattccagggcgcccttcattttcatttcttgaaacaacagccttgcaggccgagccgctgttcccgagaactcggcagccacagggagcaggttgcatggacccaggagcgcgagaggccctgctctgccagcttcggccaatcagaggccagggagcggtgggcgtgacgtggggcggtgcgcggggctgggcggcggctgaggcgcgtgctctcgcgtggtcgctgggtctgcgtcttcccgagccagtgtgctgagctctccgcgtcgcctctgtcgcccgcgcctggcctaccgcggcactcccggctgcacgctctgcttggcctcgccatgccggtggacctcagcaagtggtccgggcccttgagcctgcaagaagtggacgagcagccgcagcacccgctgcatgtcacctacgccggggcggcggtggacgagctgggcaaagtgctgacgcccacccaggttaagaatagacccaccagcatttcgtgggatggtcttgattcagggaagctctacaccttggtcctgacagacccggatgctcccagcaggaaggatcccaaatacagagaatggcatcatttcctggtggtcaacatgaagggcaatgacatcagcagtggcacagtcctctccgattatgtgggctcggggcctcccaagggcacaggcctccaccgctatgtctggctggtttacgagcaggacaggccgctaaagtgtgacgagcccatcctcagcaaccgatctggagaccaccgtggcaaattcaaggtggcgtccttccgtaaaaagtatgagctcagggccccggtggctggcacgtgttaccaggccgagtgggatgactatgtgcccaaactgtacgagcagctgtctgggaagtagggggttagcttggggacctgaactgtcctggaggccccaagccatgttccccagttcagtgttgcatgtataatagatttctcctcttcctgccccccttggcatgggtgagacctgaccagtcagatggtagttgagggtgacttttcctgctgcctggcctttataattttactcactcactctgatttatgttttgatcaaatttgaacttcattttggggggtattttggtactgtgatggggtcatcaaattattaatctgaaaatagcaacccagaatgtaaaaaagaaaaaactggggggaaaaagaccaggtctacagtgatagagcaaagcatcaaagaatctttaagggaggtttaaaaaaaaaaaaaaaaaaaaagattggttgcctctgcctttgtgatcctgagtccagaatggtacacaatgtgattttatggtgatgtcactcacctagacaaccagaggctggcattgaggctaacctccaacacagtgcatctcagatgcctcagtaggcatcagtatgtcactctggtccctttaaagagcaatcctggaagaagcaggagggagggtggctttgctgttgttgggacatggcaatctagaccggtagcagcgctcgctgacagcttgggaggaaacctgagatctgtgttttttaaattgatcgttcttcatgggggtaagaaaagctggtctggagttgctgaatgttgcattaattgtgctgtttgcttgtagttgaataaaaatagaaacctgaatgaa

SEQ ID NO: 22127 - DNA, 1122 bp, Homo sapiens
  source 1..1122: mol_type = unassigned DNA
gtgtgctgagctctccgcgtcgcctctgtcgcccgcgcctggcctaccgcggcactcccggctgcacgctctgcttggcctcgccatgccggtggacctcagcaagtggtccgggcccttgagcctgcaagaagtggacgagcagccgcagcacccgctgcatgtcacctacgccggggcggcggtggacgagctgggcaaagtgctgacgcccacccaggttaagaatagacccaccagcatttcgtgggatggtcttgattcagggaagctctacaccttggtcctgacagacccggatgctcccagcaggaaggatcccaaatacagagaatggcatcatttcctggtggtcaacatgaagggcaatgacatcagcagtggcacagtcctctccgattatgtgggctcggggcctcccaagggcacaggcctccaccgctatgtctggctggtttacgagcaggacaggccgctaaagtgtgacttttcctgctgcctggcctttataattttactcactcactctgatttatgttttgatcaaatttgaacttcattttggggggtattttggtactgtgatggggtcatcaaattattaatctgaaaatagcaacccagaatgtaaaaaagaaaaaactggggggaaaaagaccaggtctacagtgatagagcaaagcatcaaagaatctttaagggaggtttaaaaaaaaaaaaaaaaaaaaagattggttgcctctgcctttgtgatcctgagtccagaatggtacacaatgtgattttatggtgatgtcactcacctagacaaccagaggctggcattgaggctaacctccaacacagtgcatctcagatgcctcagtaggcatcagtatgtcactctggtccctttaaagagcaatcctggaagaagcaggagggagggtggctttgctgttgttgggacatggcaatctagaccggtagcagcgctcgctgacagcttgggaggaaacctgagatctgtgttttttaaattgatcgttcttcatgggggtaagaaaagctggtctggagttgctgaatgttgcattaattgtgctgtttgcttgtagttgaataaaaatagaaacctgaatg

SEQ ID NO: 22128 - DNA, 6720 bp, Homo sapiens
  source 1..6720: mol_type = unassigned DNA
gggcgctcgcgggccaggagcggggagccggcgggcagcgccgcggctcgtgaggtgatggcggcggccccggcccggggaggcggaggcggaggcggaggcggcggcggctgctccggctccggctccagcgcctcgcggggcttctatttcaacacggtcctgtcactggcccgctccctggcggtgcagagaccagcatccttggagaaggtccaaaagcttctttgcatgtgtccagtggatttccatgggatcttccagttagatgaaagacggagagatgcagtgattgcattgggcatttttctgattgaatctgatcttcagcacaaagattgtgtggttccttaccttcttcgacttctcaaaggtcttccaaaagtgtattgggtagaagaaagcacagctcggaaaggcagaggtgccctcccggttgcagagagcttcagcttctgcttggtaactctgctgtctgatgtggcctatagggatccttcacttagggatgagattttagaggtgcttttgcaggttttgcatgtcctcttggggatgtgccaggccttggagattcaagacaaagaatacctttgcaagtatgctatcccatgcctgataggaatctcgcgagcatttgggcgttacagcaacatggaagagtctctcctctcaaagctctttcccaaaatccctcctcattccctccgtgtcctggaagagcttgaaggtgttcgaaggcgttcctttaatgacttccgctccatcctccccagcaatctgctgactgtctgtcaggagggtaccctgaagaggaaaaccagcagtgtgtccagcatctctcaggtcagccctgaacgcggcatgccccctcccagttcccctggaggatctgcctttcactactttgaagcctcctgcttgcccgatgggactgccctagagcctgagtactacttttcaaccatcagctccagcttctcagtctctccccttttcaacggtgtcacatataaggagtttaacattccattggaaatgcttcgggaactcttaaacctggtgaagaagatcgttgaggaggctgttctcaaatctttggatgccattgtagccagtgtgatggaggccaaccccagtgctgatctctactacacttccttcagtgaccctctctacctgaccatgttcaagatgctgcgtgacactctgtactacatgaaggacctcccgacctcttttgtgaaggagatccatgattttgtgctggagcagttcaacacgagccagggggagctccagaagattctacatgacgcagaccggatccacaatgagctgagccccctcaaactgcgctgtcaggcgaatgctgcctgtgtggacctcatggtgtgggctgtgaaggacgagcagggtgcagaaaacctttgcatcaagctatctgagaagctgcagtccaagacgtccagcaaagtcattattgctcacttgcccctgctgatctgctgtctgcagggtttgggccgcctgtgcgagaggttcccggtggtggtgcactctgtgacaccgtccttgcgagacttcctggtcatcccgtccccagttctggtgaagctctacaagtaccacagtcagtaccacacagttgctggcaatgatataaaaatcagtgtgaccaatgagcattccgagtcaaccctgaacgtcatgtcgggtaagaagagccagccctccatgtacgagcagctccgagacatcgctattgacaacatctgcaggtgcctgaaggctggattgacggtggacccagtgattgtggaggcgttcttggccagcctgtccaaccggctctacatctctcaggagagcgacaaggacgctcacttgattcccgaccacacaatccgagccttgggacacattgcggtggccttgagggacaccccgaaggtcatggagcccattctgcagatcctacagcagaaattctgccagccaccctcccccctcgatgtgctgattattgaccagctgggctgcctggttatcaccggaaatcaatacatctatcaggaagtgtggaacctcttccagcagatcagtgtgaaggccagctccgttgtatactcagccaccaaagattacaaggaccacggctataggcattgctccctggcagtgattaatgccctggccaacatcgcggccaacatccaagacgagcacctggtggatgagctgctcatgaacctgttggagttgtttgtgcagctggggctggaggggaagcgagccagcgagagggcaagcgagaagggccctgccctaaaggcttctagcagtgcagggaacttgggagtactcattcctgtaatagctgtgctcacccgacgactgccacccatcaaagaagctaagcctcggttacagaagctcttccgagacttctggctgtattccgttctgatgggattcgctgtggagggctcaggactctggccagaagaatggtacgagggggtctgtgaaatagccactaagtcccccttgctcacctttcccagcaaggagccactgcggtccgtcctccagtataactcagccatgaagaatgacacggtcacccccgctgagctgagtgagctccgcagcactatcatcaacctgctggacccccctcccgaggtgtccgcactcatcaacaagctggacttcgccatgtccacctacctcctctctgtgtaccggctggagtacatgagggtactgcgttcaacagatcctgatcgcttccaggtaatgttctgctactttgaggataaagctattcagaaagacaaatctgggatgatgcagtgtgtgattgcagtcgcggacaaagtattcgatgccttcctgaacatgatggcggataaagccaagaccaaggagaacgaggaggagctggagcggcacgctcagttcctgttggtgaacttcaaccacatccacaagaggataaggagggtggcagacaagtatctatctggtctggtggataagtttccccacttgctctggagcgggactgtgctgaagaccatgctggacatcctgcagaccctgtcactgtcactgagcgctgatattcacaaggatcagccttactatgacatccccgacgccccctaccggatcacggttcctgacacgtacgaagcccgtgagagcattgtgaaggacttcgctgcacgctgtgggatgatcctccaggaggccatgaagtgggcacctaccgtcaccaagtcccacctgcaggaatatctgaacaaacatcagaactgggtatcgggactgtcccagcacacggggctggccatggccactgagagcatccttcactttgctggctacaacaagcagaacacaactcttggggcaactcagctgagcgagcgcccggcctgtgtgaagaaagactactccaacttcatggcatccctgaatctgcgcaaccgctacgcgggcgaggtgtatggaatgattcggttctcaggcaccacaggccagatgtctgacctgaacaaaatgatggtccaggatctacattcagctttagaccgcagtcatcctcagcactacacgcaggccatgttcaagctgaccgcaatgctcattagcagtaaagattgtgacccgcagctccttcatcatctgtgctggggtcccctccggatgttcaatgagcatggcatggagacggccctggcctgctgggagtggctgctggctggcaaggatggagtggaagtgccgttcatgcgggagatggcaggggcctggcacatgacggtggagcagaaatttggcctgttttctgctgagataaaggaagcagaccccctggctgcctcggaagcaagtcaacccaaaccctgtccccccgaagtgaccccccactacatctggatcgacttcctggtgcagcggtttgagatcgccaagtactgcagctctgaccaagtggagatcttctccagcctgctgcagcgctccatgtccctgaacatcggcggggccaaggggagcatgaaccggcacgtggcggccatcgggccccgcttcaagctgctgaccctggggctgtccctcctgcatgccgatgtggttccaaatgcaaccatccgcaatgtgcttcgcgagaagatctactccactgcctttgactacttcagctgtcccccaaagttccctactcaaggagagaagcggctgcgtgaagacataagcatcatgattaaattttggaccgccatgttctcagataagaagtacctgaccgccagccagcttgttcccccagataatcaggacacccggagcaacctggacataactgtcggctctcggcaacaagccacccaaggctggatcaacacataccccctgtccagcggcatgtccaccatctccaagaaatcaggcatgtctaagaaaaccaaccggggctcccagctgcacaaatactacatgaagcgcaggacgctgctgctgtccctgctggccactgagatcgagcgtctcatcacatggtacaacccgctgtcagccccggaactggaactagaccaggccggagagaacagcgtggccaactggagatctaagtacatcagcctgagtgagaagcagtggaaggacaacgtgaacctcgcctggagcatctctccctacctagccgtgcagctgcctgccaggtttaagaacacagaagccattgggaacgaagtgacccgtctcgttcggttggacccgggagccgttagtgatgtgcctgaagcaatcaagttcctggtcacctggcacaccatcgacgccgatgctccagagctcagccatgtgctgtgctgggcgcccacggacccacccacaggcctctcctacttctccagcatgtacccgccgcaccctctcacggcgcagtacggggtgaaagtcctgcggtccttccctccggacgccatcctcttctacatcccccagattgtgcaggccctcaggtacgacaagatgggctatgtgcgggagtatattctgtgggcagcgtctaaatcccagcttctggcacaccagttcatctggaacatgaagactaacatttatctagatgaagagggccaccagaaagaccctgacatcggcgacctcctggatcagttggtagaggagatcacaggctccttgtccggcccagcgaaggacttttaccagcgggagtttgatttctttaacaagatcaccaacgtgtcggctatcatcaagccctaccctaaaggcgacgagagaaagaaggcttgtctgtcggccctgtctgaagtgaaggtgcagccgggctgctacctgcccagcaaccctgaggccattgtgctggacatcgactacaagtctgggaccccgatgcagagtgctgcaaaagccccatatctggccaagttcaaggtgaagcgatgtggagttagtgaacttgaaaaagaaggtctgcggtgccgctcagactccgaggatgagtgcagcacgcaggaggccgacggccagaagatctcctggcaggcagccatcttcaaggtgggagacgactgccggcaggacatgctggccctgcagatcatcgacctcttcaagaacatcttccagctggtcggcctggacctctttgtttttccctaccgcgtggtggccactgcccctgggtgcggggtgatcgagtgcatccccgactgcacctcccgggaccagctgggccgccagacagacttcggcatgtacgactacttcacacgccagtacggggatgagtccactctggccttccagcaggcccgctacaacttcatccgaagcatggccgcctacagcctcctgctgttcctgctgcagatcaaggacagacacaacggcaacattatgctggacaagaagggtcatatcatccacatcgactttggcttcatgtttgaaagctcgccgggcggcaatctcggctgggaacccgacatcaagctgacggatgagatggtgatgatcatggggggcaagatggaggccacacccttcaagtggttcatggagatgtgtgtccgaggctacctggctgtgcggccctacatggacgcggtcgtctccctggtcactctcatgttggacacgggcctgccctgttttcgcggccagacaatcaagctcttgaagcacaggtttagccccaacatgactgagcgcgaggctgcaaatttcatcatgaaggtcatccagagctgcttcctcagcaacaggagccggacctacgacatgatccagtactatcagaatgacatcccctactgaggaggggaccttcgagggcctctgccccatgtgccctcaaagctgtcccacaatcatggagccctgcgacctccctgccctgccgccacatgcagtggaggagaggcctgtggcccaaagaacctggtagcgcctcctggggcagcacgtgggtggcgcagccttggtaacgccatggactgcagcgacaatcaatggatggtgctgtctatgcacaggtgtgagtcctctgtttgcactggacatattccctacctgtcttatttcataggtacatgaagtattgtgtataaaaaaagagataagatttaaccaacatcaacaaaataaaaacccaaaatagtgctgtgttgg

SEQ ID NO: 22129 - DNA, 4189 bp, Homo sapiens
  source 1..4189: mol_type = unassigned DNA
cggccgcgagcgcagtggtgtggagcgcgccgggtcccggagccggctgtctgagggatggacgagacgagcccactagtgtcccccgagcgggcccaacccccggactacaccttcccgtcgggctcgggcgctcactttccgcaggtgcccgggggcgcggtccgagtggcggcggcggccggctcgggcccctctccgccgggctcgccgggccacgaccgcgagcggcagccactgttggatcgggcccggggcgcggcggcccagggccagacccaaaccgtggcggcgcaggcccaggctctggccgctcaggccgcggcggcagcccacgccgctcaggcccaccgcgagcggaacgagttcccggaggatcctgagttcgaggcggtggtgcggcaggccgagctggccatcgagcgctgcatctttcccgagcgcatctaccagggctccagcggaagctacttcgtcaaggaccctcaggggaggatcattgctgtcttcaaacccaagaatgaagagccctatgggcatcttaatcctaagtggaccaagtggctgcagaagctgtgctgtccttgctgctttggccgtgactgccttgtccttaaccagggctatctctcagaagcaggggccagcctggtggaccaaaaactggaactcaacattgttccccgtacaaaggtagtatacctggccagtgagaccttcaactatagtgccattgaccgagtgaagtccaggggcaagcggcttgcactagagaaagtgccaaaagttggacagcggtttaaccgcatcgggctaccaccaaaggttggttcattccagctctttgttgaaggctacaaagatgcagactattggctgcggcgttttgaagcagaacctcttcctgagaacactaaccggcaactactgctccagtttgagcggttggtggtgctggattacatcatccgcaacactgatcgaggcaatgacaactggctgattaaatatgactgtccaatggatagttctagctctcgggacacagactgggtggtggtgaaggagcctgttatcaaggtggctgccatagacaatgggctggccttcccactgaagcatcctgactcctggagggcatatcctttttactgggcctggttgccccaggcgaaagtcccattttctcaggagatcaaagatctgatccttccaaagatatcggaccctaacttcgtcaaggacttggaagaggacctatatgaactcttcaagaaagatcctggtttcgacaggggccagttccataagcagattgctgtcatgcggggccagatcttaaatctgacccaggccttgaaagacaacaagagtcccctgcacctcgtccagatgccacctgtgattgtcgagacggcccgttcccaccagcggtcttctagcgagtcctacacacagagctttcagagccggaagcccttcttttcatggtggtagctccagaggcaggcagaggaaatattgtcagagactggtgggaggaagcctggggagtggggtgcaggaaaagccagagaagccggtggagagcagcacctttaagagccctctctctctgcttgccaccctgctcagagctttccacccacagggagaagcacaatcaggaacagtgagtgctcctcgcccttctgatgtgggggaggctggagctccatgcacgtagtccagatgcctgggaaggaacatctcccttccagcatctgctggtagcaggctgggacagtcccttccttccctgaaaccctgctctattgcaattccctattatattctgcatcagaaaaacaaacaaaacaaaaacaactttaaatgcttgtagcagaaccccgggtcatctcatgtcagaaacctttaatccaggcctaaatttgcatagacctgacattcagctgccttgcagttgcttcctcccatgagccaaggtggtgtcagagggcaactggatgactcgcagtaccacagcactgggacagacagaagccacacctttcttttgggtttttgccaagcctcctccatctcccatcagtgctgtgggctggctgcaagcctcgaaacagttctcctggaagggaggtttttgctttacccccgccagcacttccgcacacaatcatagagaacctctctgctctctgctggcctacagcttgtctgtttctcaagcagaggcaggaagagctagtcttagcatttatattttaataggaagttgactcccagcatgtaaaagtgatccacgcagccggagtgtatgccgggagctaagtggtctatgggtgaacatatcccaccttgcttcctgagtccttggtcccaatcttctcatttgttcctctcgttttaaattttttccccccaactcttttgatgtaagagttcagtttgtcttcgggagtgggtctctgcaagggctctgggatgagtcttggcttccaagaggacaggctattaggttcttggacttttttctgtgctaccgctgctgcttggtggaagtaacaggacgtggattctgcctcataagtggcagtttcccttttctctctgacttgtcctaggccgatttctctatggcttccctgagaaaggtgaggcccaaaggagagaggccttcaaactgtcccaggtcctgcgcagctcagtgcgtatcttcttgcttccatgtgtcttttcccctgctgcctcactccccacccccacttgccaggtgtttgagccatttctacaccaaagcaaagtacggcctcaggagggagtaaaaagggtgccatctgtgtctggaggggcagctgtgttcatgccctgtgctactggacatttcacaattctggcaccttgcgattggtcagtcaacctcagaaagtaactatcttgaaggtttgaaaaacaaccaaagaaagggagtgaggactatggctgcatgtcctctgcttgcccggctgcagagcagagatgtgcagccctctggtcagctggtccaggctggtccccgccggtccccttccagtccagccaccaagagtccacttgtcccgggcttccacctggctgacaggaagaatttctgagagctggatgtgcatgccctgtggacgaaggtacagctcgcctgcctgccccaatcccagccccgacaatcacatgcagctgactcggacactggccttgggaacaatgttcgagagaacacttgccccttgactgtaggagccagaaggggacccaggtgtgcatagctctctgtagacatttttacccaaacctgttggtaaagtgcccatctggtgctcaagagagcctgggggtctaacagggagcccggctgcctcacctggccacagcctccacaccagatctccacattgtcttgatccagaccagctctgtgatcagaaggaaattgggtccagtgtaggagagagctggtcctgggcctggcaggcaagagtgtgggcatcctttcctggcctttctccactctccctcaagcctgtgctcaggttgccttgaatgtggactctggaagagccaggggcccagaatgccgggggaggcttctgagtggcactcatggaacaccgtccctctgccagccataggccctgcctccagtgtcagggaatggaggctgggctgcgagagtgttgctgccccctgtgtcattcttctaatccaatgtagaaattgtacgtaatgtatttaaatcaacgcaaatgtatgaataacaaatacagttctgaccttttttgtccagtttctttgggggaaggaagacaaagaaggtaggaacggaattttgagggcaaagaaacctgtgtttccatggaattgctgagacgtggctcctggggctatttctccctaataaaggatgatccaggtcctcatttccaaagtcccaatgctctgaaaaccaaaagtattttcataacccatttgaaaccaaacctgacctgaacttacactgataggaagctatgggtaattatgatgtgttccttttagtgtgattctttgttgcagaaatgtcaatatattttatgacatggttccctactagggattatacagtatttgctgactacttcctaagagccaaaaataaaaaatctgaattccaaaa

SEQ ID NO: 22130 - DNA, 1848 bp, Homo sapiens
  source 1..1848: mol_type = unassigned DNA
gtgggaggagggcccagatcccactggagataccgaaggagatactctttagtattgggatcccagaaaccagtcctatatctggccagagggacactgggttgtggcatctctctagctgctacccagaaggaacagggccccctggggcctataggccttgcccctgaccctgggaacacccagctcaggcctgccccagtggccacaagtcagggaggccgcaaatttttaactagaaacattgatcattaatagggggttagaaagagttcaaactaagtctcactctgggacatagaccaattgtgcttcaggcctcctgcagagatgctgggtccccaagtctggtcttctgtgaggcaggggctaagcaggagcttgtccaggaatgtgggggtctgggcctcaggggaggggaagaaggtggacattgcgggtatctacccccctgtgaccacccccttcactgccactgcagaggtggactatgggaaactggaggagaatctgcacaaactgggcaccttccccttccgaggagctgtggggggcgtctgcgccctggccaatgtcctgggggctcaggtgtgccagctggagcgactgtgctgcacggggcaatgggaagatgcccagaaactgcagcaccgcctcattgagccaaacgctgcgaggatcattgctgtcttcaaacccaagaatgaagagccctatgggcatcttaatcctaagtggaccaagtggctgcagaagctgtgctgtccttgctgctttggccgtgactgccttgtccttaaccagggctatctctcagaagcaggggccagcctggtggaccaaaaactggaactcaacattgttccccgtacaaaggtagtatacctggccagtgagaccttcaactatagtgccattgaccgagtgaagtccaggggcaagcggcttgcactagagaaagtgccaaaagttggacagcggtttaaccgcatcgggctaccaccaaaggttggttcattccagctctttgttgaaggctacaaagatgcagactattggctgcggcgttttgaagcagaacctcttcctgagaacactaaccggcaactactgctccagtttgagcggttggtggtgctggattacatcatccgcaacactgatcgaggcaatgacaactggctgattaaatatgactgtccaatggatagttctagctctcgggacacagactgggtggtggtgaaggagcctgttatcaaggtggctgccatagacaatgggctggccttcccactgaagcatcctgactcctggagggcatatcctttttactgggcctggttgccccaggcgaaagtcccattttctcaggagatcaaagatctgatccttccaaagatatcggaccctaacttcgtcaaggacttggaagaggacctatatgaactcttcaagaaagatcctggtttcgacaggggccagttccataagcagattgctgtcatgcggggccagatcttaaatctgacccaggccttgaaagacaacaagagtcccctgcacctcgtccagatgccacctgtgattgtcgagacggcccgttcccaccagcggtcttctagcgagtcctacacacagagctttcagagccggaagcccttcttttcatggtggtagctccagaggcaggcagaggaaatattgtcagagactggtgggaggaagcctggggagtggggtgcaggaaaagccagagaagccggtggagagcagcacctttaagagccctctctctctgcttgccaccctgctcagagctttccacccacagggagaagcacaatc

SEQ ID NO: 22131 - DNA, 3540 bp, Homo sapiens
  source 1..3540: mol_type = unassigned DNA
ggaggcgcgaggtggggcgcggccggcggcgaggcgggacaaccgctgggcgggcgccaagcgtgcccgtgcgctggtgaggtggcgtccgttctacccggtcgctcccgttccgcgccatgcagagcccagtctctggcacctggctgctctgatctggtctcagcgcggagggagcagagggagtccatggaggatccctccgagcccgaccggttggcgtccgcggacggcgggagcccggaggaggaggaggatggggagcgggagccgctgctaccgcggatcgcctgggcccacccgcggagaggcgccccaggcagcgccgtgaggctgctggacgctgccggggaggagggcgaggccggcgacgaggagctgcccctcccgcccggggacgtgggggtctcccggagttcgtccgccgagctggaccggagccgccccgcggtttcagtaactattggtacttcagagatgaatgcattcttggatgacccagaatttgccgatattatgctgagagcagagcaagcaatagaagttggaatttttccagaaagaatctctcaaggttcaagtggaagttactttgtgaaggatcctaagaggaaaattattggtgtgtttaaacccaaatcagaagagccttatggtcaactcaatccaaaatggaccaaatatgtccataaggtctgctgcccttgctgctttggccgaggctgcctgattcctaatcaggggtacctttccgaagcgggtgcctatcttgtggacaacaagcttcatctgagcattgtacctaaaacaaaggtggtttggcttgtcagtgagacatttaactataatgcgattgaccgtgcaaaatcaagaggcaaaaagtatgctttagaaaaagtgccaaaagtgggtagaaagtttcataggataggactccctcctaagattggttcctttcagttatttgttgaaggttacaaggaggctgaatattggcttaggaaatttgaagctgaccctttgcctgagaatattagaaaacaatttcagtcacaatttgaaagattagttattttggattacatcatcagaaatacagacaggggcaatgataattggttagtcagatacgaaaagcagaaatgtgaaaaggaaattgaccataaggaatcaaaatggattgatgatgaagaattccttattaaaatagctgcaattgataatggtctagcatttccttttaaacatcctgatgaatggagagcatatccatttcactgggcttggcttcctcaagcaaaagttcccttttctgaagaaataagaaatttgattctaccatatatttctgacatgaactttgtgcaagatttatgtgaagatctctatgaactttttaagactgacaaaggatttgacaaagccacttttgaaagtcagatgtctgtgatgaggggtcagatcttaaaccttactcaggcattgagagacgggaagagtcctttccagctagtacagataccttgtgtgattgtggaacgcagtcaaggtggaagtcagggtcggattgtccacctgagcaattcctttacccagactgtcaattgcaggaagccatttttttcctcctggtagtaaatgtcagagtaagagaaacaaactgtttagaattatcatgtttttaaaacatcatagtaatataaatctgctgttaggagctccagttgctaaaacctcaatttaagtctttaaaaggttgtattttgaatgtaaccaaaagtttacagttttttgtccaaatattaaatttctatttcagggaagaagtgctatatctcctatattgtatttttgtagaaaatttgtattttatgttgttgttagtttaaaaggtaattttacacatgctggaatgactgtaattactctagaattccaagtagaatacaataacttttaatattgagaagaatgttcatgctaattcttcttacattacaaaaggcctttgaggatgcctacgtctgaaattgctcttacgaactttaataaaatagttagctaatagaaaaacaggtaagaataaagcaatgttgccttaatttcaaaagctgctattttagaatttgaataagtactcctaaagtgaccattattagggaccagaaaattatatcttggctaagtaatagaggaccattttggtttttgtacttgagaatatttttggtgaattactttgttgtagtgaggaaaaaacctaagaaatttcccctttttttaaaaaatggaaatattcaattgagacttgaggggaataatagaaaattaaggtagatccccaatattttggaataccaaaattgccttaaaaattcccttctgtttcttacatgggatcaaatacttgagattagtacttcagagtactggccttgttcaatttagtacttcaattagtattaaacttcactaaaaagtaaaccatactccaaattgtatattggattgcattttggggtcctaggtcatacgttcttcaaaattattatgattgtactattgtacttgaaattacagatgttattataattacagtcaaatgtagactatcaggccaaattaaaggggagcatggcagataaccataaagtcatttatatttgattttgaaatgtatttttgtactttattttgaatatcatccatatgtctgacattattggaatttgtaacattgttaatgcactaagtgatttaaattcaattgatgaagatgtgattttacagaagcagaagtttcattttcttgaggcttaaaaccaatgtcaccacttgggcttaactgggtaatttgtggtctaggccttttgttttctaagcttactatcttgtgtttgtttatttgcttttaatgaagtattttgtgtagaaggttaaattaggatgcaaaacagatctgccattcctttttcccttatatcttccttttggtcttcatggacgagatgaatgaggattctgctgccctgagggagttcattggaaacctgcgttctcctacctcttccaaccctccattagctcaattttgagataatggaaaattgactggaaattcaaaactcaaactactatctttagatataaacactagtaattaaaatgtgccttttgaagatgttttctaagagaaaggaaatacgttgcagtgatgtgggtactgctttcataaaacagttttttcagtattttgagaattgccatattaatttttataatggaaaacttaataaattgctactgttttatatcataaaattaaaataccatggtaatatttgcaaaaggtctggccataccagaaaagtacagttgagatagttaagatataaccacaagtcagagtacattggttgtattttgtaaactttcatgaactgaattcttatttaaatagtatggttttttttcaataagtatatttatagtgacaaatgtggtagactaaaggtaataaaaatcattgtcttaagatta

SEQ ID NO: 22132 - DNA, 3388 bp, Homo sapiens
  source 1..3388: mol_type = unassigned DNA
aagcgtgcccgtgcgctggtgaggtggcgtccgttctacccggtcgctcccgttccgcgccatgcagagcccagtctctggcacctggctgctctgatctggtctcagcgcggagggagcagagggagtccatggaggatccctccgagcccgaccggttggcgtccgcggacggcgggagcccggaggaggaggaggatggggagcgggagccgctgctaccgcggatcgcctgggcccacccgcggagaggcgccccaggcagcgccgtgaggctgctggaccggagccgccccgcggtttcagtaactattggtacttcagagatgaatgcattcttggatgacccagaatttgccgatattatgctgagagcagagcaagcaatagaagttggaatttttccagaaagaatctctcaaggttcaagtggaagttactttgtgaaggatcctaagaggaaaattattggtgtgtttaaacccaaatcagaagagccttatggtcaactcaatccaaaatggaccaaatatgtccataaggtctgctgcccttgctgctttggccgaggctgcctgattcctaatcaggggtacctttccgaagcgggtgcctatcttgtggacaacaagcttcatctgagcattgtacctaaaacaaaggtggtttggcttgtcagtgagacatttaactataatgcgattgaccgtgcaaaatcaagaggcaaaaagtatgctttagaaaaagtgccaaaagtgggtagaaagtttcataggataggactccctcctaagattggttcctttcagttatttgttgaaggttacaaggaggctgaatattggcttaggaaatttgaagctgaccctttgcctgagaatattagaaaacaatttcagtcacaatttgaaagattagttattttggattacatcatcagaaatacagacaggggcaatgataattggttagtcagatacgaaaagcagaaatgtgaaaaggaaattgaccataaggaatcaaaatggattgatgatgaagaattccttattaaaatagctgcaattgataatggtctagcatttccttttaaacatcctgatgaatggagagcatatccatttcactgggcttggcttcctcaagcaaaagttcccttttctgaagaaataagaaatttgattctaccatatatttctgacatgaactttgtgcaagatttatgtgaagatctctatgaactttttaagactgacaaaggatttgacaaagccacttttgaaagtcagatgtctgtgatgaggggtcagatcttaaaccttactcaggcattgagagacgggaagagtcctttccagctagtacagataccttgtgtgattgtggaacgcagtcaaggtggaagtcagggtcggattgtccacctgagcaattcctttacccagactgtcaattgcaggaagccatttttttcctcctggtagtaaatgtcagagtaagagaaacaaactgtttagaattatcatgtttttaaaacatcatagtaatataaatctgctgttaggagctccagttgctaaaacctcaatttaagtctttaaaaggttgtattttgaatgtaaccaaaagtttacagttttttgtccaaatattaaatttctatttcagggaagaagtgctatatctcctatattgtatttttgtagaaaatttgtattttatgttgttgttagtttaaaaggtaattttacacatgctggaatgactgtaattactctagaattccaagtagaatacaataacttttaatattgagaagaatgttcatgctaattcttcttacattacaaaaggcctttgaggatgcctacgtctgaaattgctcttacgaactttaataaaatagttagctaatagaaaaacaggtaagaataaagcaatgttgccttaatttcaaaagctgctattttagaatttgaataagtactcctaaagtgaccattattagggaccagaaaattatatcttggctaagtaatagaggaccattttggtttttgtacttgagaatatttttggtgaattactttgttgtagtgaggaaaaaacctaagaaatttcccctttttttaaaaaatggaaatattcaattgagacttgaggggaataatagaaaattaaggtagatccccaatattttggaataccaaaattgccttaaaaattcccttctgtttcttacatgggatcaaatacttgagattagtacttcagagtactggccttgttcaatttagtacttcaattagtattaaacttcactaaaaagtaaaccatactccaaattgtatattggattgcattttggggtcctaggtcatacgttcttcaaaattattatgattgtactattgtacttgaaattacagatgttattataattacagtcaaatgtagactatcaggccaaattaaaggggagcatggcagataaccataaagtcatttatatttgattttgaaatgtatttttgtactttattttgaatatcatccatatgtctgacattattggaatttgtaacattgttaatgcactaagtgatttaaattcaattgatgaagatgtgattttacagaagcagaagtttcattttcttgaggcttaaaaccaatgtcaccacttgggcttaactgggtaatttgtggtctaggccttttgttttctaagcttactatcttgtgtttgtttatttgcttttaatgaagtattttgtgtagaaggttaaattaggatgcaaaacagatctgccattcctttttcccttatatcttccttttggtcttcatggacgagatgaatgaggattctgctgccctgagggagttcattggaaacctgcgttctcctacctcttccaaccctccattagctcaattttgagataatggaaaattgactggaaattcaaaactcaaactactatctttagatataaacactagtaattaaaatgtgccttttgaagatgttttctaagagaaaggaaatacgttgcagtgatgtgggtactgctttcataaaacagttttttcagtattttgagaattgccatattaatttttataatggaaaacttaataaattgctactgttttatatcataaaattaaaataccatggtaatatttgcaaaaggtctggccataccagaaaagtacagttgagatagttaagatataaccacaagtcagagtacattggttgtattttgtaaactttcatgaactgaattcttatttaaatagtatggttttttttcaataagtatatttatagtgacaaatgtggtagactaaaggtaataaaaatcattgtcttaagatt

SEQ ID NO: 22133 - DNA, 6752 bp, Homo sapiens
  source 1..6752: mol_type = unassigned DNA
cggatgcacctacgcctgcgccctgaggtcgggcgctcgcgggccaggagcggggagccggcgggcagcgccgcggctcgtgaggtgatggcggcggccccggcccggggaggcggaggcggaggcggaggcggcggcggctgctccggctccggctccagcgcctcgcggggcttctatttcaacacggtcctgtcactggcccgctccctggcggtgcagagaccagcatccttggagaaggtccaaaagcttctttgcatgtgtccagtggatttccatgggatcttccagttagatgaaagacggagagatgcagtgattgcattgggcatttttctgattgaatctgatcttcagcacaaagattgtgtggttccttaccttcttcgacttctcaaaggtcttccaaaagtgtattgggtagaagaaagcacagctcggaaaggcagaggtgccctcccggttgcagagagcttcagcttctgcttggtaactctgctgtctgatgtggcctatagggatccttcacttagggatgagattttagaggtgcttttgcaggttttgcatgtcctcttggggatgtgccaggccttggagattcaagacaaagaatacctttgcaagtatgctatcccatgcctgataggaatctcgcgagcatttgggcgttacagcaacatggaagagtctctcctctcaaagctctttcccaaaatccctcctcattccctccgtgtcctggaagagcttgaaggtgttcgaaggcgttcctttaatgacttccgctccatcctccccagcaatctgctgactgtctgtcaggagggtaccctgaagaggaaaaccagcagtgtgtccagcatctctcaggtcagccctgaacgcggcatgccccctcccagttcccctggaggatctgcctttcactactttgaagcctcctgcttgcccgatgggactgccctagagcctgagtactacttttcaaccatcagctccagcttctcagtctctccccttttcaacggtgtcacatataaggagtttaacattccattggaaatgcttcgggaactcttaaacctggtgaagaagatcgttgaggaggctgttctcaaatctttggatgccattgtagccagtgtgatggaggccaaccccagtgctgatctctactacacttccttcagtgaccctctctacctgaccatgttcaagatgctgcgtgacactctgtactacatgaaggacctcccgacctcttttgtgaaggagatccatgattttgtgctggagcagttcaacacgagccagggggagctccagaagattctacatgacgcagaccggatccacaatgagctgagccccctcaaactgcgctgtcaggcgaatgctgcctgtgtggacctcatggtgtgggctgtgaaggacgagcagggtgcagaaaacctttgcatcaagctatctgagaagctgcagtccaagacgtccagcaaagtcattattgctcacttgcccctgctgatctgctgtctgcagggtttgggccgcctgtgcgagaggttcccggtggtggtgcactctgtgacaccgtccttgcgagacttcctggtcatcccgtccccagttctggtgaagctctacaagtaccacagtcagtaccacacagttgctggcaatgatataaaaatcagtgtgaccaatgagcattccgagtcaaccctgaacgtcatgtcgggtaagaagagccagccctccatgtacgagcagctccgagacatcgctattgacaacatctgcaggtgcctgaaggctggattgacggtggacccagtgattgtggaggcgttcttggccagcctgtccaaccggctctacatctctcaggagagcgacaaggacgctcacttgattcccgaccacacaatccgagccttgggacacattgcggtggccttgagggacaccccgaaggtcatggagcccattctgcagatcctacagcagaaattctgccagccaccctcccccctcgatgtgctgattattgaccagctgggctgcctggttatcaccggaaatcaatacatctatcaggaagtgtggaacctcttccagcagatcagtgtgaaggccagctccgttgtatactcagccaccaaagattacaaggaccacggctataggcattgctccctggcagtgattaatgccctggccaacatcgcggccaacatccaagacgagcacctggtggatgagctgctcatgaacctgttggagttgtttgtgcagctggggctggaggggaagcgagccagcgagagggcaagcgagaagggccctgccctaaaggcttctagcagtgcagggaacttgggagtactcattcctgtaatagctgtgctcacccgacgactgccacccatcaaagaagctaagcctcggttacagaagctcttccgagacttctggctgtattccgttctgatgggattcgctgtggagggctcaggactctggccagaagaatggtacgagggggtctgtgaaatagccactaagtcccccttgctcacctttcccagcaaggagccactgcggtccgtcctccagtataactcagccatgaagaatgacacggtcacccccgctgagctgagtgagctccgcagcactatcatcaacctgctggacccccctcccgaggtgtccgcactcatcaacaagctggacttcgccatgtccacctacctcctctctgtgtaccggctggagtacatgagggtactgcgttcaacagatcctgatcgcttccaggtaatgttctgctactttgaggataaagctattcagaaagacaaatctgggatgatgcagtgtgtgattgcagtcgcggacaaagtattcgatgccttcctgaacatgatggcggataaagccaagaccaaggagaacgaggaggagctggagcggcacgctcagttcctgttggtgaacttcaaccacatccacaagaggataaggagggtggcagacaagtatctatctggtctggtggataagtttccccacttgctctggagcgggactgtgctgaagaccatgctggacatcctgcagaccctgtcactgtcactgagcgctgatattcacaaggatcagccttactatgacatccccgacgccccctaccggatcacggttcctgacacgtacgaagcccgtgagagcattgtgaaggacttcgctgcacgctgtgggatgatcctccaggaggccatgaagtgggcacctaccgtcaccaagtcccacctgcaggaatatctgaacaaacatcagaactgggtatcgggactgtcccagcacacggggctggccatggccactgagagcatccttcactttgctggctacaacaagcagaacacaactcttggggcaactcagctgagcgagcgcccggcctgtgtgaagaaagactactccaacttcatggcatccctgaatctgcgcaaccgctacgcgggcgaggtgtatggaatgattcggttctcaggcaccacaggccagatgtctgacctgaacaaaatgatggtccaggatctacattcagctttagaccgcagtcatcctcagcactacacgcaggccatgttcaagctgaccgcaatgctcattagcagtaaagattgtgacccgcagctccttcatcatctgtgctggggtcccctccggatgttcaatgagcatggcatggagacggccctggcctgctgggagtggctgctggctggcaaggatggagtggaagtgccgttcatgcgggagatggcaggggcctggcacatgacggtggagcagaaatttggcctgttttctgctgagataaaggaagcagaccccctggctgcctcggaagcaagtcaacccaaaccctgtccccccgaagtgaccccccactacatctggatcgacttcctggtgcagcggtttgagatcgccaagtactgcagctctgaccaagtggagatcttctccagcctgctgcagcgctccatgtccctgaacatcggcggggccaaggggagcatgaaccggcacgtggcggccatcgggccccgcttcaagctgctgaccctggggctgtccctcctgcatgccgatgtggttccaaatgcaaccatccgcaatgtgcttcgcgagaagatctactccactgcctttgactacttcagctgtcccccaaagttccctactcaaggagagaagcggctgcgtgaagacataagcatcatgattaaattttggaccgccatgttctcagataagaagtacctgaccgccagccagcttgttcccccagataatcaggacacccggagcaacctggacataactgtcggctctcggcaacaagccacccaaggctggatcaacacataccccctgtccagcggcatgtccaccatctccaagaaatcaggcatgtctaagaaaaccaaccggggctcccagctgcacaaatactacatgaagcgcaggacgctgctgctgtccctgctggccactgagatcgagcgtctcatcacatggtacaacccgctgtcagccccggaactggaactagaccaggccggagagaacagcgtggccaactggagatctaagtacatcagcctgagtgagaagcagtggaaggacaacgtgaacctcgcctggagcatctctccctacctagccgtgcagctgcctgccaggtttaagaacacagaagccattgggaacgaagtgacccgtctcgttcggttggacccgggagccgttagtgatgtgcctgaagcaatcaagttcctggtcacctggcacaccatcgacgccgatgctccagagctcagccatgtgctgtgctgggcgcccacggacccacccacaggcctctcctacttctccagcatgtacccgccgcaccctctcacggcgcagtacggggtgaaagtcctgcggtccttccctccggacgccatcctcttctacatcccccagattgtgcaggccctcaggtacgacaagatgggctatgtgcgggagtatattctgtgggcagcgtctaaatcccagcttctggcacaccagttcatctggaacatgaagactaacatttatctagatgaagagggccaccagaaagaccctgacatcggcgacctcctggatcagttggtagaggagatcacaggctccttgtccggcccagcgaaggacttttaccagcgggagtttgatttctttaacaagatcaccaacgtgtcggctatcatcaagccctaccctaaaggcgacgagagaaagaaggcttgtctgtcggccctgtctgaagtgaaggtgcagccgggctgctacctgcccagcaaccctgaggccattgtgctggacatcgactacaagtctgggaccccgatgcagagtgctgcaaaagccccatatctggccaagttcaaggtgaagcgatgtggagttagtgaacttgaaaaagaaggtctgcggtgccgctcagactccgaggatgagtgcagcacgcaggaggccgacggccagaagatctcctggcaggcagccatcttcaaggtgggagacgactgccggcaggacatgctggccctgcagatcatcgacctcttcaagaacatcttccagctggtcggcctggacctctttgtttttccctaccgcgtggtggccactgcccctgggtgcggggtgatcgagtgcatccccgactgcacctcccgggaccagctgggccgccagacagacttcggcatgtacgactacttcacacgccagtacggggatgagtccactctggccttccagcaggcccgctacaacttcatccgaagcatggccgcctacagcctcctgctgttcctgctgcagatcaaggacagacacaacggcaacattatgctggacaagaagggtcatatcatccacatcgactttggcttcatgtttgaaagctcgccgggcggcaatctcggctgggaacccgacatcaagctgacggatgagatggtgatgatcatggggggcaagatggaggccacacccttcaagtggttcatggagatgtgtgtccgaggctacctggctgtgcggccctacatggacgcggtcgtctccctggtcactctcatgttggacacgggcctgccctgttttcgcggccagacaatcaagctcttgaagcacaggtttagccccaacatgactgagcgcgaggctgcaaatttcatcatgaaggtcatccagagctgcttcctcagcaacaggagccggacctacgacatgatccagtactatcagaatgacatcccctactgaggaggggaccttcgagggcctctgccccatgtgccctcaaagctgtcccacaatcatggagccctgcgacctccctgccctgccgccacatgcagtggaggagaggcctgtggcccaaagaacctggtagcgcctcctggggcagcacgtgggtggcgcagccttggtaacgccatggactgcagcgacaatcaatggatggtgctgtctatgcacaggtgtgagtcctctgtttgcactggacatattccctacctgtcttatttcataggtacatgaagtattgtgtataaaaaaagagataagatttaaccaacatcaacaaaataaaaacccaaaatagtgctgtgttggaa

SEQ ID NO: 22134 - DNA, 3036 bp, Homo sapiens
  source 1..3036: mol_type = unassigned DNA
tggtttctaaatcttattcagtgagcacgtgttcctttttttaattagagaaaacttgacagtagcccctttttgtgtttcacagaggagctaacattccttctgtacctgtagttcatgcgggagatggcaggggcctggcacatgacggtggagcagaaatttggcctgttttctgctgagataaaggaagcagaccccctggctgcctcggaagcaagtcaacccaaaccctgtccccccgaagtgaccccccactacatctggatcgacttcctggtgcagcggtttgagatcgccaagtactgcagctctgaccaagtggagatcttctccagcctgctgcagcgctccatgtccctgaacatcggcggggccaaggggagcatgaaccggcacgtggcggccatcgggccccgcttcaagctgctgaccctggggctgtccctcctgcatgccgatgtggttccaaatgcaaccatccgcaatgtgcttcgcgagaagatctactccactgcctttgactacttcagctgtcccccaaagttccctactcaaggagagaagcggctgcgtgaagacataagcatcatgattaaattttggaccgccatgttctcagataagaagtacctgaccgccagccagcttgttcccccagataatcaggacacccggagcaacctggacataactgtcggctctcggcaacaagccacccaaggctggatcaacacataccccctgtccagcggcatgtccaccatctccaagaaatcaggcatgtctaagaaaaccaaccggggctcccagctgcacaaatactacatgaagcgcaggacgctgctgctgtccctgctggccactgagatcgagcgtctcatcacatggtacaacccgctgtcagccccggaactggaactagaccaggccggagagaacagcgtggccaactggagatctaagtacatcagcctgagtgagaagcagtggaaggacaacgtgaacctcgcctggagcatctctccctacctagccgtgcagctgcctgccaggtttaagaacacagaagccattgggaacgaagtgacccgtctcgttcggttggacccgggagccgttagtgatgtgcctgaagcaatcaagttcctggtcacctggcacaccatcgacgccgatgctccagagctcagccatgtgctgtgctgggcgcccacggacccacccacaggcctctcctacttctccagcatgtacccgccgcaccctctcacggcgcagtacggggtgaaagtcctgcggtccttccctccggacgccatcctcttctacatcccccagattgtgcaggccctcaggtacgacaagatgggctatgtgcgggagtatattctgtgggcagcgtctaaatcccagcttctggcacaccagttcatctggaacatgaagactaacatttatctagatgaagagggccaccagaaagaccctgacatcggcgacctcctggatcagttggtagaggagatcacaggctccttgtccggcccagcgaaggacttttaccagcgggagtttgatttctttaacaagatcaccaacgtgtcggctatcatcaagccctaccctaaaggcgacgagagaaagaaggcttgtctgtcggccctgtctgaagtgaaggtgcagccgggctgctacctgcccagcaaccctgaggccattgtgctggacatcgactacaagtctgggaccccgatgcagagtgctgcaaaagccccatatctggccaagttcaaggtgaagcgatgtggagttagtgaacttgaaaaagaaggtctgcggtgccgctcagactccgaggatgagtgcagcacgcaggaggccgacggccagaagatctcctggcaggcagccatcttcaaggtgggagacgactgccggcaggacatgctggccctgcagatcatcgacctcttcaagaacatcttccagctggtcggcctggacctctttgtttttccctaccgcgtggtggccactgcccctgggtgcggggtgatcgagtgcatccccgactgcacctcccgggaccagctgggccgccagacagacttcggcatgtacgactacttcacacgccagtacggggatgagtccactctggccttccagcaggcccgctacaacttcatccgaagcatggccgcctacagcctcctgctgttcctgctgcagatcaaggacagacacaacggcaacattatgctggacaagaagggtcatatcatccacatcgactttggcttcatgtttgaaagctcgccgggcggcaatctcggctgggaacccgacatcaagctgacggatgagatggtgatgatcatggggggcaagatggaggccacacccttcaagtggttcatggagatgtgtgtccgaggctacctggctgtgcggccctacatggacgcggtcgtctccctggtcactctcatgttggacacgggcctgccctgttttcgcggccagacaatcaagctcttgaagcacaggtttagccccaacatgactgagcgcgaggctgcaaatttcatcatgaaggtcatccagagctgcttcctcagcaacaggagccggacctacgacatgatccagtactatcagaatgacatcccctactgaggaggggaccttcgagggcctctgccccatgtgccctcaaagctgtcccacaatcatggagccctgcgacctccctgccctgccgccacatgcagtggaggagaggcctgtggcccaaagaacctggtagcgcctcctggggcagcacgtgggtggcgcagccttggtaacgccatggactgcagcgacaatcaatggatggtgctgtctatgcacaggtgtgagtcctctgtttgcactggacatattccctacctgtcttatttcataggtacatgaagtattgtgtataaaaaaagagataagatttaaccaacatcaacaaaataaaaacccaaaatagtgctgtgttgg

SEQ ID NO: 22135 - DNA, 574 bp, Homo sapiens
  source 1..574: mol_type = unassigned DNA
aaaacatttctcgtctccgtttgacagcacagagaccggcgagtccacaccagccctgccccaggctcacctcggaagaggcgaccccaaccttctcggactcgtacatgagggccagggacctgctggtgctggcggccgtggcctcagccctgcggaggacctcctgccgcaagtactgctgcctgtccgcgggcgcgtcgggcccgtcggggaggtctcgggcgtccctccaaggggccggccgggcgccttcgtcctccccgtcgtcgtcgaacggattgtagcttttagggtccaaaagcttctttgcatgtgtccagtggatttccatgggatcttccagttagatgaaagacggagagatgcagtgattgcattgggcatttttctgattgaatctgatcttcagcacaaagattgtgtggttccttaccttcttcgacttctcaaaggtcttccaaaagtgtattgggtagaagaaagcacagctcggaaaggcagaggtgccctcccggttgcagagagcttcagcttctgcttggtaactctgctgtctgatgtggcctatagg

SEQ ID NO: 22136 - DNA, 2340 bp, Homo sapiens
  source 1..2340: mol_type = unassigned DNA
gcgcggccccgaaccgcgccccaggccggcaggcggggaaggagccggtgggggtagggggtgcggtggggggtggggaccctccggctcttgggggtcccagtccccgccggctgctgagcgggtggggtggtggaggagctgcagagatgtccggccagagcctgacggaccgaatcactgccgcccagcacagtgtcaccggctctgccgtatccaagacagtatgcaaggccacgacccacgagatcatggggcccaagaaaaagcacctggactacttaattcagtgcacaaatgagatgaatgtgaacatcccacagttggcagacagtttatttgaaagaactactaatagtagttgggtggtggtcttcaaatctctcattacaactcatcatttgatggtgtatggaaatgagcgttttattcagtatttggcttcaagaaacacgttgtttaacttaagcaattttttggataaaagtggattgcaaggatatgacatgtctacatttattaggcggtatagtagatatttaaatgagaaagcagtttcatacagacaagttgcatttgatttcacaaaagtgaagagaggggctgatggagttatgagaacaatgaacacagaaaaactcctaaaaactgtaccaattattcagaatcagatggatgcacttcttgattttaatgttaatagcaatgaacttacaaatggggtaataaatgctgccttcatgctcctgttcaaagatgccattagactgtttgcagcatacaatgaaggaattattaatttgttggaaaaatattttgatatgaaaaagaaccaatgcaaagaaggtcttgacatctataagaagttcctaactaggatgacaagaatctcagagttcctcaaagttgcagagcaagttggaattgacagaggtgatataccagacctttcacaggcccctagcagtcttcttgatgctttggaacaacatttagcttccttggaaggaaagaaaatcaaagattctacagctgcaagcagggcaactacactttccaatgcagtgtcttccctggcaagcactggtctatctctgaccaaagtggatgaaagggaaaagcaggcagcattagaggaagaacaggcacgtttgaaagctttaaaggaacagcgcctaaaagaacttgcaaagaaacctcatacctctttaacaactgcagcctctcctgtatccacctcagcaggagggataatgactgcaccagccattgacatattttctacccctagttcttctaacagcacatcaaagctgcccaatgatctgcttgatttgcagcagccaacttttcacccatctgtacatcctatgtcaactgcttctcaggtagcaagtacatggggagatcctttctctgctactgtagatgctgttgatgatgccattccaagcttaaatcctttcctcacaaaaagtagtggtgatgttcacctttccatttcttcagatgtatctacttttactactaggacacctactcatgaaatgtttgttggattcactccttctccagttgcacagccacacccttcagctggccttaatgttgactttgaatctgtgtttggaaataaatctacaaatgttattgtagattctgggggctttgatgaactaggtggacttctcaaaccaacagtggcctctcagaaccagaaccttcctgttgccaaactcccacctagcaagttagtatctgatgacttggattcatctttagccaaccttgtgggcaatcttggcatcggaaatggaaccactaagaatgatgtaaattggagtcaaccaggtgaaaagaagttaactgggggatctaactggcaaccaaaggttgcaccaacaaccgcttggaatgctgcaacaatggcaccccctgtaatggcctatcctgctactacaccaacaggcatgataggatatggaattcctccacaaatgggaagtgttcctgtaatgacgcaaccaaccttaatatacagccagcctgtcatgagacctccaaacccctttggccctgtatcaggagcacagatacagtttatgtaacttgatggaagaaaatggaattactccaaaaagacaagtgctcaagcagcaaaatccttacttccagcaaaatccaaactgctgtctcttaaatctcttaaactctcttcttccattagaatgctacaagtaactcagtgaaggcccatgaaggaaattgggactagtttataggagaacgtatcaatacagtttataaagccaagaattgctatgatttaagactaagatc

SEQ ID NO: 22137 - DNA, 2618 bp, Homo sapiens
  source 1..2618: mol_type = unassigned DNA
gaggaggagcctggcgccgccattttcctgcagctgcctgttcctcttaccctgcccggctccagctgacccgggaaggggtgggctgaactgaggcgggggcaagggtggggaccctccggctcttgggggtcccagtccccgccggctgctgagcgggtggggtggtggaggagctgcagagatgtccggccagagcctgacggaccgaatcactgccgcccagcacagtgtcaccggctctgccgtatccaagacagtatgcaaggccacgacccacgagatcatggggcccaagaaaaagcacctggactacttaattcagtgcacaaatgagatgaatgtgaacatcccacagttggcagacagtttatttgaaagaactactaatagtagttgggtggtggtcttcaaatctctcattacaactcatcatttgatggtgtatggaaatgagcgttttattcagtatttggcttcaagaaacacgttgtttaacttaagcaattttttggataaaagtggattgcaaggatatgacatgtctacatttattaggcggtatagtagatatttaaatgagaaagcagtttcatacagacaagttgcatttgatttcacaaaagtgaagagaggggctgatggagttatgagaacaatgaacacagaaaaactcctaaaaactgtaccaattattcagaatcagatggatgcacttcttgattttaatgttaatagcaatgaacttacaaatggggtaataaatgctgccttcatgctcctgttcaaagatgccattagactgtttgcagcatacaatgaaggaattattaatttgttggaaaaatattttgatatgaaaaagaaccaatgcaaagaaggtcttgacatctataagaagttcctaactaggatgacaagaatctcagagttcctcaaagttgcagagcaagttggaattgacagaggtgatataccagacctttcacaggcccctagcagtcttcttgatgctttggaacaacatttagcttccttggaaggaaagaaaatcaaagattctacagctgcaagcagggcaactacactttccaatgcagtgtcttccctggcaagcactggtctatctctgaccaaagtggatgaaagggaaaagcaggcagcattagaggaagaacaggcacgtttgaaagctttaaaggaacagcgcctaaaagaacttgcaaagaaacctcatacctctttaacaactgcagcctctcctgtatccacctcagcaggagggataatgactgcaccagccattgacatattttctacccctagttcttctaacagcacatcaaagctgcccaatgatctgcttgatttgcagcagccaacttttcacccatctgtacatcctatgtcaactgcttctcaggtagcaagtacatggggagatcctttctctgctactgtagatgctgttgatgatgccattccaagcttaaatcctttcctcacaaaaagtagtggtgatgttcacctttccatttcttcagatgtatctacttttactactaggacacctactcatgaaatgtttgttggattcactccttctccagttgcacagccacacccttcagctggccttaatgttgactttgaatctgtgtttggaaataaatctacaaatgttattgtagattctgggggctttgatgaactaggtggacttctcaaaccaacagtggcctctcagaaccagaaccttcctgttgccaaactcccacctagcaagttagtatctgatgacttggattcatctttagccaaccttgtgggcaatcttggcatcggaaatggaaccactaagaatgatgtaaattggagtcaaccaggtgaaaagaagttaactgggggatctaactggcaaccaaaggttgcaccaacaaccgcttggaatgctgcaacaatggcaccccctgtaatggcctatcctgctactacaccaacaggcatgataggatatggaattcctccacaaatgggaagtgttcctgtaatgacgcaaccaaccttaatatacagccagcctgtcatgagacctccaaacccctttggccctgtatcaggagcacagatacagtttatgtaacttgatggaagaaaatggaattactccaaaaagacaagtgctcaagcagcaaaatccttacttccagcaaaatccaaactgctgtctcttaaatctcttaaactctcttcttccattagaatgctacaagtaactcagtgaaggcccatgaaggaaattgggactagtttataggagaacgtatcaatacagtttataaagccaagaattgctatgatttaagactaagatctgtctttttggtgactaacccttcaattctttcaactcctgttaatacccataatcagtaacctatcaagaaaagcccttatttggaaagtgtgaaatttgtatttggaaaagctgcctggagagaagaactgtgtcctttactgtatttcaacaggactcttttgggggatcaaaattaaaattcctaattatgcattatctttcttttctccagtcctcacaaatacagaaacaataactg

SEQ ID NO: 22138 - DNA, 3613 bp, Homo sapiens
  source 1..3613: mol_type = unassigned DNA
ggagcctggcgccgccattttcctgcagctgcctgttcctcttaccctgcccggctccagctgacccgggaaggggtgggctgaactgaggcgggggcaagggagtgcccgacatcttgtccgactccgcgggtgacacgagccggttctctctggactggtggcagcgcgcggccccgaaccgcgccccaggccggcaggcggggaaggagccggtgggggtagggggtgcggtggggggtggggaccctccggctcttgggggtcccagtccccgccggctgctgagcgggtggggtggtggaggagctgcagagatgtccggccagagcctgacggaccgaatcactgccgcccagcacagtgtcaccggctctgccgtatccaagacagtatgcaaggccacgacccacgagatcatggggcccaagaaaaagcacctggactacttaattcagtgcacaaatgagatgaatgtgaacatcccacagttggcagacagtttatttgaaagaactactaatagtagttgggtggtggtcttcaaatctctcattacaactcatcatttgatggtgtatggaaatgagcgttttattcagtatttggcttcaagaaacacgttgtttaacttaagcaattttttggataaaagtggattgcaaggatatgacatgtctacatttattaggcggtatagtagatatttaaatgagaaagcagtttcatacagacaagttgcatttgatttcacaaaagtgaagagaggggctgatggagttatgagaacaatgaacacagaaaaactcctaaaaactgtaccaattattcagaatcagatggatgcacttcttgattttaatgttaatagcaatgaacttacaaatggggtaataaatgctgccttcatgctcctgttcaaagatgccattagactgtttgcagcatacaatgaaggaattattaatttgttggaaaaatattttgatatgaaaaagaaccaatgcaaagaaggtcttgacatctataagaagttcctaactaggatgacaagaatctcagagttcctcaaagttgcagagcaagttggaattgacagaggtgatataccagacctttcacaggcccctagcagtcttcttgatgctttggaacaacatttagcttccttggaaggaaagaaaatcaaagattctacagctgcaagcagggcaactacactttccaatgcagtgtcttccctggcaagcactggtctatctctgaccaaagtggatgaaagggaaaagcaggcagcattagaggaagaacaggcacgtttgaaagctttaaaggaacagcgcctaaaagaacttgcaaagaaacctcatacctctttaacaactgcagcctctcctgtatccacctcagcaggagggataatgactgcaccagccattgacatattttctacccctagttcttctaacagcacatcaaagctgcccaatgatctgcttgatttgcagcagccaacttttcacccatctgtacatcctatgtcaactgcttctcaggtagcaagtacatggggagatgctgttgatgatgccattccaagcttaaatcctttcctcacaaaaagtagtggtgatgttcacctttccatttcttcagatgtatctacttttactactaggacacctactcatgaaatgtttgttggattcactccttctccagttgcacagccacacccttcagctggccttaatgttgactttgaatctgtgtttggaaataaatctacaaatgttattgtagattctgggggctttgatgaactaggtggacttctcaaaccaacagtggcctctcagaaccagaaccttcctgttgccaaactcccacctagcaagttagtatctgatgacttggattcatctttagccaaccttgtgggcaatcttggcatcggaaatggaaccactaagaatgatgtaaattggagtcaaccaggtgaaaagaagttaactgggggatctaactggcaaccaaaggttgcaccaacaaccgcttggaatgctgcaacaatggcaccccctgtaatggcctatcctgctactacaccaacaggcatgataggatatggaattcctccacaaatgggaagtgttcctgtaatgacgcaaccaaccttaatatacagccagcctgtcatgagacctccaaacccctttggccctgtatcaggagcacagatacagtttatgtaacttgatggaagaaaatggaattactccaaaaagacaagtgctcaagcagcaaaatccttacttccagcaaaatccaaactgctgtctcttaaatctcttaaactctcttcttccattagaatgctacaagtaactcagtgaaggcccatgaaggaaattgggactagtttataggagaacgtatcaatacagtttataaagccaagaattgctatgatttaagactaagatctgtctttttggtgactaacccttcaattctttcaactcctgttaatacccataatcagtaacctatcaagaaaagcccttatttggaaagtgtgaaatttgtatttggaaaagctgcctggagagaagaactgtgtcctttactgtatttcaacaggactcttttgggggatcaaaattaaaattcctaattatgcattatctttcttttctccagtcctcacaaatacagaaacaataactgaaattaacttttctttttttaaaaaaaattatattcagtttgcagtagacattccttaagtatttgtatttatttatgattatcaattttacataacattaatattgtatcagacctccttatgaaaatgagtatggatgtgcacagtatgtttgatttttatccacaagaatgaatctgattcagaatgcttttctcagctgacatacagagcactaaatattttaaggcaagtccataggtctgaatctcttaagaattctcggcctctgtgggatttagggaagcattataaatgcattaatccttatagtcaattctgtgcctaggattttgccagggaacagttcactgactaggaaaagcactacattttaaattcagcattagtgcattgggaaggatctttactgctttgtgcttggcatgtcattattttccatttgacattagggcctttccaaaatgaatgtgaggaattgctttcacttcaagactttccttcttttcactaaaactctagaaggtgttacaagggggagggaaggggggcaaagtccttgaacattttctttggctcgtgccatgttatgatcatataccttttaaataaggggaaatagtatctttaaagttaatgtctagccaagagtttagtaaacgaagaattaaactgcactgttgatcggtgctttgtgtaaatacatctttaacatttgggtggagaggggccttaagaaggacagttcattgtaggaaagcaattctgtacatgagtttaagcattcttgttgcattgtctctgcagattctatttttgtttacaatattaaaatgtatgttagcaaaatgggtggattttcaaataaaatgcagcttccac

SEQ ID NO: 22139 - DNA, 3474 bp, Homo sapiens
  source 1..3474: mol_type = unassigned DNA
ctcttaccctgcccggctccagctgacccgggaaggggtgggctgaactgaggcgggggcaagggagtgcccgacatcttgtccgactccgcgggtgacacgagccggttctctctggactggtggcagcgcgcggccccgaaccgcgccccaggccggcaggcggggaaggagccggtgggggtagggggtgcggtggggggtggggaccctccggctcttgggggtcccagtccccgccggctgctgagcgggtggggtggtggaggagctgcagagatgtccggccagagcctgacggaccgaatcactgccgcccagcacagtgtcaccggctctgccgtatccaagacagtatgcaaggccacgacccacgagatcatggggcccaagaaaaagcacctggactacttaattcagtgcacaaatgagatgaatgtgaacatcccacagttggcagacagtttatttgaaagaactactaatagtagttgggtggtggtcttcaaatctctcattacaactcatcatttgatggtgtatggaaatgagcgttttattcagtatttggcttcaagaaacacgttgtttaacttaagcaattttttggataaaagtggattgcaaggatatgacatgtctacatttattaggcggtatagtagatatttaaatgagaaagcagtttcatacagacaagttgcatttgatttcacaaaagtgaagagaggggctgatggagttatgagaacaatgaacacagaaaaactcctaaaaactgtaccaattattcagaatcagatggatgcacttcttgattttaatgttaatagcaatgaacttacaaatggggtaataaatgctgccttcatgctcctgttcaaagatgccattagactgtttgcagcatacaatgaaggaattattaatttgttggaaaaatattttgatatgaaaaagaaccaatgcaaagaaggtcttgacatctataagaagttcctaactaggatgacaagaatctcagagttcctcaaagttgcagagcaagttggaattgacagaggtgatataccagacctttcacaggcccctagcagtcttcttgatgctttggaacaacatttagcttccttggaaggaaagaaaatcaaagattctacagctgcaagcagggcaactacactttccaatgcagtgtcttccctggcaagcactggtctatctctgaccaaagtggatgaaagggaaaagcaggcagcattagaggaagaacaggcacgtttgaaagctttaaaggaacagcgcctaaaagaacttgcaaagaaacctcatacctctttaacaactgcagcctctcctgtatccacctcagcaggagggataatgactgcaccagccattgacatattttctacccctagttcttctaacagcacatcaaagctgcccaatgatctgcttgatttgcagcagccaacttttcacccatctgtacatcctatgtcaactgcttctcaggtagcaagtacatggggaggattcactccttctccagttgcacagccacacccttcagctggccttaatgttgactttgaatctgtgtttggaaataaatctacaaatgttattgtagattctgggggctttgatgaactaggtggacttctcaaaccaacagtggcctctcagaaccagaaccttcctgttgccaaactcccacctagcaagttagtatctgatgacttggattcatctttagccaaccttgtgggcaatcttggcatcggaaatggaaccactaagaatgatgtaaattggagtcaaccaggtgaaaagaagttaactgggggatctaactggcaaccaaaggttgcaccaacaaccgcttggaatgctgcaacaatgaatggcatgcattttccacaatacgcaccccctgtaatggcctatcctgctactacaccaacaggcatgataggatatggaattcctccacaaatgggaagtgttcctgtaatgacgcaaccaaccttaatatacagccagcctgtcatgagacctccaaacccctttggccctgtatcaggagcacagatacagtttatgtaacttgatggaagaaaatggaattactccaaaaagacaagtgctcaagcagcaaaatccttacttccagcaaaatccaaactgctgtctcttaaatctcttaaactctcttcttccattagaatgctacaagtaactcagtgaaggcccatgaaggaaattgggactagtttataggagaacgtatcaatacagtttataaagccaagaattgctatgatttaagactaagatctgtctttttggtgactaacccttcaattctttcaactcctgttaatacccataatcagtaacctatcaagaaaagcccttatttggaaagtgtgaaatttgtatttggaaaagctgcctggagagaagaactgtgtcctttactgtatttcaacaggactcttttgggggatcaaaattaaaattcctaattatgcattatctttcttttctccagtcctcacaaatacagaaacaataactgaaattaacttttctttttttaaaaaaaattatattcagtttgcagtagacattccttaagtatttgtatttatttatgattatcaattttacataacattaatattgtatcagacctccttatgaaaatgagtatggatgtgcacagtatgtttgatttttatccacaagaatgaatctgattcagaatgcttttctcagctgacatacagagcactaaatattttaaggcaagtccataggtctgaatctcttaagaattctcggcctctgtgggatttagggaagcattataaatgcattaatccttatagtcaattctgtgcctaggattttgccagggaacagttcactgactaggaaaagcactacattttaaattcagcattagtgcattgggaaggatctttactgctttgtgcttggcatgtcattattttccatttgacattagggcctttccaaaatgaatgtgaggaattgctttcacttcaagactttccttcttttcactaaaactctagaaggtgttacaagggggagggaaggggggcaaagtccttgaacattttctttggctcgtgccatgttatgatcatataccttttaaataaggggaaatagtatctttaaagttaatgtctagccaagagtttagtaaacgaagaattaaactgcactgttgatcggtgctttgtgtaaatacatctttaacatttgggtggagaggggccttaagaaggacagttcattgtaggaaagcaattctgtacatgagtttaagcattcttgttgcattgtctctgcagattctatttttgtttacaatattaaaatgtatgttagcaaaatgggtggattttcaaataaaatgcagcttccacaaaa

SEQ ID NO: 22140 - DNA, 2049 bp, Homo sapiens
  source 1..2049: mol_type = unassigned DNA
tatgtgtttcctgtcctattccacaccctagagaatgaataccggccagctagtatctaaatttagaatggcagcaacgtgtcgggttttcggagtagagataaacaaaaccaggtgacatttccaagcctctcaaggaaaggggggaaaaaacctttctgggacttaattcagtgcacaaatgagatgaatgtgaacatcccacagttggcagacagtttatttgaaagaactactaatagtagttgggtggtggtcttcaaatctctcattacaactcatcatttgatggtgtatggaaatgagcgttttattcagtatttggcttcaagaaacacgttgtttaacttaagcaattttttggataaaagtggattgcaaggatatgacatgtctacatttattaggcggtatagtagatatttaaatgagaaagcagtttcatacagacaagttgcatttgatttcacaaaagtgaagagaggggctgatggagttatgagaacaatgaacacagaaaaactcctaaaaactgtaccaattattcagaatcagatggatgcacttcttgattttaatgttaatagcaatgaacttacaaatggggtaataaatgctgccttcatgctcctgttcaaagatgccattagactgtttgcagcatacaatgaaggaattattaatttgttggaaaaatattttgatatgaaaaagaaccaatgcaaagaaggtcttgacatctataagaagttcctaactaggatgacaagaatctcagagttcctcaaagttgcagagcaagttggaattgacagaggtgatataccagacctttcacaggcccctagcagtcttcttgatgctttggaacaacatttagcttccttggaaggaaagaaaatcaaagattctacagctgcaagcagggcaactacactttccaatgcagtgtcttccctggcaagcactggtctatctctgaccaaagtggatgaaagggaaaagcaggcagcattagaggaagaacaggcacgtttgaaagctttaaaggaacagcgcctaaaagaacttgcaaagaaacctcatacctctttaacaactgcagcctctcctgtatccacctcagcaggagggataatgactgcaccagccattgacatattttctacccctagttcttctaacagcacatcaaagctgcccaatgatctgcttgatttgcagcagccaacttttcacccatctgtacatcctatgtcaactgcttctcaggtagcaagtacatggggaggattcactccttctccagttgcacagccacacccttcagctggccttaatgttgactttgaatctgtgtttggaaataaatctacaaatgttattgtagattctgggggctttgatgaactaggtggacttctcaaaccaacagtggcctctcagaaccagaaccttcctgttgccaaactcccacctagcaagttagtatctgatgacttggattcatctttagccaaccttgtgggcaatcttggcatcggaaatggaaccactaagaatgatgtaaattggagtcaaccaggtgaaaagaagttaactgggggatctaactggcaaccaaaggttgcaccaacaaccgcttggaatgctgcaacaatggcaccccctgtaatggcctatcctgctactacaccaacaggcatgataggatatggaattcctccacaaatgggaagtgttcctgtaatgacgcaaccaaccttaatatacagccagcctgtcatgagacctccaaacccctttggccctgtatcaggagcacagatacagtttatgtaacttgatggaagaaaatggaattactccaaaaagacaagtgctcaagcagcaaaatccttacttccagcaaaatccaaactgctgtctcttaaatctcttaaactctcttcttccattagaatgctacaagtaactcagtgaaggcccatgaaggaaattgggactagtttataggagaacgtatcaatacagtttataaagccaaga

SEQ ID NO: 22141 - DNA, 3590 bp, Homo sapiens
  source 1..3590: mol_type = unassigned DNA
actggcggccatggaactcaccggtaatagaggacacatctcttaactgggttgctctaagaactgatgtctaaaccgtctcagcatggcctgtagaggaggagctgggaatggccaccgtgcctcagctacactctctcgggttagccctggaagtctttacacatgtagaacccgtacccataatatatgcatggtatctgactttttctacccaaatatgggaggcgtggaaagccacatttaccagctctctcagtgcctgattgaaagagggcataaggttataattgtcacccatgcttatggaaatcgaaaaggcatccgttacctcaccagtggcctcaaagtctattacttgcctctgaaagtcatgtacaaccagtctacagccacgaccctctttcacagtctgccattgctcaggtacatatttgttcgggagagagtcacgataatccattcacatagttctttttctgctatggcccatgatgctctcttccacgccaagacaatggggcttcagacagtcttcacggaccattccctttttggatttgctgatgtcagctcggtgcttacaaacaagcttctaaccgtgtctctttgtgatacaaaccacatcatttgtgtgtcttatactagtaaggaaaatactgtactaagagcagcactgaatcctgaaatagtgtccgtcattcctaatgctgtagatcctactgacttcactccagacccatttagaaggcatgatagtataactattgttgttgtcagcagacttgtttacagaaaagggatcgatttgcttagtggtataatacctgaactctgtcagaaatatccagatttaaatttcataattggaggagagggaccaaagagaatcattttggaagaagttcgggaaagataccagctgcatgacagggtgcgtcttttgggagctttagaacacaaggatgttagaaatgtcttagttcaaggacatatttttctgaatacctcccttactgaagcattctgcatggcgatcgtggaagcagccagttgtggtttacaggttgtaagtaccagagttggtggaattcctgaggtgcttccagaaaaccttattattttatgtgagccttcagtaaaatctttgtgtgaaggattggaaaaggctattttccaactgaagtcagggacattgccagctccagaaaacatccataacatagtaaagactttctacacctggaggaatgttgcagaaagaactgaaaaggtatatgaccgggtatcagtggaagctgtgttgccaatggacaaacgactggacagacttatttctcactgcggcccagtaacaggctacatctttgctttgttggcagttttcaacttcctcttcctcattttcttgagatggatgactccagattctatcattgatgttgcaatagatgccactgggccacggggtgcctggactaataactattctcacagtaaaagagggggtgagaataatgagatatctgaaaccaggtagaaggaagcctagattgtaagattttaaacatttgtaatagttctataaagactatggaaaataaccttgcttttggggggtttttgtttttttagagttaatttagtaagttatgctacctctatatcattcaatattttctgttgaggaaagataaaaatgtatgcaattcctgagtgtagaaacttcttgcacttatttaaaatttaggagagaacatttaagccactcaggtatgcaatttttcagactactgaaatccctgtagcagagatgttttaacattatattttgagagctttgggtgctgaagggccaaacgttttctgggcattttttggccagtttttaatgtaacaccattagacactcaccagatgtttacaagttttctttaggggaactacaacaattatatgaactgttttatatcatgttcatatacatttattaggaatctaaatcatgtctttgaacatttattaggttcactcagtaggtgttacatgtaattaacaggttccttgagtaagatagtccatcagttaccagcacattttgaacccctgctctgtgtagaatgttgaactagatgcttcccgccattaaggaccaggggtgcattcactctttgtttaccattcaaatggcttacttcatcataattgtggttgatatgagatcaatatccaacatgccaaaaatgctcatgccagttaatgccaggaaaaaaatcaccgacacactactagtactttgttcctgttgtatgcattctcctaggtagagcctccatcttcagttgtgtttgtgaaggtattttttgctttttaaatactggggaccgatatcactgttgatagtgcagagaaaccctccacatttttcagtgcataattgagttttctataaatgccttcgtgttttctgagcagaatgtacgaggtgtgccatcccaaaaccagctgctaccctgtccttttaatgtaagtcactccccttcactgtggcctcgctgatgtctgataagtattgtcagtgtgcaaaaggctttacttcagaatggtttatttatagcaaactaagttgaaaattttagaaacagtctttgtgggtggatgttattaactgtcattgttgttgcccagagccatgggttttttaaccccaaattatccacatggtgtgtattatgaattctttgaactcttaaggtttttgtgagaaaaggactgtgaattcaaaacaataaggcacttgtgggtgcactacatagattctgacagtgttgtgattctgtataggatttttaaaaatgacaacattcacaaaatttattactttttaaaaaataacatgcctattaactggttgcactgatataaaagaaatatatttgtgttttgtttgtactaaaatgcaaaagcaagagtgcaatttttaaaatctagaagttaggggttttgttggagaaaaatggactgatctttaaactattcagtcttactgggatttttatgcatagaaactcacatataaacatgaaataaacagtgccagtattcataggaaagtgagaaactgtaatatttggccattattctattcaacaggttttagaggcatgccaccattttttccttatatttttgcttaatttttttaaattgtcatttaattcttaaactgtcatttatttgagatggaaataagatctaaagttagttgcctttgcctgtaaaacatgtgatttgcaaattattatttttcttttttttaacaaatggaagtaaatttgtttcacgtaaatcttaattttcaacctttctggataccttaattgtaactgtcagtttgcactggtcggtatatggaaacacattgctctaccctgctacttagttgattttaaagtgaatttacagtgatgagaaatttgtgaaaaatatattgtatttcttttgatgtttcaaaaggttgcctatgaaaaactgatttgttaaaacatgctacatgtccaaaaataaagaccagaatgacattttgataa

SEQ ID NO: 22142 - DNA, 2943 bp, Homo sapiens
  source 1..2943: mol_type = unassigned DNA
gcgggaggtccggacactggcggccatggaactcaccggtaatagaggacacatctcttaactgggttgctctaagaactgatgtctaaaccgtctcagcatggcctgtagaggaggagctgggaatggccaccgtgcctcagctacactctctcggggatcgatttgcttagtggtataatacctgaactctgtcagaaatatccagatttaaatttcataattggaggagagggaccaaagagaatcattttggaagaagttcgggaaagataccagctgcatgacagggtgcgtcttttgggagctttagaacacaaggatgttagaaatgtcttagttcaaggacatatttttctgaatacctcccttactgaagcattctgcatggcgatcgtggaagcagccagttgtggtttacaggttgtaagtaccagagttggtggaattcctgaggtgcttccagaaaaccttattattttatgtgagccttcagtaaaatctttgtgtgaaggattggaaaaggctattttccaactgaagtcagggacattgccagctccagaaaacatccataacatagtaaagactttctacacctggaggaatgttgcagaaagaactgaaaaggtatatgaccgggtatcagtggaagctgtgttgccaatggacaaacgactggacagacttatttctcactgcggcccagtaacaggctacatctttgctttgttggcagttttcaacttcctcttcctcattttcttgagatggatgactccagattctatcattgatgttgcaatagatgccactgggccacggggtgcctggactaataactattctcacagtaaaagagggggtgagaataatgagatatctgaaaccaggtagaaggaagcctagattgtaagattttaaacatttgtaatagttctataaagactatggaaaataaccttgcttttggggggtttttgtttttttagagttaatttagtaagttatgctacctctatatcattcaatattttctgttgaggaaagataaaaatgtatgcaattcctgagtgtagaaacttcttgcacttatttaaaatttaggagagaacatttaagccactcaggtatgcaatttttcagactactgaaatccctgtagcagagatgttttaacattatattttgagagctttgggtgctgaagggccaaacgttttctgggcattttttggccagtttttaatgtaacaccattagacactcaccagatgtttacaagttttctttaggggaactacaacaattatatgaactgttttatatcatgttcatatacatttattaggaatctaaatcatgtctttgaacatttattaggttcactcagtaggtgttacatgtaattaacaggttccttgagtaagatagtccatcagttaccagcacattttgaacccctgctctgtgtagaatgttgaactagatgcttcccgccattaaggaccaggggtgcattcactctttgtttaccattcaaatggcttacttcatcataattgtggttgatatgagatcaatatccaacatgccaaaaatgctcatgccagttaatgccaggaaaaaaatcaccgacacactactagtactttgttcctgttgtatgcattctcctaggtagagcctccatcttcagttgtgtttgtgaaggtattttttgctttttaaatactggggaccgatatcactgttgatagtgcagagaaaccctccacatttttcagtgcataattgagttttctataaatgccttcgtgttttctgagcagaatgtacgaggtgtgccatcccaaaaccagctgctaccctgtccttttaatgtaagtcactccccttcactgtggcctcgctgatgtctgataagtattgtcagtgtgcaaaaggctttacttcagaatggtttatttatagcaaactaagttgaaaattttagaaacagtctttgtgggtggatgttattaactgtcattgttgttgcccagagccatgggttttttaaccccaaattatccacatggtgtgtattatgaattctttgaactcttaaggtttttgtgagaaaaggactgtgaattcaaaacaataaggcacttgtgggtgcactacatagattctgacagtgttgtgattctgtataggatttttaaaaatgacaacattcacaaaatttattactttttaaaaaataacatgcctattaactggttgcactgatataaaagaaatatatttgtgttttgtttgtactaaaatgcaaaagcaagagtgcaatttttaaaatctagaagttaggggttttgttggagaaaaatggactgatctttaaactattcagtcttactgggatttttatgcatagaaactcacatataaacatgaaataaacagtgccagtattcataggaaagtgagaaactgtaatatttggccattattctattcaacaggttttagaggcatgccaccattttttccttatatttttgcttaatttttttaaattgtcatttaattcttaaactgtcatttatttgagatggaaataagatctaaagttagttgcctttgcctgtaaaacatgtgatttgcaaattattatttttcttttttttaacaaatggaagtaaatttgtttcacgtaaatcttaattttcaacctttctggataccttaattgtaactgtcagtttgcactggtcggtatatggaaacacattgctctaccctgctacttagttgattttaaagtgaatttacagtgatgagaaatttgtgaaaaatatattgtatttcttttgatgtttcaaaaggttgcctatgaaaaactgatttgttaaaacatgctacatgtccaaaaataaagaccagaatgacattttg

SEQ ID NO: 22143 - DNA, 2849 bp, Homo sapiens
  source 1..2849: mol_type = unassigned DNA
gactccggctgcagccgcgggaggtccggacactggcggccatggaactcaccgggatcgatttgcttagtggtataatacctgaactctgtcagaaatatccagatttaaatttcataattggaggagagggaccaaagagaatcattttggaagaagttcgggaaagataccagctgcatgacagggtgcgtcttttgggagctttagaacacaaggatgttagaaatgtcttagttcaaggacatatttttctgaatacctcccttactgaagcattctgcatggcgatcgtggaagcagccagttgtggtttacaggttgtaagtaccagagttggtggaattcctgaggtgcttccagaaaaccttattattttatgtgagccttcagtaaaatctttgtgtgaaggattggaaaaggctattttccaactgaagtcagggacattgccagctccagaaaacatccataacatagtaaagactttctacacctggaggaatgttgcagaaagaactgaaaaggtatatgaccgggtatcagtggaagctgtgttgccaatggacaaacgactggacagacttatttctcactgcggcccagtaacaggctacatctttgctttgttggcagttttcaacttcctcttcctcattttcttgagatggatgactccagattctatcattgatgttgcaatagatgccactgggccacggggtgcctggactaataactattctcacagtaaaagagggggtgagaataatgagatatctgaaaccaggtagaaggaagcctagattgtaagattttaaacatttgtaatagttctataaagactatggaaaataaccttgcttttggggggtttttgtttttttagagttaatttagtaagttatgctacctctatatcattcaatattttctgttgaggaaagataaaaatgtatgcaattcctgagtgtagaaacttcttgcacttatttaaaatttaggagagaacatttaagccactcaggtatgcaatttttcagactactgaaatccctgtagcagagatgttttaacattatattttgagagctttgggtgctgaagggccaaacgttttctgggcattttttggccagtttttaatgtaacaccattagacactcaccagatgtttacaagttttctttaggggaactacaacaattatatgaactgttttatatcatgttcatatacatttattaggaatctaaatcatgtctttgaacatttattaggttcactcagtaggtgttacatgtaattaacaggttccttgagtaagatagtccatcagttaccagcacattttgaacccctgctctgtgtagaatgttgaactagatgcttcccgccattaaggaccaggggtgcattcactctttgtttaccattcaaatggcttacttcatcataattgtggttgatatgagatcaatatccaacatgccaaaaatgctcatgccagttaatgccaggaaaaaaatcaccgacacactactagtactttgttcctgttgtatgcattctcctaggtagagcctccatcttcagttgtgtttgtgaaggtattttttgctttttaaatactggggaccgatatcactgttgatagtgcagagaaaccctccacatttttcagtgcataattgagttttctataaatgccttcgtgttttctgagcagaatgtacgaggtgtgccatcccaaaaccagctgctaccctgtccttttaatgtaagtcactccccttcactgtggcctcgctgatgtctgataagtattgtcagtgtgcaaaaggctttacttcagaatggtttatttatagcaaactaagttgaaaattttagaaacagtctttgtgggtggatgttattaactgtcattgttgttgcccagagccatgggttttttaaccccaaattatccacatggtgtgtattatgaattctttgaactcttaaggtttttgtgagaaaaggactgtgaattcaaaacaataaggcacttgtgggtgcactacatagattctgacagtgttgtgattctgtataggatttttaaaaatgacaacattcacaaaatttattactttttaaaaaataacatgcctattaactggttgcactgatataaaagaaatatatttgtgttttgtttgtactaaaatgcaaaagcaagagtgcaatttttaaaatctagaagttaggggttttgttggagaaaaatggactgatctttaaactattcagtcttactgggatttttatgcatagaaactcacatataaacatgaaataaacagtgccagtattcataggaaagtgagaaactgtaatatttggccattattctattcaacaggttttagaggcatgccaccattttttccttatatttttgcttaatttttttaaattgtcatttaattcttaaactgtcatttatttgagatggaaataagatctaaagttagttgcctttgcctgtaaaacatgtgatttgcaaattattatttttcttttttttaacaaatggaagtaaatttgtttcacgtaaatcttaattttcaacctttctggataccttaattgtaactgtcagtttgcactggtcggtatatggaaacacattgctctaccctgctacttagttgattttaaagtgaatttacagtgatgagaaatttgtgaaaaatatattgtatttcttttgatgtttcaaaaggttgcctatgaaaaactgatttgttaaaacatgctacatgtccaaaaataaagaccagaatgacattttgataattttc

SEQ ID NO: 22144 - DNA, 2196 bp, Homo sapiens
  source 1..2196: mol_type = unassigned DNA
gactgttctgcgcctgctccacgtcactaaactcgctaccgcctgctcccctccagagaccgggggccttccagcagttttcggacccccgagcacagagaccgccaagccaaaggcgagtagcaatccctcggttcggaaacggcgaaaggaaaccgcaaggaggccaccacgtcgggtgggagctacgaagttgcccgttcccggttacttccgggcttgcgagcgacgactgctctcaaaggccaaacttaatggatggacgagcagcgcgctactgcagctttcttccgccttaggaaggtggcggccagggatgaggaggcccctaagcaagtgcggaatggagccggggggcggagatgccagcctcactttgcatggtctccagaaccgctcccacggcaagataaagctgcgaaagagaaagtctaccttgtacttcaacacccaggagaagagcgccaggcgccgcggggatcttcttggagaaaatatttatctgctcttgtttaccatagctttacgaatattaaactgctttttagtgcagacaagttttgttccagatgaatactggcagtctcttgaagtttcacatcacatggttttcaattatggttatttgacttgggaatggacagagagactgaggagttacacttatcccttaatctttgcaagcatttacaagattcttcatcttttagggaaagatagtgttcagttgctgatttggattcctagacttgcccaagcacttctgtctgctgtagcagatgtgagactttactcattaatgaagcaactagaaaatcaggaagtggcaagatgggtgtttttttgccagttgtgctcctggttcacatggtattgctgtaccagaacccttacaaacaccatggaaactgttctcactataattgctcttttctactatcctttggaaggttcaaagtctatgaacagtgtcaaatactcatccctggtggcacttgccttcataattcgtcccacagctgtcattctgtggacacctttgctcttcagacatttctgtcaagaaccaagaaagcttgatcttattctacatcattttttacctgtaggctttgttactttgagtttgtctctgatgattgatcgtattttttttggccaatggactctggttcaatttaattttttgaaatttaacgtgctgcagaactggggaacattttatggttctcatccatggcactggtacttcagtcaaggatttccagttatcttgggtactcacttacccttctttattcatggctgctatctagcaccaaagagataccggatacttttggtgactgtgctgtggacactgcttgtttatagcatgttgagccacaaagaattcaggtttatttatccagttttaccattctgtatggtgttctgtggatactcattaacccacctgaaaacatggaagaaaccagctctaagtttcctgtttttatcaaatttgttcctcgccctttatactggtttagttcatcaacgaggtactcttgatgtcatgagtcatattcaaaaagtttgttacaacaatcccaataaatcttcagcttcaatatttataatgatgccttgccactctactccttattacagccatgttcactgcccacttcccatgagatttctccagtgcccgccagacctgactggaaaaagtcattatcttgatgaagcagatgtattttacctaaatcccttaaactggttacatagagagtttcatgatgatgcatcattgcctactcacttgatcaccttcagcattttggaagaggaaataagcgctttcctaatttcaagcaattataaaagaactgctgttttcttccacactcacttgccagagggtcgaattggaagtcacatatatgtctatgaacggaagttaaaagggaaattcaacatgaagatgaaattctgaactttcctagataaattaacattgctgggtggaaatattcagatgctgcttaaatacttcggtaaacactgggtaagattcatggaacttagaaaaaagctgtatgaactgctttaccaaatatcactactgaggaaatgtataaaataccacatagtataaaattacatgttaatacaatgccagattttaaataaagacctttagttttcctc

SEQ ID NO: 22145 - DNA, 1812 bp, Homo sapiens
  source 1..1812: mol_type = unassigned DNA
actaaactcgctaccgcctgctcccctccagagaccgggggccttccagcagttttcggacccccgagcacagagaccgccaagccaaaggcgagtagcaatccctcggttcggaaacggcgaaaggaaaccgcaaggaggccaccacgtcgggtgggagctacgaagttgcccgttcccggttacttccgggcttgcgagcgacgactgctctcaaaggccaaacttaatggatggacgagcagcgcgctactgcagctttcttccgccttaggaaggtggcggccagggatgaggaggcccctaagcaagtgcggaatggagccggggggcggagatgccagcctcactttgcatggtctccagaaccgctcccacggcaagataaagctgcgaaagagaaagtctaccttgtacttcaacacccaggagaagagcgccaggcgccgcggggtttttttgccagttgtgctcctggttcacatggtattgctgtaccagaacccttacaaacaccatggaaactgttctcactataattgctcttttctactatcctttggaaggttcaaagtctatgaacagtgtcaaatactcatccctggtggcacttgccttcataattcgtcccacagctgtcattctgtggacacctttgctcttcagacatttctgtcaagaaccaagaaagcttgatcttattctacatcattttttacctgtaggctttgttactttgagtttgtctctgatgattgatcgtattttttttggccaatggactctggttcaatttaattttttgaaatttaacgtgctgcagaactggggaacattttatggttctcatccatggcactggtacttcagtcaaggatttccagttatcttgggtactcacttacccttctttattcatggctgctatctagcaccaaagagataccggatacttttggtgactgtgctgtggacactgcttgtttatagcatgttgagccacaaagaattcaggtttatttatccagttttaccattctgtatggtgttctgtggatactcattaacccacctgaaaacatggaagaaaccagctctaagtttcctgtttttatcaaatttgttcctcgccctttatactggtttagttcatcaacgaggtactcttgatgtcatgagtcatattcaaaaagtttgttacaacaatcccaataaatcttcagcttcaatatttataatgatgccttgccactctactccttattacagccatgttcactgcccacttcccatgagatttctccagtgcccgccagacctgactggaaaaagtcattatcttgatgaagcagatgtattttacctaaatcccttaaactggttacatagagagtttcatgatgatgcatcattgcctactcacttgatcaccttcagcattttggaagaggaaataagcgctttcctaatttcaagcaattataaaagaactgctgttttcttccacactcacttgccagagggtcgaattggaagtcacatatatgtctatgaacggaagttaaaagggaaattcaacatgaagatgaaattctgaactttcctagataaattaacattgctgggtggaaatattcagatgctgcttaaatacttcggtaaacactgggtaagattcatggaacttagaaaaaagctgtatgaactgctttaccaaatatcactactgaggaaatgtataaaataccacatagtataaaattacatgttaatacaatgccagattttaaataaagacctttagttttcctc

SEQ ID NO: 22146 - DNA, 1499 bp, Homo sapiens
  source 1..1499: mol_type = unassigned DNA
cggacccggaagtgcttggccacagtcgcagccccggcgccccgaagcgggaaaaaggctgggtgccgccgtcccccagctgcgcaaccctaggaactctcgggttcacagtctctctttttctaggaacttggctgtgttgtcctgcctcagagacaaattcatctattgtaggcctagcccctgcctttgaaaacaaggaaaggttggtagaacatcaacacagcatggaatttccagggaggtctcatttcaaaacttcataaagaacaagaaccacctggacttctgtgagggcgatgattaaactggcctgagtttgaatgaaaggataatgtatgctcaacctgtgactaacaccaaggaggtcaagtggcagaaggtcttgtatgagcgacagccctttcctgataactatgtggaccggcgattcctggaagagctccggaaaaacatccatgctcggaaataccaatattgggctgtggtatttgagtccagtgtggtgatccagcagctgtgcagtgtttgtgtttttgtggttatctggtggtatatggatgagggtcttctggccccccattggcttttagggactggtctggcttcttcactgattgggtatgttttgtttgatctcattgatggaggtgaagggcggaagaagagtgggcagacccggtgggctgacctgaagagtgccctagtcttcattactttcacttatgggttttcaccagtgctgaagacccttacagagtctgtcagcactgacaccatctatgccatgtcagtcttcatgctgttaggccatctcatcttttttgactatggtgccaatgctgccattgtatccagcacactatccttgaacatggccatctttgcttctgtatgcttggcatcacgtcttccccggtccctgcatgccttcatcatggtgacatttgccattcagatttttgccctgtggcccatgttgcagaagaaactaaaggcatgtactccccggagctatgtgggggtcacactgctttttgcattttcagccgtgggaggcctactgtccattagtgctgtgggagccgtactctttgcccttctgctgatgtctatctcatgtctgtgtccattctacctcattcgcttgcagctttttaaagaaaacattcatgggccttgggatgaagctgaaatcaaggaagacttgtccaggttcctcagttaaattaggacatccattacattattaaagcaagctgatagattagcctcctaactagtatagaacttaaagacagagttccattctggaagcagcatgtcattgtggtaagagaatagagatcaaaaccaaaaaaaatgaaccaaaggcttgggtggtgagggtgcttatcctttctgttattttgtagatgaaaaaactttctggggacctcttgaattacatgctgtaacatatgaagtgatgtggtttctattaaaaaaataacacatcc

SEQ ID NO: 22147 - DNA, 1447 bp, Homo sapiens
  source 1..1447: mol_type = unassigned DNA
gccccggcgccccgaagcgggaaaaaggctgggtgccgccgtcccccagctgcgcaaccctaggaactctcgggaacttggctgtgttgtcctgcctcagagacaaattcatctattgtaggcctagcccctgcctttgaaaacaaggaaaggttggtagaacatcaacacagcatggaatttccagggaggtctcatttcaaaacttcataaagaacaagaaccacctggacttctgtgagggcgatgattaaactggcctgagtttgaatgaaaggataatgtatgctcaacctgtgactaacaccaaggaggtcaagtggcagaaggtcttgtatgagcgacagccctttcctgataactatgtggaccggcgattcctggaagagctccggaaaaacatccatgctcggaaataccaatattgggctgtggtatttgagtccagtgtggtgatccagcagctgtgcagtgtttgtgtttttgtggttatctggtggtatatggatgagggtcttctggccccccattggcttttagggactggtctggcttcttcactgattgggtatgttttgtttgatctcattgatggaggtgaagggcggaagaagagtgggcagacccggtgggctgacctgaagagtgccctagtcttcattactttcacttatgggttttcaccagtgctgaagacccttacagagtctgtcagcactgacaccatctatgccatgtcagtcttcatgctgttaggccatctcatcttttttgactatggtgccaatgctgccattgtatccagcacactatccttgaacatggccatctttgcttctgtatgcttggcatcacgtcttccccggtccctgcatgccttcatcatggtgacatttgccattcagatttttgccctgtggcccatgttgcagaagaaactaaaggcatgtactccccggagctatgtgggggtcacactgctttttgcattttcagccgtgggaggcctactgtccattagtgctgtgggagccgtactctttgcccttctgctgatgtctatctcatgtctgtgtccattctacctcattcgcttgcagctttttaaagaaaacattcatgggccttgggatgaagctgaaatcaaggaagacttgtccaggttcctcagttaaattaggacatccattacattattaaagcaagctgatagattagcctcctaactagtatagaacttaaagacagagttccattctggaagcagcatgtcattgtggtaagagaatagagatcaaaaccaaaaaaaatgaaccaaaggcttgggtggtgagggtgcttatcctttctgttattttgtagatgaaaaaactttctggggacctcttgaattacatgctgtaacatatgaagtgatgtggtttctattaaaaaaataacacatcca

SEQ ID NO: 22148 - DNA, 2630 bp, Homo sapiens
  source 1..2630: mol_type = unassigned DNA
cccggaagtgcttggccacagtcgcagccccggcgccccgaagcgggaaaaaggctgggtgccgccgtcccccagctgcgcaaccctaggaactctcgggtaggtgggttccgtgtaacggtcagtgtttccggggctccttttcctctgctgcctcccgcagacccaaggctgagtgaggggcggcggcggaagtgggaggcccacccaaaaagccaaatggggtgccagaagagtgaaggcgcaccctggggtcaccctaccctaccccgtcccctcccagccccactctgcgggcgggcgctgcccttttgggcgtcgcagaccctccaaccccggcggcggccttaagattcccgggctgggatccctgctgcagagggggtaacggtgtctggcttgccaagcaatatttgttgtggtctatcatggaagaaataaagtcgggcaatatgaattttttttttctcaaatttgccggatggctgtggtgtttctgactcttagttttctcattgtgaaaaaggaatgattatcttcttcgatcctctcaagagtttccttgttttgagtagattgatagctctttaaaggatgctaagctcagctaatggaagaagagtctagtttctttgaggctttgattttggttaaactatagagctcatacctttctgtatggtgcagcttactattgtctttggattggtaacttaaaaaatacaaataacatgcctttgagaaccaataaaaactatggatattatccctataaatttacacaaatccagatataagcatgcaatgtgatatacctaagggatatgtgaaccactgagttaagaactgctttagagggagatacaatgtgagacacaggctttgggataagactttggtttgaatcctggctctgctctgttaccttagggcaaagttacttaagcatcttgaatctcagcttttttaccaaagcaggactaatactaacttacaaggtggtgaggattaagtgaaagaagatacataaggcacttagcacatagtaggtactcaataagcgatagctaacagatgtctattattattcaaggaattataattttcaaatctgaaatgcagttttaatgtcccataaggtgactaccacatacatttttctcagacttttagtaaactgagttgatttgactttatctcagtactactcttgacctttcacaactttcgtaggttcacagtctctctttttctaggaacttggctgtgttgtcctgcctcagagacaaattcatctattgtaggcctagcccctgcctttgaaaacaaggaaaggttggtagaacatcaacacagcatggaatttccagggaggtctcatttcaaaacttcataaagaacaagaaccacctggacttctgtgagggcgatgattaaactggcctgagtttgaatgaaaggataatgtatgctcaacctgtgactaacaccaaggaggtcaagtggcagaaggtcttgtatgagcgacagccctttcctgataactatgtggaccggcgattcctggaagagctccggaaaaacatccatgctcggaaataccaatattgggctgtggtatttgagtccagtgtggtgatccagcagctgtgcagtgtttgtgtttttgtggttatctggtggtatatggatgagggtcttctggccccccattggcttttagggactggtctggcttcttcactgattgggtatgttttgtttgatctcattgatggaggtgaagggcggaagaagagtgggcagacccggtgggctgacctgaagagtgccctagtcttcattactttcacttatgggttttcaccagtgctgaagacccttacagagtctgtcagcactgacaccatctatgccatgtcagtcttcatgctgttaggccatctcatcttttttgactatggtgccaatgctgccattgtatccagcacactatccttgaacatggccatctttgcttctgtatgcttggcatcacgtcttccccggtccctgcatgccttcatcatggtgacatttgccattcagatttttgccctgtggcccatgttgcagaagaaactaaaggcatgtactccccggagctatgtgggggtcacactgctttttgcattttcagccgtgggaggcctactgtccattagtgctgtgggagccgtactctttgcccttctgctgatgtctatctcatgtctgtgtccattctacctcattcgcttgcagctttttaaagaaaacattcatgggccttgggatgaagctgaaatcaaggaagacttgtccaggttcctcagttaaattaggacatccattacattattaaagcaagctgatagattagcctcctaactagtatagaacttaaagacagagttccattctggaagcagcatgtcattgtggtaagagaatagagatcaaaaccaaaaaaaatgaaccaaaggcttgggtggtgagggtgcttatcctttctgttattttgtagatgaaaaaactttctggggacctcttgaattacatgctgtaacatatgaagtgatgtggtttctattaaaaaaataacacatcca

SEQ ID NO: 22149 - DNA, 1372 bp, Homo sapiens
  source 1..1372: mol_type = unassigned DNA
ttttgcccgcccctccctttctgcgactggctgttaggcgtgggtctccgccccacagccctgcgcctgcgcgtgggcctgggccgcccgtcgtacctgatggtaggaggcagtagttccccgcttcccttccgcgggagggagagttagctagccatccaagaaaacaccatgaaagataacgatatcaagagactactgtatacccatcttttatgcatattttcaattatcctaagtgtcttcattccatcactcttcttggagaacttctcaatattggaaacacacttgacatggttgtgcatctgttctggttttgtaactgctgtcaatctagtactatatttagtagtgaaaccaaatacatcctctaaaagaagttcattatcacacaaggtaactggatttttgaaatgctgtatctactttcttatgtcttgtttctcctttcatgtaatttttgttctgtatggagcaccactgatagagttggcattggaaacatttttatttgcagttattttgtctacttttactactgtgccttgcttatgtttgttaggaccaaacctcaaagcatggctaagagtgttcagtagaaatggagttacatccatatgggagaatagtctccagatcactacaatttctagctttgtaggagcatggcttggagcacttcctattccactggattgggaaagaccatggcaggtatggcccatctcctgtacgcttggagcgacctttggctacgtggctggccttgttatttcaccactctggatatactggaatagaaagcaacttacatacaagaacaattaactggagcaaagggagatatttctttgtgcagattctgtaagggctgggcagaaatgtgtatggtcaaagccaagcagttccatttacagctctgttttttacgtagttacaacatgatgtgattgtagctttttaaactatgaaacccctgagagattgtaccttctagttgaaataaagtatttataatagattgtggcttcagatgctgcttactgcttcttaaacctttaaggaacattcttaatacactttatagaattctgaggacaggttttgttttctttcaagttttgaactgcttcattacctataaaaggtctgggtatagctgtagcatttcatttgctttctgagagaaatggacagtttccttggccactgaagatgtttctcacgtaattaaacaacagtttatacatcttgatcctattcttttttttacagtgtgtttctttggagttaaaatggctatgatagcctcatcaaaaacagtcttcaatcccttctgggttaaagctgaacattccacatagcagca

SEQ ID NO: 22150 - DNA, 1061 bp, Homo sapiens
  source 1..1061: mol_type = unassigned DNA
gcgcgtgggcctgggccgcccgtcgtacctgatggtaggaggcagtagttccccgcttcccttccgcgggagggagagttagctagccatccaagaaaacaccatgaaagataacgatatcaagagactactgtatacccatcttttatgcatattttcaattatcctaagtgtcttcattccatcactcttcttggagaacttctcaatattggaaacacacttgacatggttgtgcatctgttctggttttgtaactgctgtcaatctagtactatatttagtagtgaaaccaaatacatcctctaaaagaagttcattatcacacaaggtaactggatttttgaaatgctgtatctactttcttatgtcttgtttctcctttcatgtaatttttgttctgtatggagcaccactgatagagttggcattggaaacatttttatttgcagttattttgtctacttttactactgtgccttgcttatgtttgttaggaccaaacctcaaagcatggctaagagtgttcagtagaaatggagttacatccatatgggagaatagtctccagatcactacaatttctagctttgtaggagcatggcttggagcacttcctattccactggattgggaaagaccatggcagatgacagtagaaagaaaacgtagcacttatagatctctccatgtaccctgcagggggcttggtactgtgaaatgagtaacttaatcctgacaaccgtagtgcaaggtatggcccatctcctgtacgcttggagcgacctttggctacgtggctggccttgttatttcaccactctggatatactggaatagaaagcaacttacatacaagaacaattaactggagcaaagggagatatttctttgtgcagattctgtaagggctgggcagaaatgtgtatggtcaaagccaagcagttccatttacagctctgttttttacgtagttacaacatgatgtgattgtagctttttaaactatgaaacccctgagagattgtaccttctagttgaaataaagtatttataataga

SEQ ID NO: 22151 - DNA, 619 bp, Homo sapiens
  source 1..619: mol_type = unassigned DNA
gccgcccgtcgtacctgatggtaggaggcagtagttccccgcttcccttccgcgggagggagagttaggtaagccccgctggacgccctcggcgtctcgcctcacgaggtgcaagctacccccgcgaattgccgaagcagccctgagccttggcgccccgacccgccggcgctcgccgtcagctcagcgccactcttccggcgtgccctgatggacagaccccctttcggatccgagttttcgcctctgtcccccagttttcccttgtcttcaactcccatgctctttgatcctgcctctcagctggttcctcgctgcccacgcttgcgccggcgtaggctcgggcagaatcccgagggacccgggttggggtggggctgccggtgaaggtgcggcgatgcccgcgaaggctcctctgggtgccgctcggaagagccttctctccgctgcgctagccatccaagaaaacaccatgaaagataacgatatcaagagactactgtatacccatcttttatgcatattttcaattatcctaagtgtcttcattccatcactcttcttggagaacttctcaatattggaaacacacttgacatggttgtgcatctgttctggt

SEQ ID NO: 22152 - DNA, 1926 bp, Homo sapiens
  source 1..1926: mol_type = unassigned DNA
ggtgcgggaagtctgaagccggtaaacatggccgtcaccgacagcctcagccgggctgcgactgtcttggcaactgtgttgctcttgtccttcggcagcgtggccgctagtcatatcgaggatcaagcagaacaattctttagaagtggccatacaaacaactgggctgttctggtgtgtacatcccgattctggtttaattatcgacatgttgcaaataccctttctgtttatagaagtgtcaagaggctaggtattcctgacagtcacattgtcctaatgcttgcagatgatatggcctgtaatcctagaaatcccaaaccagctacagtgtttagtcacaagaatatggaactaaatgtgtatggagatgatgtggaagtggattatagaagttacgaggtaactgtggagaattttttacgggtattaactgggaggatcccacctagtactcctcggtcaaaacgtcttctttctgatgacagaagcaatattctaatttatatgacagggcatggtggaaatggtttcttaaaatttcaagattctgaagaaattaccaacatagaactcgcggatgcttttgaacaaatgtggcagaaaagacgctacaatgagctactgtttattattgatacttgccaaggagcatccatgtatgaacgattttattctcctaacataatggctctagctagtagtcaagtgggagaagattcactctcgcatcaacctgatcctgcaattggagtccatcttatggatagatacacattttatgtcttggaatttttggaagaaattaacccagctagccaaactaatatgaatgacctttttcaggtatgtcccaaaagtctgtgtgtgtctactcctggacatcgcactgatctttttcagagggatcctaaaaatgtactgataactgatttctttggaagtgtacggaaagtggaaattacaacagagactattaaattgcaacaggattcagaaatcatggaaagcaggtattcatcttaaaccattatttgaatagaatactagtctcacagtttgtacatttttttgaaacattgtattaagaggcaaaagttggtgtttgtaaataaaattacacatttatacccagtcttcactttatgtaggctgtatgcttttcagatttatatgtaaaaactatcaatattagtggaaactaagatcatcgttaggattatgttggagctccaaaagacaatcttgctagtggttcagtttgatacttgccacaaaggcctaaaacttttcccataactggctatcccagcgccataattttctgttaggcctcctggtaacattagggaaaggaatgagaagtgtaaaccaggtactgccttggggagtgaattgtatgtgagtgagcagtgagtgagtacagacatttgtaagagagaggaagttgggagacattggttcactttgggtatgtgaattttagaaatacttataatttgttttattttctctgtaaccatttttaaaggtaaaatactttattagaaataaataatgggtcagtcaatagctactttcttgaaatatataatggcatatgttgttagccatgaaactttgttatttgtgattatctgttgctatctattagaaactcatactatagggaacttttttggattgaaaaatggcaatatatacaattacagcaattttcaaaatttcaaagatttgtaattgagcttatgaatgttgtaggaataaattcaaacactggcacaagatgcttttctttgattctagttacaacagtttctttttttttaattgatgtataatatttgtacatatttttggggtacatgtgatattttgatacctgtgtacagtgtttaatgattaaatcagggtaactggaatatc

SEQ ID NO: 22153 - DNA, 4596 bp, Homo sapiens
  source 1..4596: mol_type = unassigned DNA
gcgggaagtctgaagccggtaaacatggccgtcaccgacagcctcagccgggctgcgactgtcttggcaactgtgttgctcttgtccttcggcagcgtggccgctagtcatatcgaggatcaagcagaacaattctttagaagtggccatacaaacaactgggctgttctggtgtgtacatcccgattctggtttaattatcgacatgttgcaaataccctttctgtttatagaagtgtcaagaggctaggtattcctgacagtcacattgtcctaatgcttgcagatgatatggcctgtaatcctagaaatcccaaaccagctacagtgtttagtcacaagaatatggaactaaatgtgtatggagatgatgtggaagtggattatagaagttacgaggtaactgtggagaattttttacgggtattaactgggaggatcccacctagtactcctcggtcaaaacgtcttctttctgatgacagaagcaatattctaatttatatgacagggcatggtggaaatggtttcttaaaatttcaagattctgaagaaattaccaacatagaactcgcggatgcttttgaacaaatgtggcagaaaagacgctacaatgagctactgtttattattgatacttgccaaggagcatccatgtatgaacgattttattctcctaacataatggctctagctagtagtcaagtgggagaagattcactctcgcatcaacctgatcctgcaattggagtccatcttatggatagatacacattttatgtcttggaatttttggaagaaattaacccagctagccaaactaatatgaatgacctttttcaggtatgtcccaaaagtctgtgtgtgtctactcctggacatcgcactgatctttttcagagggatcctaaaaatgtactgataactgatttctttggaagtgtacggaaagtggaaattacaacagagactattaaattgcaacaggattcagaaatcatggaaagcagctataaggaagaccagatggatgagaaactaatggaacctctgaaatatgctgaacaacttcctgtagctcagataatacaccagaaaccgaagctgaaagactggcatcctcctgggggctttattctgggattatgggcacttattatcatggttttcttcaaaacttatggaattaagcatatgaagttcattttttagacttgatgatgaatgaagaatgcatggaggactgcaaacttggataataatttatgtcattatatatttttaaaaatgtgtttctcttgtatgaattggaaataagtataaggaaactaaatttgaatcaactattaattttataacttaaagaaaaataattgttaatgcaactgcttaatggcactaaatatattccagttttgtattttgtgtattataaaagcgaatgagacagagatcagaatacattgactgtttttgaaaatagtaatttccccttatccccttttcatttggaaaagaaacaattgtgaagacattaaattctcactaacagaagtaactttggttaattattttttgtatatcctcccaatcttttgacttatgcacatattttttcccaatatggagatcatatggaatgtactattttgtaatgtcttttttcattttacaatgtattatcaaccttttccctctcaaaaatacattgtgaatgactgcatagtattcactttatgaatatttaattcatttcacagtcttctattgttggaccacttacattgtaccaaatgttttcctttggtttattctttaatgtattaatattttactgctggtcactcatggaatcctgcagctttaattaaaagcaaagatgaaaaattggttttttaatctatggcactgacaatctccaggaccttatatgtttgttgtcagtttatttgggaaattttagacctttgataatttcacgtactgactgctcaagagaaacataccccattgtttttcatttgtaagcgttctgtgatcttctacaattggtcacgtcctcttcattttccatcttgaaagagagagccaacaaggactttatttcattctgttttaggtaaacctccttgcccactggctgtatctatactttccttgagaaaaatcccataaagtggatggacctgtgaagaaaatgtatgcttatggcctagccttcatgtctggctgatgtatcctataaggcagtaagccccttttctagtctctggtaagatgcaagagctcatatccccatcactgacattttagtttggaaataatattgagactgtgctatgaccaacccctgatgttgttttttcttttcaaacttttgcatatgagtagaggaaaagcctaaaagttaagtatttatgtctggggggataccttcaggtgtcttatctgttttatgcaagaatttatgtgttcatctttattcagtgcaaagatttttttttaaattttgtttataattgtaggtaacattaagacaactcttcctccacaagaaaacctcctaaaattaatattccttaagatttgtttttccttttgcacttataatattaccttttaattgcatgcaagattgtcatacttttcaaaaggcaaaggattgactgtgttatctccctagttagaacaaatgatattgaggctttttgccagctctgaatctttattttaattgatctttttattgatgtgttatataaatgaggaagaaaaattttgtctgattatgtgaaggatctttctgtacatgaaaagaagggaaaataaacttgcaattgaatagactgattatagtagcactgagacacaaaaagattgaccatgttgccctccagacactcatacaaggtcgtggacaccacggtgaggcggagctatttagggtggtaaaggaattatgattgttcttgagccaaagtaatttagtttgaatataatgaaacataccctgtaaagactgctagaaagtaaaaggattcgtcttcagaggttgtagaaggtgcccttcttagttaaaaccaaactgggaaaagtaatactggataaaatattcaggataaattttgcctcagcagaatttcaaagggcagttgttcctctgtttcattattgaatcttcagaatatagttaaagccaaaagcttaaaatatgttaaatgtttcacttataaccataatctttttacatagagcatactctgccttcataataactaaatcctctgcatgtggtagatgagtacgtttaggaaatattgtcagtgcaattaaatggcctacactttaaacagtatcataaaaacaaatccttaaatatattctacttgagtcacaaaagctgaacaacagaaaggtgttttgtttttgcctttctcacagtgttgtggtgagaatcagatgagatagtattttgactaaacacttctgaaattgtaaatatatggtggcattattgttcttatgtcggcttaggaggataccaaaggggaagttaatggtcacagtgcacttatgtagctttctaagctactcaatgtgattcttgttctctttgctgttctttttctcctcccccatggtgtccttcagagagaaaaggaatgtagataaatgaatccctgcagatgtgtcctgacatttcagggagggacagggtataatgatgccatcctgcaaaggcagcctgtgtgagaaaaagaaatcaaataatgtggattttaaaattacgaaagacattcatttgcagtttatgaaaggaaaatgtagtttggatacaaagctgattaaattggatcaagaaatattagaattaaatgcaaaaaataatccatgcatttatggttttgatttttatatattcccagctagttgaaaatgatgattcccacaagaagcataactcagcttgtttctgcttactgagtattttctactatggtatatattgataacatttcttccattatgtatgttgtataccagagttacagttactgtgggaatcataatttgaaattttgactcctgtgtttctggaatctttacaacaaatgttgcattaacatataacttttttcagttgactttaccaaaattaagcccatctttagtagatactgttttaacatgtgaaagaaatacgttataaacataccacaagatatggctataaaacaatgagatcagtatccatttttgctttaaagaattggccttattgcttcagtgtcacatctcatactcaagggcatttactacaaagaaagagttctccaatattgctgttctgttgctgcctgccctatttacacatgtacctgctacttaaataggaaagcctttcaattcatggacaatacaccttggtggtaaccaggcttttatttttatttttttttcttagtgtaaaaactgtactgttttggaaatgtgctgtgaaatattaggtttaactgtgtagatcctagaataaggggatttatatagatgaagttgtaaccaagaaactggttattaaaaatttatttactccaa

SEQ ID NO: 22154 - DNA, 1357 bp, Homo sapiens
  source 1..1357: mol_type = unassigned DNA
aggtgcgggaagtctgaagccggtaaacatggccgtcaccgacagcctcagccgggctgcgactgtcttggcaactgtgttgctcttgtccttcggcagcgtggccgctagtcatatcgaggatcaagcagaacaattctttagaagtggccatacaaacaactgggctgttctggtaactgtggagaattttttacgggtattaactgggaggatcccacctagtactcctcggtcaaaacgtcttctttctgatgacagaagcaatattctaatttatatgacagggcatggtggaaatggtttcttaaaatttcaagattctgaagaaattaccaacatagaactcgcggatgcttttgaacaaatgtggcagaaaagacgctacaatgagctactgtttattattgatacttgccaaggagcatccatgtatgaacgattttattctcctaacataatggctctagctagtagtcaagtgggagaagattcactctcgcatcaacctgatcctgcaattggagtccatcttatggatagatacacattttatgtcttggaatttttggaagaaattaacccagctagccaaactaatatgaatgacctttttcaggtatgtcccaaaagtctgtgtgtgtctactcctggacatcgcactgatctttttcagagggatcctaaaaatgtactgataactgatttctttggaagtgtacggaaagtggaaattacaacagagactattaaattgcaacaggattcagaaatcatggaaagcagctataaggaagaccagatggatgagaaactaatggaacctctgaaatatgctgaacaacttcctgtagctcagataatacaccagaaaccgaagctgaaagactggcatcctcctgggggctttattctgggattatgggcacttattatcatggttttcttcaaaacttatggaattaagcatatgaagttcattttttagacttgatgatgaatgaagaatgcatggaggactgcaaacttggataataatttatgtcattatatatttttaaaaatgtgtttctcttgtatgaattggaaataagtataaggaaactaaatttgaatcaactattaattttataacttaaagaaaaataattgttaatgcaactgcttaatggcactaaatatattccagttttgtattttgtgtattataaaagcgaatgagacagagatcagaatacattgactgtttttgaaaatagtaatttccccttatccccttttcatttggaaaagaaacaattgtgaagacattaaattctcactaacagaagtaactttggttaattattttttgtat

SEQ ID NO: 22155 - DNA, 4318 bp, Homo sapiens
  source 1..4318: mol_type = unassigned DNA
aggtgcgggaagtctgaagccggtaaacatggccgtcaccgacagcctcagccgggctgcgactgtcttggcaactgtgttgctcttgtccttcggcagcgtggccgctagtcatatcgaggtaactgtggagaattttttacgggtattaactgggaggatcccacctagtactcctcggtcaaaacgtcttctttctgatgacagaagcaatattctaatttatatgacagggcatggtggaaatggtttcttaaaatttcaagattctgaagaaattaccaacatagaactcgcggatgcttttgaacaaatgtggcagaaaagacgctacaatgagctactgtttattattgatacttgccaaggagcatccatgtatgaacgattttattctcctaacataatggctctagctagtagtcaagtgggagaagattcactctcgcatcaacctgatcctgcaattggagtccatcttatggatagatacacattttatgtcttggaatttttggaagaaattaacccagctagccaaactaatatgaatgacctttttcaggtatgtcccaaaagtctgtgtgtgtctactcctggacatcgcactgatctttttcagagggatcctaaaaatgtactgataactgatttctttggaagtgtacggaaagtggaaattacaacagagactattaaattgcaacaggattcagaaatcatggaaagcagctataaggaagaccagatggatgagaaactaatggaacctctgaaatatgctgaacaacttcctgtagctcagataatacaccagaaaccgaagctgaaagactggcatcctcctgggggctttattctgggattatgggcacttattatcatggttttcttcaaaacttatggaattaagcatatgaagttcattttttagacttgatgatgaatgaagaatgcatggaggactgcaaacttggataataatttatgtcattatatatttttaaaaatgtgtttctcttgtatgaattggaaataagtataaggaaactaaatttgaatcaactattaattttataacttaaagaaaaataattgttaatgcaactgcttaatggcactaaatatattccagttttgtattttgtgtattataaaagcgaatgagacagagatcagaatacattgactgtttttgaaaatagtaatttccccttatccccttttcatttggaaaagaaacaattgtgaagacattaaattctcactaacagaagtaactttggttaattattttttgtatatcctcccaatcttttgacttatgcacatattttttcccaatatggagatcatatggaatgtactattttgtaatgtcttttttcattttacaatgtattatcaaccttttccctctcaaaaatacattgtgaatgactgcatagtattcactttatgaatatttaattcatttcacagtcttctattgttggaccacttacattgtaccaaatgttttcctttggtttattctttaatgtattaatattttactgctggtcactcatggaatcctgcagctttaattaaaagcaaagatgaaaaattggttttttaatctatggcactgacaatctccaggaccttatatgtttgttgtcagtttatttgggaaattttagacctttgataatttcacgtactgactgctcaagagaaacataccccattgtttttcatttgtaagcgttctgtgatcttctacaattggtcacgtcctcttcattttccatcttgaaagagagagccaacaaggactttatttcattctgttttaggtaaacctccttgcccactggctgtatctatactttccttgagaaaaatcccataaagtggatggacctgtgaagaaaatgtatgcttatggcctagccttcatgtctggctgatgtatcctataaggcagtaagccccttttctagtctctggtaagatgcaagagctcatatccccatcactgacattttagtttggaaataatattgagactgtgctatgaccaacccctgatgttgttttttcttttcaaacttttgcatatgagtagaggaaaagcctaaaagttaagtatttatgtctggggggataccttcaggtgtcttatctgttttatgcaagaatttatgtgttcatctttattcagtgcaaagatttttttttaaattttgtttataattgtaggtaacattaagacaactcttcctccacaagaaaacctcctaaaattaatattccttaagatttgtttttccttttgcacttataatattaccttttaattgcatgcaagattgtcatacttttcaaaaggcaaaggattgactgtgttatctccctagttagaacaaatgatattgaggctttttgccagctctgaatctttattttaattgatctttttattgatgtgttatataaatgaggaagaaaaattttgtctgattatgtgaaggatctttctgtacatgaaaagaagggaaaataaacttgcaattgaatagactgattatagtagcactgagacacaaaaagattgaccatgttgccctccagacactcatacaaggtcgtggacaccacggtgaggcggagctatttagggtggtaaaggaattatgattgttcttgagccaaagtaatttagtttgaatataatgaaacataccctgtaaagactgctagaaagtaaaaggattcgtcttcagaggttgtagaaggtgcccttcttagttaaaaccaaactgggaaaagtaatactggataaaatattcaggataaattttgcctcagcagaatttcaaagggcagttgttcctctgtttcattattgaatcttcagaatatagttaaagccaaaagcttaaaatatgttaaatgtttcacttataaccataatctttttacatagagcatactctgccttcataataactaaatcctctgcatgtggtagatgagtacgtttaggaaatattgtcagtgcaattaaatggcctacactttaaacagtatcataaaaacaaatccttaaatatattctacttgagtcacaaaagctgaacaacagaaaggtgttttgtttttgcctttctcacagtgttgtggtgagaatcagatgagatagtattttgactaaacacttctgaaattgtaaatatatggtggcattattgttcttatgtcggcttaggaggataccaaaggggaagttaatggtcacagtgcacttatgtagctttctaagctactcaatgtgattcttgttctctttgctgttctttttctcctcccccatggtgtccttcagagagaaaaggaatgtagataaatgaatccctgcagatgtgtcctgacatttcagggagggacagggtataatgatgccatcctgcaaaggcagcctgtgtgagaaaaagaaatcaaataatgtggattttaaaattacgaaagacattcatttgcagtttatgaaaggaaaatgtagtttggatacaaagctgattaaattggatcaagaaatattagaattaaatgcaaaaaataatccatgcatttatggttttgatttttatatattcccagctagttgaaaatgatgattcccacaagaagcataactcagcttgtttctgcttactgagtattttctactatggtatatattgataacatttcttccattatgtatgttgtataccagagttacagttactgtgggaatcataatttgaaattttgactcctgtgtttctggaatctttacaacaaatgttgcattaacatataacttttttcagttgactttaccaaaattaagcccatctttagtagatactgttttaacatgtgaaagaaatacgttataaacataccacaagatatggctataaaacaatgagatcagtatccatttttgctttaaagaattggccttattgcttcagtgtcacatctcatactcaagggcatttactacaaagaaagagttctccaatattgctgttctgttgctgcctgccctatttacacatgtacctgctacttaaataggaaagcctttcaattcatggacaatacaccttggtggtaaccaggcttttatttttatttttttttcttagtgtaaaaactgtactgttttggaaatgtgctgtgaaatattaggtttaactgtgtagatcctagaataaggggatttatatagatgaagttgtaaccaagaaactggttattaaaaatttatttactccaa

SEQ ID NO: 22156 - DNA, 1137 bp, Homo sapiens
  source 1..1137: mol_type = unassigned DNA
agtgctgcttacccatcatggaagcaatgtggctcctgtgtgtggcgttggcggtcttggcatggggcttcctctgggtttgggactcctcagaacgaatgaagagtcgggagcagggaggacggctgggagccgaaagccggaccctgctggtcatagcgcaccctgacgatgaagccatgttttttgctcccacagtgctaggcttggcccgcctaaggcactgggtgtacctgctttgcttctctgcaggaaattactacaatcaaggagagactcgtaagaaagaacttttgcagagctgtgatgttttggggattccactctccagtgtaatgattattgacaacagggatttcccagatgacccaggcatgcagtgggacacagagcacgtggccagagtcctccttcagcacatagaagtgaatggcatcaatctggtggtgactttcgatgcagggggagtaagtggccacagcaatcacattgctctgtatgcagctgtgagggccctgcactcagaagggaagttacctaaagggtgctctgtgctcacgcttcagtctgtgaatgtgctgcgcaagtacatctcccttctggatctgcccttgtctctgcttcatacgcaggatgtcctcttcgtgctcaacagcaaagaagtggcacaggccaagaaagccatgtcctgccaccgcagccagctcctctggttccgccgcctctacattatcttctcccggtacatgagaatcaactcactgagcttcctctgaagccttgaagggttttcagatccaaggaacaaaggggaaaatagacaaaggagtgcagaggacctggcctggcactggcttatttacctgagctcaaggagatccccgctggagcagcctctgcaaaagggagcccatgtaggccaggggctgtccaaactccagcttcttcccctgggaaaaaacccaaagaaccaaaaacaaaccaccccaaggataataatagctacactgctagcttctcaagttcttgtgaaaaacaatttacataatgacacagtagatgtggaacacctagcccagtgcctgggcaggtccctattatcataaatgaacataaaagtgctctaaaaacactcca

SEQ ID NO: 22157 - DNA, 913 bp, Homo sapiens
  source 1..913: mol_type = unassigned DNA
agtgctgcttacccatcatggaagcaatgtggctcctgtgtgtggcgttggcggtcttggcatggggcttcctctgggtttgggactcctcagaacgaatgaagagtcgggagcagggaggacggctgggagccgaaagccggaccctgctggtcatagcgcaccctgacgatgaagccatgttttttgctcccacagtgctaggcttggcccgcctaaggcactgggtgtacctgctttgcttctctgcaggaaattactacaatcaaggagagactcgtaagaaagaacttttgcagagctgtgatgttttggggattccactctccagtgtaatgattattgacaacagggatttcccagatgacccaggcatgcagtgggacacagagcacgtggccagagtcctccttcagcacatagaagtgaatggcatcaatctggtggtgactttcgatgcagggggagtaagtggccacagcaatcacattgctctgtatgcagctgtgagggtgctctgtgctcacgcttcagtctgtgaatgtgctgcgcaagtacatctcccttctggatctgcccttgtctctgcttcatacgcaggatgtcctcttcgtgctcaacagcaaagaagtggcacaggccaagaaagccatgtcctgccaccgcagccagctcctctggttccgccgcctctacattatcttctcccggtacatgagaatcaactcactgagcttcctctgaagccttgaagggttttcagatccaaggaacaaaggggaaaatagacaaaggagtgcagaggacctggcctggcactggcttatttacctgagctcaaggagatccccgctggagcagcctctgcaaaagggagcccatgtaggccaggggctgtccaaactccagcttc

SEQ ID NO: 22158 - DNA, 4322 bp, Homo sapiens
  source 1..4322: mol_type = unassigned DNA
agcggaagcgagaccgtccatccagaggaaggcaagtttttggctcgggcggctgagaagaccgcgcggggctggagacaggtagcagtacgggggcggggcttcatgccggatgtgatagtctgcagtcgtttcggttggcagcctggcgggtgggagatgcggcggccacctgctgcaaagaaccgaagggaaggttagaagtacgaaggcagtttggagctggggctaagcagctgtcgcacggtcagatcatgggctccaccaagcactggggcgaatggctcctgaacttgaaggtggctccagccggcgtctttggtgtggcctttctagccagagtcgccctggttttctatggcgtcttccaggaccggaccctgcacgtgaggtatacggacatcgactaccaggtcttcaccgacgccgcgcgcttcgtcacggaggggcgctcgccttacctgagagccacgtaccgttacaccccgctgctgggttggctcctcactcccaacatctacctcagcgagctctttggaaagtttctcttcatcagctgcgacctcctcaccgctttcctcttataccgcctgctgctgctgaaggggctggggcgccgccaggcttgtggctactgtgtcttttggcttcttaaccccctgcctatggcagtatccagccgcggtaatgcggactctattgtcgcctccctggtcctgatggtcctctacttgataaagaaaagactcgtcgcgtgtgcagctgtattctatggtttcgcggtgcatatgaagatatatccagtgacttacatccttcccataaccctccacctgcttccagatcgcgacaatgacaaaagcctccgtcaattccggtacactttccaggcttgtttgtacgagctcctgaaaaggctgtgtaatcgggctgtgctgctgtttgtagcagttgctggactcacgttttttgccctgagctttggtttttactatgagtacggctgggaatttttggaacacacctacttttatcacctgactaggcgggatatccgtcacaacttttctccgtacttctacatgctgtatttgactgcagagagcaagtggagtttttccctgggaattgctgcattcctgccacagctcatcttgctttcagctgtgtctttcgcctattacagagacctcgttttttgttgttttcttcatacgtccatttttgtgacttttaacaaagtctgcacctcccagtactttctttggtacctctgcttactgcctcttgtgatgccactagtcagaatgccttggaaaagagctgtagttctcctaatgttatggtttatagggcaggccatgtggctggctcctgcctatgttctagagtttcaaggaaagaacacctttctgtttatttggttagctggtttgttctttcttcttatcaattgttccatcctgattcaaattatttcccattacaaagaagaacccctgacagagagaatcaaatatgactagtgtatgttccacaccctctgctactgtgttacattctgattgtcttgtatggaccagaagagagctttgggacattttttctgaacattctaagcattctagtgaaagttcccatgttccaacagaacttaaaagcaatgtttgccttatatataaaagggacacaataattgaggtccaccttctaggaaatcctaggactcgtttatttgggacatggtgggaataaaggtcacatattggaaaatggaaaggctgatgaaactatcagatactaaaacattcttaaaatagaggaatatagttagagacatcaggtttaagccagtatttgttcctgttttacaatgcttctgtcttaagctgtgtcttaacttttaacacccatcttttctttctaaagctttcctgacagctgtgaaaatccaaaaaatattcttaaactgtgtatggtggcccttgcctgtagtctcagcactttgggaggctgaggtgggagggtcgcttgagttcaggagttctagacccacctggggcaagatggtgagacctagtctcaaaaaaaaaaaaaaaaattagccaggtgttgtggtgcacccctgtagtcatagctgcatgggaggctgaggtgggagaattgcttgagcccagagcaagaccctgtctcaaaaaaaaaaaaaaaaaaaaaaaggaaaggacaactttttagatagaaaagtattaaataatactaagatgcttagtagtattattttagagagttttaaacttctatattaaatgtggggtcttacaagataatccaaagactttgggaggccaaggcgggcagatcacgaggtcaggagattgagaccatcctggctaacacggtgaaacccctctctactaaaaatacaaaaaattagccgggcgtggtgggtgcctgtagtcccagctactcctcgggaggctgaggcaggagaatggcgtgaactccggaggtggagcctgtagtgagccgagatggcaccactgcgctccagcctgggcgacagagcaagactccatatcaaaaaaaaaaaaaaaaaaagataatccaaagaatttaaattgtaatcatgtttcatgtatttgttttattacttacttttatagcacttagtcccagtggtattagactgctatttggtttcatacaaaaaggattaaatttaaattcattcatgtttagacttgagttattacatttttaaaactatcatcttgcctttaatgtttgtggtcctacacaaactattagtacatttcagtatcctcttacccctttgtttttaagtttttgattgctaaagcaagacttttttcttctagaatttaagtcaaccaagtgttatctatgttgtaaaaatggataatagtagattttaggtgataaaacaacttgttagtaagacatttcctagcttaaaaaaaaaaatcaaaaattccatgatagaaatgcagacctgtgagggaaactcctgaaaagcataagaagcatcccagagagccatgggttttctagaccagagaatttagagggagattgtggaactgaggcttaggtggtcagatcgtttcccttatcactgtaatatttctgggggaaaaatgctttctgagttgtttaaacaagcatccttacatttttttttttaattaaacagcctgtctaggcttgggattccctaatactacagtagcagtatatgaatatgattttgtgattgtgttttttaaaagataagtaatttgatgaactgttcttttgcagtcagaaaacactcacaaaaagacaaaaaaagttccacagtattatatttcatgtcagttcaggcctaaaatcctttgcaaataagatgtttataggctggtcacaattaacaatgttattattggcagcacttcttggatggataccttttgggacctttcattagaaagagggaaagaatggggtggttttgtatgggctcctgtttggggtaaaaatagcagagtcagttgctgaggacaatgaccttccttataacatttagtttcatacccatattaggtcttgtcttgaggaccctttatatgtgcttgtttactagtggccttccagccatagcattcttacctttttttcctattctaagaattaaaaaaaaaaattatagagccagcaagggaggaggcaggaaacagaaatcgaatttcatcattccagtatagttgtccctttttttgtatttctgacttggttttataattatatttacttactaattattgttttttaacattctttattgtggcttactcttcatacttagaattgaaattgttggacatcacatgtatattcacattataaatacatcattcttccactgttagacctttagattgcttccagtttttaatattctaaataagactttcaacattttctgtgttttagctcattctcttaggacattcttagaagttagaaacatttctgctgggatcgttggagggaacttcaaactttggaatctttcctgcaagaaattctttaccaaagaaaggcaggtgtttcttaaagggatgcaaaagatattttgcactttgtatgttccaaaacatttagtaagttaactaaaaaaatgagttaatttggtttcttgggggattttaattttttaatttgttttctggttatgtaaaaaaaatgttttttttttgcttcttatcacaatccttttgtttcctttttaatcctttaataacaccttcaaattttataag

SEQ ID NO: 22159 - DNA, 4873 bp, Homo sapiens
  source 1..4873: mol_type = unassigned DNA
gagaattatcgcgatagcagcagcggccgggcaggtattgggggcgttccggaattgaggggtggttgtagtggtggcttaggaataccctcccggctatcgcttcagtgggtagaggggaccactgcccgagagctttaatggagctgggtcctgccttcgcgctgaggagccctcgttttcgagatcaggcctgaccgggataagctccagaaacagtattatgtctcagtcctgtgcaaagtgagatgagctgtagcctttggagacctataattttgaacatagatgttccttaaaagctaaatctttttgaacagatgatgataaacctggaagagattcaccaacaatagcaaattacacactggcttggaaagtactcccatgttccgtttgatcttggcaatttaatgctgttcttgaagactaattagttacactggatatgctgctgttctttactttgggattgcttatacattttgtgttcttcgcctccatctttgacatttattttacatctcctttggttcatggaatgactcctcagtttacaccattgcctcctccagcgagaagattagtgttgtttgttgctgatggccttcgagcagatgcactttacgaattagatgaaaatggaaactctagagcaccgtttattaggaatatcataatgcatgaaggcagctggggcatatctcatacacgtgtgccaacagaatctcggccaggtcatgtagctctgatagctgggttttatgaagatgtcagtgcagttgccaaaggatggaaggaaaatcctgtagagtttgattctctttttaatgaaagtaaatacacatggagctggggaagcccagatatcctgcctatgtttgccaaaggtgctagtggagaccacgtttatacatatagttatgatgctaaaagagaggattttggtgctcaagatgcaacaaaactggatacgtgggtttttgataatgttaaggacttctttcatcatgccagaaacaaccagtctttgttttctaaaataaatgaagagaaaatagtttttttcttacatttattaggaatagatacaaacggacatgctcatcgaccatcctcgagagactacaagcacaatattaaaaaagttgatgatggagttaaagaaatcgtgtctatgtttaaccacttctatggaaatgatgggaaaacaacatttatctttacctctgaccatggaatgacagactggggttcccatggggctggtcatccttcagagactttaactcctttagtcacttggggagctggaatcaagtatccccaaagagtatcagctcagcaatttgatgatgcatttttgaaagagtggagattggagaattggaagaggctagatgtcaatcaggctgatattgcaccattgatgacttcccttattggagttccctttcctcttaactcagtgggaatccttcctgtggattatcttaacaacactgatctcttcaaagcagagagcatgtttacaaatgcagtacagattcttgaacagttcaaggtgaaaatgactcagaagaaagaagttactttaccatttttgtttacaccatttaaactgctttctgattccaaacagttcaacattttaagaaaagcaagatcttatataaaacacagaaagtttgatgaagtggtctccctttgcaaggagctaattcatcttgcattgaaaggattgtcctattatcacacatatgacagattctttttgggcgtcaatgttgttattggttttgtgggatggatatcttatgcctctttgttgatcatcaagtctcattccaaccttataaaaggtgttagtaaagaagtgaagaaaccaagccatctcctgccttgtagttttgtagctattggcattttagtagcattttttctgctgattcaagcctgtccctggacatattatgtatatggtttgttgccactgccaatatggtatgcggttctaagagaatttcaagttattcaggaccttgttgtatcagtgttgacctatcctctgagccattttgttgggtacctgttagcctttaccctgggaattgaagtattagttctcagttttttctaccgctatatgcttaccgctggacttactgcctttgcagcttggccatttctcactcggctgtggactcgagcaaagatgacctcactgagttggactttcttctctttgctcctggcagtgttcccactgatgccggttgtaggtcgaaagccagacatctctctagtgatgggtgcaggcttgctggttcttctgttatccctgtgtgttgtaacatctctcatgaaaagaaaagatagctttataaaggaagagctattggtacatctgttacaggtgctgagcacagtgctctccatgtatgttgtgtatagcactcagagtagtctactcaggaagcaaggactgcctctcatgaatcaaattattagctgggcaacattagcctcttccttggttgtgccactactgagttctccagttctctttcagcgattgttcagcatacttctttcattgatgtcaacctacctacttctaagcacagggtatgaagctctctttccactagtgttgtcttgtttgatgtttgtctggataaacatagaacaagaaactctacaacaatctggtgtttgctgtaaacaaaagctcaccagtatccagttctcttataatactgatataactcagtttcgacagctatatctggatgacatccgtagggcctttttccttgttttcttcttagtgacagcattttttggaactggaaatatagcttctattaacagctttgatcttgcctctgtctattgctttctgactgtgttcagtccttttatgatgggagccctgatgatgtggaagattttaatcccctttgttcttgttatgtgtgcttttgaagcagttcagttgactactcagttatcgtcaaaaagcctttttctcattgttctcgtcatatcagacattatggctttgcattttttcttcttggtcaaggattatggcagctggcttgatattgggacaagcatcagccactatgtgattgtcatgtccatgaccatctttttggtgttcctcaatggcctggcccagctgctcacaacgaagaaactcagactatgtggcaaacccaaaagtcacttcatgtgaggttgctgaagcaccattcagcatctggatcctgattctccttttaagctaaaatctcatcaaggcttcaataagaagatggatatggatatatagtatattctactcctgtaaggaaaatggtatttggaattccgaattgacaggttatctggaacaaaggagcttctttttttttctaggttttgcaggcatgaaatagtgattatatctgtggaaaagcataggaaggcattctcctttttcatttttttcctttggctggcagctcttcccagtgatgttgagagcacctgcagcaatctggtccccagtcgcacaacttcccacatacccagaggagagcatatgcctgtgggggcagtgctgatggcatccagagtcattgctgtggctgagctggaaggaaatcaccaggtgccaccgtcaatatttatcagctttcagcactggttttgttagacagtcagggtgtattatttcaagagcttcaataaaaaaagtgtttgcaggtatttgtcatatttctttagtatgcaataatgctatcttatcctttttagtgctatttctcaggttttctcagtcaaccagctagatgcatgtgatgcatgtctatccttcactttttttttttcatttctggattttcctgggatttctgacaacacaaaagtagaaagtgcttggtatttctgtcttatacataggaaaacatttaaaataaatagtttttaattgtaggctcaacatctgttaccccatagctttttcgtatattgtttctttccctttgaatttctttttactgtcatctattattttaacaggagttaaaataactcctgttaaactttctgacaatatcataagaattcatattaaaggtgttattctttctggttgtgagattctagcacaaaggcctaaaatcatcaaattagatttccatttgtaaacaaattctaatgggcaaaatatcttgagagcagtttttatatggattatccataaaatgacctttacatatccctgcagagttggccttttgcccgtggtgtgctagtagctttggctgatgctaagctttcctggtatgcgccctatttttaagaagtaattgcttttgaattaagttatagcattactaattcatgttaatgactaggaaaccctctgtaatttacaagatttttcaaattggtggggagtgaataaatacaatttaaaagtcagaaatcagtttggcaaagtgtactttcttaatttctatttatgatgaagtatagtcataatttatttgtaatactactttatggtataccagtgaaagaactgtagtataaaaaagaggtattaatgttttatgaaatctcatgcatcagttcatagcataaaatctagctggacaactaagaagctatggtagcaaacagtgatgttgatggaatgagaatcatgaactttcatattacctcaaaggatttttttatcagtttttttcacacatcagaaaaaactgactgtataaacacttatcactgacctttttctatgtgtagttttgccttttatcttttcccaaatttttataaagagaaattaataaatattttattacaacattgt

SEQ ID NO: 22160 - DNA, 4796 bp, Homo sapiens
  source 1..4796: mol_type = unassigned DNA
gagaattatcgcgatagcagcagcggccgggcaggtattgggggcgttccggaattgaggggtggttgtagtggtggcttaggaataccctcccggctatcgcttcagtgggtagaggggaccactgcccgagagctttaatggagctgggtcctgccttcgcgctgaggagccctcgttttcgagatcaggcctgaccgggataagctccagaaacagtattatgtctcagtcctgtgcaaagtgagatgagctgtagcctttggagacctataattttgaacatagatgttccttaaaagctaaatctttttgaacagatgatgataaacctggaagctgttcttgaagactaattagttacactggatatgctgctgttctttactttgggattgcttatacattttgtgttcttcgcctccatctttgacatttattttacatctcctttggttcatggaatgactcctcagtttacaccattgcctcctccagcgagaagattagtgttgtttgttgctgatggccttcgagcagatgcactttacgaattagatgaaaatggaaactctagagcaccgtttattaggaatatcataatgcatgaaggcagctggggcatatctcatacacgtgtgccaacagaatctcggccaggtcatgtagctctgatagctgggttttatgaagatgtcagtgcagttgccaaaggatggaaggaaaatcctgtagagtttgattctctttttaatgaaagtaaatacacatggagctggggaagcccagatatcctgcctatgtttgccaaaggtgctagtggagaccacgtttatacatatagttatgatgctaaaagagaggattttggtgctcaagatgcaacaaaactggatacgtgggtttttgataatgttaaggacttctttcatcatgccagaaacaaccagtctttgttttctaaaataaatgaagagaaaatagtttttttcttacatttattaggaatagatacaaacggacatgctcatcgaccatcctcgagagactacaagcacaatattaaaaaagttgatgatggagttaaagaaatcgtgtctatgtttaaccacttctatggaaatgatgggaaaacaacatttatctttacctctgaccatggaatgacagactggggttcccatggggctggtcatccttcagagactttaactcctttagtcacttggggagctggaatcaagtatccccaaagagtatcagctcagcaatttgatgatgcatttttgaaagagtggagattggagaattggaagaggctagatgtcaatcaggctgatattgcaccattgatgacttcccttattggagttccctttcctcttaactcagtgggaatccttcctgtggattatcttaacaacactgatctcttcaaagcagagagcatgtttacaaatgcagtacagattcttgaacagttcaaggtgaaaatgactcagaagaaagaagttactttaccatttttgtttacaccatttaaactgctttctgattccaaacagttcaacattttaagaaaagcaagatcttatataaaacacagaaagtttgatgaagtggtctccctttgcaaggagctaattcatcttgcattgaaaggattgtcctattatcacacatatgacagattctttttgggcgtcaatgttgttattggttttgtgggatggatatcttatgcctctttgttgatcatcaagtctcattccaaccttataaaaggtgttagtaaagaagtgaagaaaccaagccatctcctgccttgtagttttgtagctattggcattttagtagcattttttctgctgattcaagcctgtccctggacatattatgtatatggtttgttgccactgccaatatggtatgcggttctaagagaatttcaagttattcaggaccttgttgtatcagtgttgacctatcctctgagccattttgttgggtacctgttagcctttaccctgggaattgaagtattagttctcagttttttctaccgctatatgcttaccgctggacttactgcctttgcagcttggccatttctcactcggctgtggactcgagcaaagatgacctcactgagttggactttcttctctttgctcctggcagtgttcccactgatgccggttgtaggtcgaaagccagacatctctctagtgatgggtgcaggcttgctggttcttctgttatccctgtgtgttgtaacatctctcatgaaaagaaaagatagctttataaaggaagagctattggtacatctgttacaggtgctgagcacagtgctctccatgtatgttgtgtatagcactcagagtagtctactcaggaagcaaggactgcctctcatgaatcaaattattagctgggcaacattagcctcttccttggttgtgccactactgagttctccagttctctttcagcgattgttcagcatacttctttcattgatgtcaacctacctacttctaagcacagggtatgaagctctctttccactagtgttgtcttgtttgatgtttgtctggataaacatagaacaagaaactctacaacaatctggtgtttgctgtaaacaaaagctcaccagtatccagttctcttataatactgatataactcagtttcgacagctatatctggatgacatccgtagggcctttttccttgttttcttcttagtgacagcattttttggaactggaaatatagcttctattaacagctttgatcttgcctctgtctattgctttctgactgtgttcagtccttttatgatgggagccctgatgatgtggaagattttaatcccctttgttcttgttatgtgtgcttttgaagcagttcagttgactactcagttatcgtcaaaaagcctttttctcattgttctcgtcatatcagacattatggctttgcattttttcttcttggtcaaggattatggcagctggcttgatattgggacaagcatcagccactatgtgattgtcatgtccatgaccatctttttggtgttcctcaatggcctggcccagctgctcacaacgaagaaactcagactatgtggcaaacccaaaagtcacttcatgtgaggttgctgaagcaccattcagcatctggatcctgattctccttttaagctaaaatctcatcaaggcttcaataagaagatggatatggatatatagtatattctactcctgtaaggaaaatggtatttggaattccgaattgacaggttatctggaacaaaggagcttctttttttttctaggttttgcaggcatgaaatagtgattatatctgtggaaaagcataggaaggcattctcctttttcatttttttcctttggctggcagctcttcccagtgatgttgagagcacctgcagcaatctggtccccagtcgcacaacttcccacatacccagaggagagcatatgcctgtgggggcagtgctgatggcatccagagtcattgctgtggctgagctggaaggaaatcaccaggtgccaccgtcaatatttatcagctttcagcactggttttgttagacagtcagggtgtattatttcaagagcttcaataaaaaaagtgtttgcaggtatttgtcatatttctttagtatgcaataatgctatcttatcctttttagtgctatttctcaggttttctcagtcaaccagctagatgcatgtgatgcatgtctatccttcactttttttttttcatttctggattttcctgggatttctgacaacacaaaagtagaaagtgcttggtatttctgtcttatacataggaaaacatttaaaataaatagtttttaattgtaggctcaacatctgttaccccatagctttttcgtatattgtttctttccctttgaatttctttttactgtcatctattattttaacaggagttaaaataactcctgttaaactttctgacaatatcataagaattcatattaaaggtgttattctttctggttgtgagattctagcacaaaggcctaaaatcatcaaattagatttccatttgtaaacaaattctaatgggcaaaatatcttgagagcagtttttatatggattatccataaaatgacctttacatatccctgcagagttggccttttgcccgtggtgtgctagtagctttggctgatgctaagctttcctggtatgcgccctatttttaagaagtaattgcttttgaattaagttatagcattactaattcatgttaatgactaggaaaccctctgtaatttacaagatttttcaaattggtggggagtgaataaatacaatttaaaagtcagaaatcagtttggcaaagtgtactttcttaatttctatttatgatgaagtatagtcataatttatttgtaatactactttatggtataccagtgaaagaactgtagtataaaaaagaggtattaatgttttatgaaatctcatgcatcagttcatagcataaaatctagctggacaactaagaagctatggtagcaaacagtgatgttgatggaatgagaatcatgaactttcatattacctcaaaggatttttttatcagtttttttcacacatcagaaaaaactgactgtataaacacttatcactgacctttttctatgtgtagttttgccttttatcttttcccaaatttttataaagagaaattaataaatattttattacaacattgt

SEQ ID NO: 22161 - DNA, 2020 bp, Homo sapiens
  source 1..2020: mol_type = unassigned DNA
cacgcccgcccccgcgctcgctggctcccacccggggagggtcgttgtgcgcctgcgccagggtgggggttgccgtcgcgcctaggcctttccctcaggttttcctcttccccactgcggctccccagtcggcgcttgcgcggagaactcagcgctgagattgtctaaagccccaggaaaaatggtggaaaattcaccgtcgccattgccagaaagagcgatttatggctttgttcttttcttaagctcccaatttggcttcatactttacctcgtgtgggcctttattcctgaatcttggctaaactctttaggtttaacctattggcctcaaaaatattgggcagttgcattacctgtctacctccttattgctatagtaattggctacgtgctcttgtttgggattaacatgatgagtacctctccactcgactccatccatacaatcacagataactatgcaaaaaatcaacagcagaagaaataccaagaggaggccattccagccttaagagatatttctattagtgaagtaaaccaaatgttctttcttgcagccaaagaactttacaccaaaaactgaactgtgtgtaaccatagtaacaccaagcacgtatttatttataagtttttgccattataattttgaccataaattaatttgaccatctctcttattaatagagaagtaaaaaatgtaagttgaccttctcttagattatgttcaatgaatattgtaaatgttcaagtattgttaatgaatagaataaatacaatattgcattcccatatagcagacttaaaaaaaaaaatcaatgtcagtataatcaagaagttcctccagagaggcatttatattgtaatttgcaaagggcaatgatgtccttcctcctgtttgtcctgaggggcccagaattcaaacccttagtttttgggaagggtacagttagtacttgtgccatcagattcatgtctaagacacaaatatttgttgagtactcactgtgtaccaggtatttttctaggcactgaggatgaagtaatggtaagattctctctcaaagagcttatagttttagaagcagggtgaggcaactaagcaaataaacaaggaaatataatttgatgagtgctatgcaaagaattaagataatgtattctagaatgcaaagggatgactagttcacattgggtggtcaaggaaggcctctcagagagaggctgttgggatctaagtataaagcaggtgaggcaaagaccataaggtgggaaggaacttggtttgtcctaagaacagagagaagactggcattgggcatagagcataccaaacaagagagaatgtggtcccaggtgagcctggagagaccgggcccagattgtgaagggctttgtaggctggtgtaggaagtgtggatttaagtgtaagtgtgatgagtttgaggcactttaggatcaagctgttgggagtcttgaaggaaaggaatgacatggcctgatttctgtttttaaaagtcatcctgattggtgaatgaagaatagattcagaggaggagctgggaaggggacaataaccatatccttacccagtaagcatgagatggataacatgaatctgcttttcctgttccctagtttgtcccagttcctgttattttatggtgagagcatgtcaccacacttaagagcagtataaggggactggatgtggtggttcatgcctgtaatcccagcactttgggaggttgaggcagctggatcacctgaggtcaggagttggagaccagcctggccaacatggcaaaacctcatatctactaaaaatacaaaaattagtcaggcgtggtggcaggcgtctgtaatcccagctactcgggaggctgaggcaggagaattgcttgagcctgggaggcagagattgcagtgagccgagatcatgccactgcactccagccttagcaacagagcgagacggttaccttggcaaccgtctcaaaaaaaaaagaaacaaaaaaaa

SEQ ID NO: 22162 - DNA, 972 bp, Homo sapiens
  source 1..972: mol_type = unassigned DNA
gagccgcgggatcacgcccgcccccgcgctcgctggctcccacccggggagggtcgttgtgcgcctgcgccagggtgggggttgccgtcgcgcctaggcctttccctcaggttttcctcttccccactgcggctccccagtcggcgcttgcgcggagaactcagcgctgagattgtctaaagccccaggaaaaatggtggaaaattcaccgtcgccattgccagaaagagcgatttatggctttgttcttttcttaagctcccaatttggcttcaaaaatctgaagggatctcgtgtttgctgagtgttccgtgtgccagcactagcctaggaggttttagtctctacaaatatttatacagcaccagacgcgatggcaaagtggataaagcctggtccctgcccttaaggaggtcgtggtcttgtggaggagacagatggtactttacctcgtgtgggcctttattcctgaatcttggctaaactctttaggtttaacctattggcctcaaaaatattgggcagttgcattacctgtctacctccttattgctatagtaattggctacgtgctcttgtttgggattaacatgatgagtacctctccactcgactccatccatacaatcacagataactatgcaaaaaatcaacagcagaagaaataccaagaggaggccattccagccttaagagatatttctattagtgaagtaaaccaaatgttctttcttgcagccaaagaactttacaccaaaaactgaactgtgtgtaaccatagtaacaccaagcacgtatttatttataagtttttgccattataattttgaccataaattaatttgaccatctctcttattaatagagaagtaaaaaatgtaagttgaccttctcttagattatgttcaatgaatattgtaaatgttcaagtattgttaatgaatagaataaatacaatattgcattcccata

SEQ ID NO: 22163 - DNA, 688 bp, Homo sapiens
  source 1..688: mol_type = unassigned DNA
gaatgggcagggcccggggcctgggcgccgcgacctagtaggcccgcatgctgattgtctaaagccccaggaaaaatggtggaaaattcaccgtcgccattgccagaaagagcgatttatggctttgttcttttcttaagctcccaatttggcttcatactttacctcgtgtgggcctttattcctgaatcttggctaaactctttaggtttaacctattggcctcaaaaatattgggcagttgcattacctgtctacctccttattgctatagtaattggctacgtgctcttgtttgggattaacatgatgagtacctctccactcgactccatccatacaatcacagataactatgcaaaaaatcaacagcagaagaaataccaagaggaggccattccagccttaagagatatttctattagtgaagtaaaccaaatgttctttcttgcagccaaagaactttacaccaaaaactgaactgtgtgtaaccatagtaacaccaagcacgtatttatttataagtttttgccattataattttgaccataaattaatttgaccatctctcttattaatagagaagtaaaaaatgtaagttgaccttctcttagattatgttcaatgaatattgtaaatgttcaagtattgttaatgaatagaataaatacaatattgcattcccata

SEQ ID NO: 22164 - DNA, 656 bp, Homo sapiens
  source 1..656: mol_type = unassigned DNA
ctcagcgctgaggtggccgagattgtctaaagccccaggaaaaatggtggaaaattcaccgtcgccattgccagaaagagcgatttatggctttgttcttttcttaagctcccaatttggcttcatactttacctcgtgtgggcctttattcctgaatcttggctaaactctttaggtttaacctattggcctcaaaaatattgggcagttgcattacctgtctacctccttattgctatagtaattggctacgtgctcttgtttgggattaacatgatgagtacctctccactcgactccatccatacaatcacagataactatgcaaaaaatcaacagcagaagaaataccaagaggaggccattccagccttaagagatatttctattagtgaagtaaaccaaatgttctttcttgcagccaaagaactttacaccaaaaactgaactgtgtgtaaccatagtaacaccaagcacgtatttatttataagtttttgccattataattttgaccataaattaatttgaccatctctcttattaatagagaagtaaaaaatgtaagttgaccttctcttagattatgttcaatgaatattgtaaatgttcaagtattgttaatgaatagaataaatacaatattgcattcccata

SEQ ID NO: 22165 - DNA, 803 bp, Homo sapiens
  source 1..803: mol_type = unassigned DNA
ggccgaggtgtcgggaggggcctgggtgggcgtatgaaggacccgaggtcgagggcccccccataccccgcctcgaatgagaaatagaagtctccacgaatgggcagggcccggggcctgggcgccgcgacctagtaggcccgcatgctggtgggcgccgcgcgagccttgttccctgccctcccctcccacagggaggccacgcttgcagagctggagcgcgcgtctatcgccccagaacccccctccctgccctatcctccgccaccccttctgttgcggggcgcgcgccagcctgggtgtctgtatgcgctcgaggcgggggcgcgggttgcggacggaggcgcgggaggcggttctgcgcggcgggggccgtacccgcggcggagcgaggaggcgagaatggatcaatggtgccacggagcacatcgctggcgctgattgtgttccttttccacagattgtctaaagccccaggaaaaatggtggaaaattcaccgtcgccattgccagaaagagcgatttatggctttgttcttttcttaagctcccaatttggcttcaaaaatctgaagggatctcgtgtttgctgagtgttccgtgtgccagcactagcctaggaggttttagtctctacaaatatttatacagcaccagacgcgatggcaaagtggataaagcctggtccctgcccttaaggaggtcgtggtcttgtggaggagacagatggtactttacctcgtgtgggcctttattcctgaatcttggctaaactctttaggtttaacctattggcctcaaaa

SEQ ID NO: 22166 - DNA, 3437 bp, Homo sapiens
  source 1..3437: mol_type = unassigned DNA
tcccacagggaggccacgcttgcagagctggagcgcgcgtctatcgccccagaacccccctccctgccctatcctccgccaccccttctgttgcggggcgcgcgccagcctgggtgtctgtatgcgctcgaggcgggggcgcgggttgcggacggaggcgcgggaggcggttctgcgcggcgggggccgtacccgcggcggagcgaggaggcgagaatggatcaatggtgccacggagcacatcgctggcgctgattgtgttccttttccacagattgtctaaagccccaggaaaaatggtggaaaattcaccgtcgccattgccagaaagagcgatttatggctttgttcttttcttaagctcccaatttggcttcatactttacctcgtgtgggcctttattcctgaatcttggctaaactctttaggtttaacctattggcctcaaaaatattgggcagttgcattacctgtctacctccttattgctatagtaattggctacgtgctcttgtttgggattaacatgatgagtacctctccactcgactccatccatacaatcacagataactatgcaaaaaatcaacagcagaagaaataccaagaggaggccattccagccttaagagatatttctattagtgaagtaaaccaaatgttctttcttgcagccaaagaactttacaccaaaaactgaactgtgtgtaaccatagtaacaccaagcacgtatttatttataagtttttgccattataattttgaccataaattaatttgaccatctctcttattaatagagaagtaaaaaatgtaagttgaccttctcttagattatgttcaatgaatattgtaaatgttcaagtattgttaatgaatagaataaatacaatattgcattcccatatagcagacttaaaaaaaaaaatcaatgtcagtataatcaagaagttcctccagagaggcatttatattgtaatttgcaaagggcaatgatgtccttcctcctgtttgtcctgaggggcccagaattcaaacccttagtttttgggaagggtacagttagtacttgtgccatcagattcatgtctaagacacaaatatttgttgagtactcactgtgtaccaggtatttttctaggcactgaggatgaagtaatggtaagattctctctcaaagagcttatagttttagaagcagggtgaggcaactaagcaaataaacaaggaaatataatttgatgagtgctatgcaaagaattaagataatgtattctagaatgcaaagggatgactagttcacattgggtggtcaaggaaggcctctcagagagaggctgttgggatctaagtataaagcaggtgaggcaaagaccataaggtgggaaggaacttggtttgtcctaagaacagagagaagactggcattgggcatagagcataccaaacaagagagaatgtggtcccaggtgagcctggagagaccgggcccagattgtgaagggctttgtaggctggtgtaggaagtgtggatttaagtgtaagtgtgatgagtttgaggcactttaggatcaagctgttgggagtcttgaaggaaaggaatgacatggcctgatttctgtttttaaaagtcatcctgattggtgaatgaagaatagattcagaggaggagctgggaaggggacaataaccatatccttacccagtaagcatgagatggataacatgaatctgcttttcctgttccctagtttgtcccagttcctgttattttatggtgagagcatgtcaccacacttaagagcagtataaggggactggatgtggtggttcatgcctgtaatcccagcactttgggaggttgaggcagctggatcacctgaggtcaggagttggagaccagcctggccaacatggcaaaacctcatatctactaaaaatacaaaaattagtcaggcgtggtggcaggcgtctgtaatcccagctactcgggaggctgaggcaggagaattgcttgagcctgggaggcagagattgcagtgagccgagatcatgccactgcactccagccttagcaacagagcgagacggttaccttggcaaccgtctcaaaaaaaaaagaaacaaaaaaaagcagtgtaagggaaccagcgaactccaccaagtatagaatgataaataaatcatggtctgtttctacaattgaacactacacagccatgcaaacaagaatgcattacttctctacctaataatatgaattaatatggccataacattgggcaaaaaaagccagacacaaaagagtaaactactgcgtggttccctttatttgaagttcaaaatcaggaaaaactaatctatggtggcaaatattagaataatggttacctttggagaagagtattatctaggaggaggcatgaaggagcctgctggtgaattgaaaatgccctacatcttgatctgggtggtggttatggttacatggaggtaatacatgtttttaaaaaatcattaagttattaagatttctgcttctgatgcaagttacacctcaataaaaaggggaaaaaaaaacagtgcctatgcctacctccagaaaatgttgattcattggtctggagtagagcacaggcaggggtaattttttaacatcttccagatgcttccaatatgcagccagggtcgagaatgactcccttacatgattggactcccttacatgattggactcccttacatgattggactcccttacatgattggactcccttacatgattagacttaactgagttttggtcaagcagggcagtagctgtaagctttggaagagaaagccagcagttatccgagcggttccctcccatctgtgagactcttgctcatgtcagcagtattcccttgtcttcccctcggacaggtgatgggcctgagacgggtttgaaataggtcaggatagaaccttcatggactctagtgttctattgcacattaagcctcaaattaacttttcattctggtttccaaccactctgtccttacaggtcatgaaaggaacaccaatgttttgcaaactatgggcagcagtgtttttgagggtcatgatcagtttagtgtagcaattctctatcttttcttaagatcttaggacccctttattcttgtaaagagtgagagccccaaagaccttttgtgtatgtagatatatttaaaaattaaaatagaaaatttttaaatatttgtttataaataatacgttaccttttagatataaaattaactcatcacataatgagaaacaaaatttctgttacagaaacatttcacccaaatcattgtagtaatactaagctgattctaaaaggacaaatttaacataaacatattcatgagaaataactattttctaaaacaaaaaaattcagtgaga

SEQ ID NO: 22167 - DNA, 1632 bp, Homo sapiens
  source 1..1632: mol_type = unassigned DNA
atggcggctcccttggtcctggtgctggtggtggctgtgacagtgcgggcggccttgttccgctccagtctggccgagttcatttccgagcgggtggaggtggtgtccccactgagctcttggaagagagtggttgaaggcctttcactgttggacttgggagtatctccgtattctggagcagtatttcatgaaactccattaataatatacctctttcatttcctaattgactatgctgaattggtgtttatgataactgatgcactcactgctattgccctgtattttgcaatccaggacttcaataaagttgtgtttaaaaagcagaaactcctcctagaactggaccagtatgccccagatgtggccgaactcatccggacccctatggaaatgcgttacatccctttgaaagtggccctgttctatctcttaaatccttacacgattttgtcttgtgttgccaagtctacctgtgccatcaacaacaccctcattgctttcttcattttgactacgataaaaggcagtgctttcctcagtgctatttttcttgccttagcgacataccagtctctgtacccactcaccttgtttgtcccaggactcctctatctcctccagcggcagtacatacctgtgaaaatgaagagcaaagccttctggatcttttcttgggagtatgccatgatgtatgtgggaagcctagtggtaatcatttgcctctccttcttccttctcagctcttgggatttcatccccgcagtctatggctttatactttctgttccagatctcactccaaacattggtcttttctggtacttctttgcagagatgtttgagcacttcagcctcttctttgtatgtgtgtttcagatcaacgtcttcttctacaccatccccttagccataaagctaaaggagcaccccatcttcttcatgtttatccagatcgctgtcatcgccatctttaagtcctacccgacagtgggggacgtggcgctctacatggccttcttccccgtgtggaaccatctctacagattcctgagaaacatctttgtcctcacctgcatcatcatcgtctgttccctgctcttccctgtcctgtggcacctctggatttatgcaggaagtgccaactctaatttcttttatgccatcacactgaccttcaacgttgggcagatcctgctcatctctgattacttctatgccttcctgcggcgggagtactacctcacacatggcctctacttgaccgccaaggatggcacagaggccatgctcgtgctcaagtaggcctggctggcacagggctgcatggacctcagggggctgtggggccagaagctgggccaagccctccagccagagttgccagcaggcgagtgcttgggcagaagaggttcgagtccagggtcacaagtctctggtaccaaaagggacccatggctgactgacagcaaggcctatggggaagaactgggagctccccaacttggacccccaccttgtggctctgcacaccaaggagccccctcccagacaggaaggagaagaggcaggtgagcagggcttgttagattgtggctacttaataaatgttttttgttatgaagtcta

SEQ ID NO: 22168 - DNA, 1592 bp, Homo sapiens
  source 1..1592: mol_type = unassigned DNA
cgcgcgcccgccccagttatcatggcggctcccttggtcctggtgctggtggtggctgtgacagtgcgggcggccttgttccgctccagtctggccgagttcatttccgagcgggtggaggtggtgtccccactgagctcttggaagagagtggttgaaggcctttcactgttggacttgggagtatctccgtattctggagcagtatttcatgaaataactgatgcactcactgctattgccctgtattttgcaatccaggacttcaataaagttgtgtttaaaaagcagaaactcctcctagaactggaccagtatgccccagatgtggccgaactcatccggacccctatggaaatgcgttacatccctttgaaagtggccctgttctatctcttaaatccttacacgattttgtcttgtgttgccaagtctacctgtgccatcaacaacaccctcattgctttcttcattttgactacgataaaaggcagtgctttcctcagtgctatttttcttgccttagcgacataccagtctctgtacccactcaccttgtttgtcccaggactcctctatctcctccagcggcagtacatacctgtgaaaatgaagagcaaagccttctggatcttttcttgggagtatgccatgatgtatgtgggaagcctagtggtaatcatttgcctctccttcttccttctcagctcttgggatttcatccccgcagtctatggctttatactttctgttccagatctcactccaaacattggtcttttctggtacttctttgcagagatgtttgagcacttcagcctcttctttgtatgtgtgtttcagatcaacgtcttcttctacaccatccccttagccataaagctaaaggagcaccccatcttcttcatgtttatccagatcgctgtcatcgccatctttaagtcctacccgacagtgggggacgtggcgctctacatggccttcttccccgtgtggaaccatctctacagattcctgagaaacatctttgtcctcacctgcatcatcatcgtctgttccctgctcttccctgtcctgtggcacctctggatttatgcaggaagtgccaactctaatttcttttatgccatcacactgaccttcaacgttgggcagatcctgctcatctctgattacttctatgccttcctgcggcgggagtactacctcacacatggcctctacttgaccgccaaggatggcacagaggccatgctcgtgctcaagtaggcctggctggcacagggctgcatggacctcagggggctgtggggccagaagctgggccaagccctccagccagagttgccagcaggcgagtgcttgggcagaagaggttcgagtccagggtcacaagtctctggtaccaaaagggacccatggctgactgacagcaaggcctatggggaagaactgggagctccccaacttggacccccaccttgtggctctgcacaccaaggagccccctcccagacaggaaggagaagaggcaggtgagcagggcttgttagattgtggctacttaataaatgttttttgttatgaagtct

SEQ ID NO: 22169 - DNA, 509 bp, Homo sapiens
  source 1..509: mol_type = unassigned DNA
gtctctgtacccactcaccttgtttgtcccaggactcctctatctcctccagcggcagtacatacctgtgaaaatgaagagcaaagccttctggatcttttcttgggagtatgccatgatatcaacgtcttcttctacaccatccccttagccataaagctaaaggagcaccccatcttcttcatgtttatccagatcgctgtcatcgccatctttaagtcctacccgacagtgggggacgtggcgctctacatggccttcttccccgtgtggaaccatctctacagattcctgagaaacatctttgtcctcacctgcatcatcatcgtctgttccctgctcttccctgtcctgtggcacctctggatttatgcaggaagtgccaactctaatttcttttatgccatcacactgaccttcaacgttgggcagatcctgctcatctctgattacttctatgccttcctgcggcgggagtactacctcacacatggcctctacttgaccgc

SEQ ID NO: 22170 - DNA, 1469 bp, Homo sapiens
  source 1..1469: mol_type = unassigned DNA
atggcggctcccttggtcctggtgctggtggtggctgtgacagtgcgggcggccttgttccgctccagtctggccgagttcatttccgagcgggtggaggtggtgtccccactgagctcttggaagagagtggttgaaggcctttcactgttggacttgggagtatctccgtattctggagcagtatttcatgaaactccattaataatatacctctttcatttcctaattgactatgctgaattggtgtttatgataactgatgcactcactgctattgccctgtattttgcaatccaggacttcaataaagttgtgtttaaaaagcagaaactcctcctagaactggaccagtatgccccagatgtggccgaactcatccggacccctatggaaatgcgttacatccctttgaaagtggccctgttctatctcttaaatccttacacgattttgtcttgtgttgccaagtctacctgtgccatcaacaacaccctcattgctttcttcattttgactacgataaaaggcagtgctttcctcagtgctatttttcttgccttagcgacataccagtctctgtacccactcaccttgtttgtcccaggactcctctatctcctccagcggcagtacatacctgtgaaaatgaagagcaaagccttctggatcttttcttgggagtatgccatgatgtatgtgggaagcctagtggtaatcatttgcctctccttcttccttctcagctcttgggatttcatccccgcagtctatggctttatactttctgttccagatctcactccaaacattggtcttttctggtacttctttgcagagatgtttgagcacttcagcctcttctttgtatgtgtgtttcagatcaacgtcttcttctacaccatccccttagccataaagctaaaggagcaccccatcttcttcatgtttatccagatcgctgtcatcgccatctttaagtcctacccgacagtgggggacgtggcgctctacatggccttcttccccgtgtggaaccatctctacagattcctgagaaacatctttgtcctcacctgcatcatcatcgtctgttccctgctcttccctgtcctgtggcacctctggatttatgcaggaagtgccaactctaatttcttttatgccatcacactgaccttcaacgttgggcagatgggcttctgtggtgatagaatggcaggtacttgtcctgaggccatcagagctgctggtgacaggacaccttcctgaactcctccaggcgcctctgatctctccttagctgctgttgtgttaccttcagatcctgctcatctctgattacttctatgccttcctgcggcgggagtactacctcacacatggcctctacttgaccgccaaggatggcacagaggccatgctcgtgctcaagtaggcctggctggcacagggctgcatggacctca

SEQ ID NO: 22171 - DNA, 2367 bp, Homo sapiens
  source 1..2367: mol_type = unassigned DNA
gtccccgccggggaggtcgggacgggcaggggctgaggaccccgcgccagcttgggagccctggagttctggcgggagggaagctgtcaaatggaagccggtagaaatgagacagacgcccggagaagcggggagccccgcccctccgccatagcagcctcgggcgccgcctcttcctttccagcctcccgccctcgtctgcttccggccctgtggcctggtggggctctgcaggctccctcgggagtggtccttgggccgtggcccctctgggaggcctgagggagctcaatcctggtagcaacacccctgaattcctggtggtgaaaggatgtggccccaggacccatcccggaaggaggtgctgaggtttgcagtcagctgccgtatcctgactctgatgctgcaggccctcttcaatgccatcatcccagatcaccatgcagaagccttctctcctcctcgcctggccccctcaggctttgtggaccaactcgtggaaggtcttctgggcggcctgtctcactgggatgctgaacacttcttgttcattgctgagcatggctacctgtatgagcacaactttgccttctttcctggtttccccttggccctgctggtggggactgaactgttgagacccttacgggggttactgagtctacgcagttgcctgctgatttcggtagcatcactcaatttcttgttcttcatgttggctgcagttgcacttcatgacctgggttgtctggttttgcactgtccccaccagtccttttatgcagctctgcttttctgtctcagccctgccaatgtcttcctggcagctggttactcagaagctttgtttgccctcctgacattcagtgccatggggcagctggagaggggccgagtctggactagtgtactcctctttgcctttgccactggggtacgctccaacgggctggtcagtgttggcttcctcatgcattctcaatgccaaggctttttctcttctctaacgatgctgaatcctctgagacagctctttaagctgatggcctctctgtttctgtcggtgttcacacttggccttccctttgccctctttcagtattatgcctacacccaattctgtctgccaggctcagcccgccccattcctgagcctttggtacagttagctgtagacaagggctaccggattgcagagggaaatgaaccgccttggtgcttctgggatgttccactaatatacagctatatccaggatgtctactggaatgttggctttttgaaatactatgagctcaagcaggtgcccaattttctactggctgcaccagtggctatactggttgcctgggcaacttggacatacgtgaccactcacccttggctctgccttacacttgggctgcaaaggagcaagaacaataagaccctagagaagcccgatcttggattcctcagtcctcaggtgtttgtgtacgtggtccacgctgcagtgctgctgctgtttggaggtctgtgcatgcatgttcaggttctcaccaggtttttgggctcctccactcctattatgtactggtttccagctcacttgcttcaggatcaagagccgctgttgagatccttaaagactgtgccttggaagcctcttgcagaggactccccaccaggacaaaaggtccccagaaatcctatcatgggacttttgtatcactggaaaacctgttctccagtcacacgatacattctaggctacttcctgacttactggctcctgggactactcctacattgcaacttcctgccttggacatgacctggactctccagggacaggttggaagccaacttaacccaggggtctgaaagtaaaaatacacattggaactgcctctgctgccctgggatcattactgtgtccattataatctttctctttctctttgaaagctggtcaggaatgggagaagtgtcagacactagagagccccttctggtcctggctagggcaaattttagacaactattttctctgtaagtgaagattgtcgtattccaagtctaaaatacacctggatctgtctagtcaatcaacatagcagagacagtcttaaacctaccattgacctgtgtgtaaatttaaatgtcaatttattgaagtgtaaatttcatcaaaggcattagctgacaggctggtaacagtccacacaagatggtataggcctgaacagtgtagtggcagtaataaagtgggaccattttttccaaatgcgacattgtttctgatgtttttttttatgatttgtgcatgtatttttatatgaaaaaaacttacaaagatatgcaaattaaacttctttcagttataca

SEQ ID NO: 22172 - DNA, 2713 bp, Homo sapiens
  source 1..2713: mol_type = unassigned DNA
gcttccggccctgtggcctggtggggctctgcaggctccctcgggagtggtccttgggccgtggcccctctggggtgagcgtggatgattagtacccagaagggactgtgtccaaaaggagccggccagaaacgggttgcggacacggctgggctgacagaaggcagcccccacgaggcctttggctctgaggaccctgggtcagagcgacttctccagcctgcgcagggggtgttagtcttacccagagggtccagagctgccgttcaacaggatgtcccagattctcagatagggcccaactaccctaagcatacctagcaagggcaggctgcggcatggaagtactgggctaggcgtttgggtgacctgggtcataatcctggctcggaaagggcgcgtaccctttggcgagggatgcgggctggtaccgtgaggtttaagaagcagaaaacatgacagcctctttaagtagccctgggtacgtcacttgaccccagtgagcctcagtttccatatccataaaatggcgatggtaattatactagcctcacagtgtctgatgagatctctggagcctatttatctcacgggaaaatttttgaagagtgaaactagttgatctaggcctgagggagctcaatcctggtagcaacacccctgaattcctggtggtgaaaggatgtggccccaggacccatcccggaaggaggtgctgaggtttgcagtcagctgccgtatcctgactctgatgctgcaggccctcttcaatgccatcatcccagatcaccatgcagaagccttctctcctcctcgcctggccccctcaggctttgtggaccaactcgtggaaggtcttctgggcggcctgtctcactgggatgctgaacacttcttgttcattgctgagcatggctacctgtatgagcacaactttgccttctttcctggtttccccttggccctgctggtggggactgaactgttgagacccttacgggggttactgagtctacgcagttgcctgctgatttcggtagcatcactcaatttcttgttcttcatgttggctgcagttgcacttcatgacctgggttgtctggttttgcactgtccccaccagtccttttatgcagctctgcttttctgtctcagccctgccaatgtcttcctggcagctggttactcagaagctttgtttgccctcctgacattcagtgccatggggcagctggagaggggccgagtctggactagtgtactcctctttgcctttgccactggggtacgctccaacgggctggtcagtgttggcttcctcatgcattctcaatgccaaggctttttctcttctctaacgatgctgaatcctctgagacagctctttaagctgatggcctctctgtttctgtcggtgttcacacttggccttccctttgccctctttcagtattatgcctacacccaattctgtctgccaggctcagcccgccccattcctgagcctttggtacagttagctgtagacaagggctaccggattgcagagggaaatgaaccgccttggtgcttctgggatgttccactaatatacagctatatccaggatgtctactggaatgttggctttttgaaatactatgagctcaagcaggtgcccaattttctactggctgcaccagtggctatactggttgcctgggcaacttggacatacgtgaccactcacccttggctctgccttacacttgggctgcaaaggagcaagaacaataagaccctagagaagcccgatcttggattcctcagtcctcaggtgtttgtgtacgtggtccacgctgcagtgctgctgctgtttggaggtctgtgcatgcatgttcaggttctcaccaggtttttgggctcctccactcctattatgtactggtttccagctcacttgcttcaggatcaagagccgctgttgagatccttaaagactgtgccttggaagcctcttgcagaggactccccaccaggacaaaaggtccccagaaatcctatcatgggacttttgtatcactggaaaacctgttctccagtcacacgatacattctaggctacttcctgacttactggctcctgggactactcctacattgcaacttcctgccttggacatgacctggactctccagggacaggttggaagccaacttaacccaggggtctgaaagtaaaaatacacattggaactgcctctgctgccctgggatcattactgtgtccattataatctttctctttctctttgaaagctggtcaggaatgggagaagtgtcagacactagagagccccttctggtcctggctagggcaaattttagacaactattttctctgtaagtgaagattgtcgtattccaagtctaaaatacacctggatctgtctagtcaatcaacatagcagagacagtcttaaacctaccattgacctgtgtgtaaatttaaatgtcaatttattgaagtgtaaatttcatcaaaggcattagctgacaggctggtaacagtccacacaagatggtataggcctgaacagtgtagtggcagtaataaagtgggaccattttttccaaatgcgacattgtttctgatgtttttttttatgatttgtgcatgtatttttatatgaaaaaaacttacaaagatatgcaaattaaacttctttcagtt

SEQ ID NO: 22173 - DNA, 608 bp, Homo sapiens
  source 1..608: mol_type = unassigned DNA
acacccaggacgcagggtgccgctgccggccacagaaaccccaagaatgtttttctttggctattcagaggacatctattgtgtgtcaggccctgtgctgagctgttgttgcctgacagcaggaagagcgcggctctggtttctgtgaagaggctgcgggtcagcctccgactacaagagcctcggcccacaccgggaactcagtgaacgtcagcgggagctggggcaagagcactgactctgagacagcagcctccgctcactatttgaaggcggggtggcggggggccttgaaggagagcgaagtgcgagagaactcttcaggtgtcaccaagaggcctgagggagctcaatcctggtagcaacacccctgaattcctggtggtgaaaggatgtggccccaggacccatcccggaaggaggtgctgaggtttgcagtcagctgccgtatcctgactctgatgctgcaggccctcttcaatgccatcatcccagatcaccatgcagaagccttctctcctcctcgcctggccccctcaggctttgtggaccaactcgtggaaggtcttctgggcggcctgtctcactgggatgctgaacacttcttg

SEQ ID NO: 22174 - DNA, 716 bp, Homo sapiens
  source 1..716: mol_type = unassigned DNA
gaaatgagacagacgcccggagaagcggggagccccgcccctccgccatagcagcctcgggcgccgcctcttcctttccagcctcccgccctcgtctgcttccggccctgtggcctggtggggctctgcaggctccctcgggagtggtccttgggccgtggcccctctggggtgagcgtggatgattagtacccagaagggactgtgtccaaaaggagccggccagaaacgggttgcggacacggctgggctgacagaaggcagcccccacgaggcctttggctctgaggaccctggaggcctgagggagctcaatcctggtagcaacacccctgaattcctggtggtgaaaggatgtggccccaggacccatcccggaaggaggtgctgaggtttgcagtcagctgccgtatcctgactctgatgctgcaggccctcttcaatgccatcatcccagatcaccatgcagaagccttctctcctcctcgcctggccccctcaggctttgtggaccaactcgtggaaggtcttctgggcggcctgtctcactgggatgctgaacacttcttgttcattgctgagcatggctacctgtatgagcacaactttgccttctttcctggtttccccttggccctgctggtggggactgaactgttgagacccttacgggggttactgagtctacgcagttgcctgctgatttcggtagcatc

SEQ ID NO: 22175 - DNA, 1464 bp, Homo sapiens
  source 1..1464: mol_type = unassigned DNA
ctcgtctgcttccggccctgtggcctggtggggctctgcaggctccctcgggagtggtccttgggccgtggcccctctggggtgagcgtggatgattagtacccagaagggactgtgtccaaaaggagccggccagaaacgggttgcggacacggctgggctgacagaaggcagcccccacgaggcctttggctctgaggaccctggaggcctgagggagctcaatcctggtagcaacacccctgaattcctggtggtgaaaggatgtggccccaggacccatcccggaaggaggtgctgaggtttgcagtcagctgccgtatcctgactctgatgctgcaggccctcttcaatgccatcatcccagatcaccatgcagaagccttctctcctcctcgcctggccccctcaggctttgtggaccaactcgtggaagtattatgcctacacccaattctgtctgccaggctcagcccgccccattcctgagcctttggtacagttagctgtagacaagggctaccggattgcagagggaaatgaaccgccttggtgcttctgggatgttccactaatatacagctatatccaggatgtctactggaatgttggctttttgaaatactatgagctcaagcaggtgcccaattttctactggctgcaccagtggctatactggttgcctgggcaacttggacatacgtgaccactcacccttggctctgccttacacttgggctgcaaaggagcaagaacaataagaccctagagaagcccgatcttggattcctcagtcctcaggtgtttgtgtacgtggtccacgctgcagtgctgctgctgtttggaggtctgtgcatgcatgttcaggttctcaccaggtttttgggctcctccactcctattatgtactggtttccagctcacttgcttcaggatcaagagccgctgttgagatccttaaagactgtgccttggaagcctcttgcagaggactccccaccaggacaaaaggtccccagaaatcctatcatgggacttttgtatcactggaaaacctgttctccagtcacacgatacattctaggctacttcctgacttactggctcctgggactactcctacattgcaacttcctgccttggacatgacctggactctccagggacaggttggaagccaacttaacccaggggtctgaaagtaaaaatacacattggaactgcctctgctgccctgggatcattactgtgtccattataatctttctctttctctttgaaagctggtcaggaatgggagaagtgtcagacactagagagccccttctggtcctggctagggcaaattttagacaactattttctctgtaagtgaagattgtcgtattccaagtctaaaatacacctggatctgtctagtcaatcaacatagcagagacagtcttaaacctaccattgacctg

SEQ ID NO: 22176 - DNA, 707 bp, Homo sapiens
  source 1..707: mol_type = unassigned DNA
ttacctgtaagcaaagtgtgggctacacacatctgtagtcgctgaggctagagcttgactcgagagaggaaaggaagaatgcaagcatggtcaagtggcagagaggcctgagggagctcaatcctggtagcaacacccctgaattcctggtggtgaaaggatgtggccccaggacccatcccggaaggaggtgctgaggtttgcagtcagctgccgtatcctgactctgatgctgcaggccctcttcaatgccatcatcccagatcaccatgcagaagccttctctcctcctcgcctggccccctcaggctttgtggaccaactcgtggaaggtcttctgggcggcctgtctcactgggatgctgaacacttcttgttcattgctgagcatggctacctgtatgagcacaactttgccttctttcctggtttccccttggccctgctggtggggactgaactgttgagacccttacgggggttactgagtctacgcagttgcctgctgatttcggtagcatcactcaatttcttgttcttcatgttggctgcagttgcacttcatgacctgggttgtctggttttgcactgtccccaccagtccttttatgcagctctgcttttctgtctcagccctgccaatgtcttcctggcagctggttactcagaagctttgtttgccctcctgacattcagtgccatggggc

SEQ ID NO: 22177 - DNA, 2255 bp, Homo sapiens
  source 1..2255: mol_type = unassigned DNA
acgtagaccgtctgctgggggcgccggcaccatttggagtacgtgaggaagaaaaatgtctgaaaagcagatgaaggaagcttttgtcagtaacctcaatggaaccaccgtgctggaaatcacccagggattgtgctttcctgcattctgtatcctgtgcagagggttcctgatcattttctcacagtacttgtgttctttttcacctacctggaaaactagattcctcactgactttgttgtcctaatagttcccatggtagccactttgaccatttgggcttcatttatcctccttgagcttctcggtgtaattatctttggggcagggctgttgtatcaaatataccgaaggaggacctgctatgccagactgcctttcctaaaaatccttgaaaaattcttgaacatcagtctagaatcagaatacaatccagccatctcctgtttccgtgtaattaccagtgcgtttactgctattgctattttggctgtggacttcccactttttcccagaagatttgccaaaactgagctctatgggacaggagcaatggattttggagtaggtggctttgtttttgggtctgcaatggtttgtctagaggtcaggaggagaaaatatatggaagggtccaaattgcattactttacaaactcattgtactctgtttggccattagtcttcctaggaatcggacgattagccattataaaatcaataggctatcaggaacatttaacagagtatggagttcactggaactttttctttaccataatagttgtgaaattgataacaccactgctgttgattatttttcccctaaataagtcctggattattgccctcggcattactgtattataccagctagcccttgactttacctcactgaagaggttaatattatatggcactgatggtagtggcacacgggttggtctattaaatgccaaccgcgaaggaataatctctaccctggggtatgtggcaatacacatggctggtgtgcaaacagggttatatatgcataagaaccgatcacatatcaaagacttgataaaagtagcctgttttcttttactggcagctattagcctcttcatatctctttacgtagttcaagtaaatgtagaagcagtatctcgaagaatggcaaatttagccttttgtatttggatagttgcttctagcctgatccttcttagtagtttattactgggtgatataattttgagttttgccaaatttctaattaaaggagctctagtaccatgttcttggaaacttatccagtcacctgttacaaataaaaagcattcagaatctctagtccctgaagccgaaagaatggaacccagtctttgtttaatcacagctctaaacagaaaacagttaatatttttcttgctgtcaaatataacaactggcctgatcaacctgatggtagatacattacacagcagtaccttgtgggccttatttgtggtcaatctctatatgttttccaactgtttaattgtatatgtactatatttgcaagataagactgtacaattttggtgatcagcaggagtaggatatataagtatttgggcaatatttaatgaggaatattaattgtaaagaaattgtgcttttggcaacagtgttaaccatattttattataaaatagtttcagtcatctaaacagcagtgatgcttaattatttttttttttgagacagagtcttgctctgttacccaggctggagtgtagtggtgccatctcagctcactgcaacctccacctcccgggttcaagcaattctcctgcctcagcctcctgagtagctggcactgtaggcatgtaccaccatgcccagctaatttttatatttttagtagagatggggttttgccatattggccaggctggtctcaaactcctgaactcaagtgataacacccaccttggcctcccaaagtgctgggattacaggtgtgagccaccacactgggccaatgcttaatattttaatgtatctcaacaataaaaccaagaagaaacaaagccttttgacttgttagaatgtattaagtagtattttaaagaaactttatagttgtgacattgaaagactgttggggtggggggaggaaaatttttactttccatcttaatgtaaccttatgctattctgtatttttactgtatattgcttttacaataaatataaaatgaaatgtttatgttgacatttcagtgtg

SEQ ID NO: 22178 - DNA, 359 bp, Homo sapiens
  source 1..359: mol_type = unassigned DNA
gggacgcctggtccggcttgctggcttcaactacggaagaaaaatgtctgaaaagcagatgaaggaagcttttgtcagtaacctcaatggaaccaccgtgctggaaatcacccagggattgtgctttcctgcattctgtatcctgtgcagagggttcctgatcattttctcacagtacttgtgttctttttcacctacctggaaaactagattcctcactgactttgttgtcctaatagttcccatggtagccactttgaccatttgggcttcatttatcctccttgagcttctcggtgtaattatctttggggcagggctgttgtatcaaatataccgaaggaggacctgctatgcca

SEQ ID NO: 22179 - DNA, 953 bp, Homo sapiens
  source 1..953: mol_type = unassigned DNA
agcactcggtcccagccgataaatctggggcagcgcgcggtaggagctgcgggcggccaggccccttcctgcgtccgcacctggccccgcgcgcccctctcgggcgtccggcttccggcgtcctggcggctcgggtggcggcggttcgggcggccgcctggctgctcctcggggcggcgaccgggctcacgcgcgggcccgccgcggccttcaccgccgcgcgctctgacgccggcataagggccatgtgttctgaaattattttgaggcaagaagttttgaaagatggtttccacagagaccttttaatcaaagtgaagtttggggaaagcattgaggacttgcacacctgccgtctcttaattaaacaggacattcctgcaggactttatgtggatccgtatgagttggcttcattacgagagagaaacataacagaggcagtgatggtttcagaaaattttgatatagaggcccctaactatttgtccaaggagtctgaagttctcatttatgccagacgagattcacagtgcattgactgttttcaagcctttttgcctgtgcactgccgctatcatcggccgcacagtgaagatggagaagcctcgattgtggtcaataacccagatttgttgatgttttgtgaccaagctggctccagaagaatgatcagattccggtttgattcctttgacaaaactatagagttcccgattttgaaatgctgggctcactcagaagtggcagccccttgtgctttggagaatgaggatatctgccaatggaacaagatgaagtataaatcagtatataagaatgtgattctacaagttccagtgggactgactgtacatacctctctagtatgttctgtgactctgctcattacaatcctgtgctctacattgatccttgtagcagttttcaaatatggccatttttccctataa

SEQ ID NO: 22180 - DNA, 3018 bp, Homo sapiens
  source 1..3018: mol_type = unassigned DNA
ggcagctgggaaccgcgggcgctaggcgcgcgcacccagcactcggtcccagccgataaatctggggcagcgcgcggtaggagctgcgggcggccaggccccttcctgcgtccgcacctggccccgcgcgcccctctcgggcgtccggcttccggcgtcctggcggctcgggtggcggcggttcgggcggccgcctggctgctcctcggggcggcgaccgggctcacgcgcgggcccgccgcggccttcaccgccgcgcgctctgacgccggcataagggccatgtgttctgaaattattttgaggcaagaagttttgaaagatggtttccacagagaccttttaatcaaagtgaagtttggggaaagcattgaggacttgcacacctgccgtctcttaattaaacaggacattcctgcaggactttatgtggatccgtatgagttggcttcattacgagagagaaacataacagaggcagtgatggtttcagaaaattttgatatagaggcccctaactatttgtccaaggagtctgaagttctcatttatgccagacgagattcacagtgcattgactgttttcaagcctttttgcctgtgcactgccgctatcatcggccgcacagtgaagatggagaagcctcgattgtggtcaataacccagatttgttgatgttttgtgaccaagagttcccgattttgaaatgctgggctcactcagaagtggcagccccttgtgctttggagaatgaggatatctgccaatggaacaagatgaagtataaatcagtatataagaatgtgattctacaagttccagtgggactgactgtacatacctctctagtatgttctgtgactctgctcattacaatcctgtgctctacattgatccttgtagcagttttcaaatatggccatttttccctataagttttatgtagttaaatgcttcctagaaacctaaataagatctattaatttctgacgagaggtgttcttctagaattaattacttttatcttttgtcttcatttgtggccaaaattatgtttactagaggaaatttgggatcattctcagctaattccaaaatgtagtgctctattgcatggatccttggtaatcctcaagcatcagatgccataaggggaaacttaattctgctaaattaatgtttattttgtgagaagtgactttatcttcatttggggtagaaaaattatttctttatgtagtagagacaaattattctcattttgcaagtactttcaatttaagctacaaattgagaaaaccgttataaataagaataaaataggccaggcacagtggctcacacctgtaatcccagcactttgggaggccgaggtgggcggatcaccagaggtcaagagtttgagaccagcttggtgaaaccctgtctctactaaaaatacaaaagttagctggggctggtggtgggcatctgtagtcccagctaattggaagggtgaggcgggaggatcgcttgaacctgggaggcggaggttccagagagccaagatcgcaccactgcactacagcctgggcgacagaacgagaccctgtctccaaaggaaaaacaaaaaagaagaataaaataatttggatgaaaatcatgtttatttaaatagtaatgtcatgagactattaaagatgtgccagagtttcaatgaaaatcattaaagtaggacagctaagaaattaatattaatatcaaaattattgataatcttaaattattgattattccttaacgcactccattctccttttacattttatcatgtttcttttgaatatatgaattggcaaaggacttgatgaaactgagtactaagatttggtacagagtatgtcaggaagacaactcagattgccattttaaataaagttgtacatgaacaataattggaatcatcaggtaatttttttaaacaaaggttcttcatttactgttatgattggaaaaaaattagaaaataaagtaagtgccataggctaattaaaaaataaaaccttggccgggcgcggtggcttacgcctataatcccagcactttgggaggccgagacgggcagatcacgaggtcaggagattgagaccatcctggctaacacggtgaaaccccatctctactaaaaatacaaaaaaatgagccgggtatggtggtgcatacctgtagtcccagctactcgggaggctgaggcaggagaatggcatgaacccggaaggcagagcttgcagtgagccgagatcacgccactgcactccagcctgggcgacagagtgagactctgtctcaaaaaaaaaaaaaaaaaaaaaaaaaaaaaagtaaataaaaccttagggcaagcatgttccaaaacagaagacatcaaaccagggtgtgttggcattatttattttatgtagagtattgagatgtgataaacctttgtatatgccatcactgctccatttcctaaagtattttggtgttttcatgggactacatcttgtataatttgacatgtatgacctgactagtcctaacagttctttttaaacgtgtatttgagacttaaatattggaaaaggtaacccagtgccataaagcagaaacagtgacctttaaaatgactaaaatttcaacccagtatagtttcatacctatttcatgctttctcgtaagaaagaatttcatgttttagaaacatttctttcactatgggattaataatatgacactgaaatggaattatatatgtcagctacaattcaggcattgttttgggatatggttagattgacaggcaacgttttggaatatggttagacggggagggaacacggtactgtttaacatcttaagagtatgtgggggtatgtgtatacagaatgtttttgtttttgctcatcacaaccaggtttcatcagtatttaaaatatttaagattgtggcttggaatgtggttcagccatttactcacttatacaaatattcagaagtgt

SEQ ID NO: 22181 - DNA, 3057 bp, Homo sapiens
  source 1..3057: mol_type = unassigned DNA
gggggccggggctgcaggcagctgggaaccgcgggcgctaggcgcgcgcacccagcactcggtcccagccgataaatctggggcagcgcgcggtaggagctgcgggcggccaggccccttcctgcgtccgcacctggccccgcgcgcccctctcgggcgtccggcttccggcgtcctggcggctcgggtggcggcggttcgggcggccgcctggctgctcctcggggcggcgaccgggctcacgcgcgggcccgccgcggccttcaccgccgcgcgctctgacgccggcataagggccatgtgttctgaaattattttgaggcaagaagttttgaaagatggtttccacagagaccttttaatcaaagtgaagtttggggaaagcattgaggacttgcacacctgccgtctcttaattaaacaggacattcctgcaggactttatgtggatccgtatgagttggcttcattacgagagagaaacataacagaggcagtgatggtttcagaaaattttgatatagaggcccctaactatttgtccaaggagtctgaagttctcatttatgccagacgagattcacagtgcattgactgttttcaagcctttttgcctgtgcactgccgctatcatcggccgcacagtgaagatggagaagcctcgattgtggtcaataacccagatttgttgatgttttgtgaccaagagttcccgattttgaaatgctgggctcactcagaagtggcagccccttgtgctttggagaatgaggatatctgccaatggaacaagatgaagtataaatcagtatataagaatgtgattctacaagttccagtgggactgactgtacatacctctctagtatgttctgtgactctgctcattacaatcctgtgctctacattgatccttgtagcagttttcaaatatggccatttttccctataagttttatgtagttaaatgcttcctagaaacctaaataagatctattaatttctgacgagaggtgttcttctagaattaattacttttatcttttgtcttcatttgtggccaaaattatgtttactagaggaaatttgggatcattctcagctaattccaaaatgtagtgctctattgcatggatccttggtaatcctcaagcatcagatgccataaggggaaacttaattctgctaaattaatgtttattttgtgagaagtgactttatcttcatttggggtagaaaaattatttctttatgtagtagagacaaattattctcattttgcaagtactttcaatttaagctacaaattgagaaaaccgttataaataagaataaaataggccaggcacagtggctcacacctgtaatcccagcactttgggaggccgaggtgggcggatcaccagaggtcaagagtttgagaccagcttggtgaaaccctgtctctactaaaaatacaaaagttagctggggctggtggtgggcatctgtagtcccagctaattggaagggtgaggcgggaggatcgcttgaacctgggaggcggaggttccagagagccaagatcgcaccactgcactacagcctgggcgacagaacgagaccctgtctccaaaggaaaaacaaaaaagaagaataaaataatttggatgaaaatcatgtttatttaaatagtaatgtcatgagactattaaagatgtgccagagtttcaatgaaaatcattaaagtaggacagctaagaaattaatattaatatcaaaattattgataatcttaaattattgattattccttaacgcactccattctccttttacattttatcatgtttcttttgaatatatgaattggcaaaggacttgatgaaactgagtactaagatttggtacagagtatgtcaggaagacaactcagattgccattttaaataaagttgtacatgaacaataattggaatcatcaggtaatttttttaaacaaaggttcttcatttactgttatgattggaaaaaaattagaaaataaagtaagtgccataggctaattaaaaaataaaaccttggccgggcgcggtggcttacgcctataatcccagcactttgggaggccgagacgggcagatcacgaggtcaggagattgagaccatcctggctaacacggtgaaaccccatctctactaaaaatacaaaaaaatgagccgggtatggtggtgcatacctgtagtcccagctactcgggaggctgaggcaggagaatggcatgaacccggaaggcagagcttgcagtgagccgagatcacgccactgcactccagcctgggcgacagagtgagactctgtctcaaaaaaaaaaaaaaaaaaaaaaaaaaaaaagtaaataaaaccttagggcaagcatgttccaaaacagaagacatcaaaccagggtgtgttggcattatttattttatgtagagtattgagatgtgataaacctttgtatatgccatcactgctccatttcctaaagtattttggtgttttcatgggactacatcttgtataatttgacatgtatgacctgactagtcctaacagttctttttaaacgtgtatttgagacttaaatattggaaaaggtaacccagtgccataaagcagaaacagtgacctttaaaatgactaaaatttcaacccagtatagtttcatacctatttcatgctttctcgtaagaaagaatttcatgttttagaaacatttctttcactatgggattaataatatgacactgaaatggaattatatatgtcagctacaattcaggcattgttttgggatatggttagattgacaggcaacgttttggaatatggttagacggggagggaacacggtactgtttaacatcttaagagtatgtgggggtatgtgtatacagaatgtttttgtttttgctcatcacaaccaggtttcatcagtatttaaaatatttaagattgtggcttggaatgtggttcagccatttactcacttatacaaatattcagaagtgtaataaaaatgtgaatgaagaaaa

SEQ ID NO: 22182 - DNA, 1677 bp, Homo sapiens
  source 1..1677: mol_type = unassigned DNA
agagcgtgggagcggtcccggctcccgggcctctcggcgggttgcggggatgtggggacccggcgcgggacctagatcagtagggcgagccggaggaggtcagacactagagccgtgtgccctccttccctcccgtgcgctttgctctgcggcggatcccgggtctccgggagagtcgggctcgggccctgcggttcccaggctggactggccgccctgttactaaagttctgagaaggaaagtcagccgtcaagcgtcttgggatgctcttgagctgcacgaagcttctgatcaccaaggggccaggcaaggccttagcgccctgtgaggcctgagaatccccaaactgaatgtaggactccgtggcaaactgctagttgttcgtgcaagtagtagttggcaaactgcttgtactactgagacgggcaagtgcgggaataattacaataaagggcataagggccatgtgttctgaaattattttgaggcaagaagttttgaaagatggtttccacagagaccttttaatcaaagtgaagtttggggaaagcattgaggacttgcacacctgccgtctcttaattaaacaggacattcctgcaggactttatgtggatccgtatgagttggcttcattacgagagagaaacataacagaggagaagacttcatggcggcggctatggttgccttctgataattgaaggatccctagtggaataaggaacgaatttattgcagacattgtaagcaagaacaactggtaaatgttataggcagtgatggtttcagaaaattttgatatagaggcccctaactatttgtccaaggagtctgaagttctcatttatgccagacgagattcacagtgcattgactgttttcaagcctttttgcctgtgcactgccgctatcatcggccgcacagtgaagatggagaagcctcgattgtggtcaataacccagatttgttgatgttttgtgaccaagctggctccagaagaatgatcagattccggtttgattcctttgacaaaactatagagttcccgattttgaaatgctgggctcactcagaagtggcagccccttgtgctttggagaatgaggatatctgccaatggaacaagatgaagtataaatcagtatataagaatgtgattctacaagttccagtgggactgactgtacatacctctctagtatgttctgtgactctgctcattacaatcctgtgctctacattgatccttgtagcagttttcaaatatggccatttttccctataagttttatgtagttaaatgcttcctagaaacctaaataagatctattaatttctgacgagaggtgttcttctagaattaattacttttatcttttgtcttcatttgtggccaaaattatgtttactagaggaaatttgggatcattctcagctaattccaaaatgtagtgctctattgcatggatccttggtaatcctcaagcatcagatgccataaggggaaacttaattctgctaaattaatgtttattttgtgagaagtgactttatcttcatttggggtagaaaaattatttctttatgtagtagagacaaattattctcattttgcaagtactttcaatttaagctacaaattgagaaaaccgttataaataagaataaaata

SEQ ID NO: 22183 - DNA, 2701 bp, Homo sapiens
  source 1..2701: mol_type = unassigned DNA
agtctccgcgctgctgaggcgcgcccggccgctcccacggcctcccctccgccctgcggtcccgccgcctccggggcctcctgggaccctggccctcgccgggcaggacgccgccagcgctgaaggcgcagcccggaggccgcgcggatgcagatctgtggatccagcgtagcatctgtagcagctgggacatcattccaggttttgggcccggtgtgttggcaacaactggatctgaagatggcagtcagggtgctttggggtggtctcagcctgctccgagtgctgtggtgtctccttccgcagacgggctatgtgcacccagatgagttcttccagtcccctgaggtgatggcagaggacatcctgggcgttcaggccgcgcggccctgggagttttaccccagcagctcctgccgctcggtgctcttccccctgctgatctctggttccaccttctggctgctcaggctctgggaggagctggggccgtggcctggcctggtgagcggctatgcgctgctggtggggcctcgactcctcctcactgccctttcctttgctctggacggggccgtgtaccacctggccccgccgatgggggcggatcgctggaacgccctggccctgctgtctggttcctacgtcaccctggtcttctacacaaggaccttctccaacaccattgagggactcctcttcacgtggctgctggtgctggtatcctcccatgtaacgtggggccctacacgcaaggagccggcgccgggtccacggtggcgcagctggcttcttggaggcattgtggctgctggcttcttcaaccggcccacctttctggcctttgctgtggtccccctctacctctggggcactcgtggagccacaaaccctggtttgaagtctctgacccgggaggccctggtgctgctccctggggcagccctcacagcagcggtgtttgtggccacggacagctggtatttctccagccccgctacatccaggaaccttgtcctgacacctgtcaacttcttgcactacaacctgaatccccaaaacctggcgagacatggcacgcacgcgcggctcactcacctggcagtcaacggcttcctgctcttcggggtgctgcatgcccaggccctgcaggctgcgtggcaacggctgcaagtcggcctccaggcctctgcacaaatgggcctcctgagggcactgggtgcccggagcctgctgtccagccccaggtcctatctccttctcctctacttcatgcctctggccctgctatctgcctttagccaccaggaggctcggttcctgattcccctcctggtccccctggtcctgctttgtagtccacagacgcagcctgtgccttggaagggcactgtggtcctcttcaacgccctcggtgccctcctcttcggctgcctgcatcaggggggcctggtgcctggcctggagtacctggagcaggtggtccatgcccctgtgctcccaagcacacccacccactacacactcctcttcactcacacctacatgcccccccggcacctcctacacctcccaggcctgggggcaccagtggaggtggtggacatgggggggactgaggactgggccctgtgccaaaccctgaaaagcttcaccagacaaccagcctgccaagtggctggtgggccatggctctgccgcctctttgtggtaacccctggcaccaccaggcgtgccgtggagaagtgcagcttccccttcaagaatgaaacacttttatttccccatctgaccctggaggatccaccagccctgtcctccttgctgagtggggcttggagggaccacctcagtcttcacattgtggagctgggggaagaaacctgacaatatgacagagcacccactgcccaagactcagccatagaagatgccgccccaccttctacttgggtagctgggctgggacgctgggacaggaccccgtcctccttcatgactcccactgctgcctctcctgggcatggctgttagctgttctgccttctgggtgagctggcactcttctccctgagaccaaagatttgacctgtcggtcttgatgtcaaggtccccaaagaccaggttaagtgacgacacctgtctgttcctgccctgttgcttccagccactgtgatgtttgaaatatgtgatagtacctggttgtgaaaaaagacaatgaactgctagtgacattcctcaatgacctctcccaaacctcccatgatgccttacccttgctgtcatgacaaccctctggcttcctaagacccatctgcctatcgaaatatgtgcaagtcagtgagacgaagtatagagaacaggtggcccagatccaggggacccaacttctggccccttggtctgtcacctcctcgctgtgtgatcttgagaaagctccttccactcacccaccccacttcccagtctgttgggatcagaggaactttgaggtgtctgccggctaacattgtgtcattcctggagtccacagtacacgtcccctgcctcaacaggcacagctctcacaaagctcttcaagcatggaagtgggagttgtgttgtacttcatggcactctgatgcctgctgtctcagtgtttggttattatgcaaacaagtaatgtttgaaatatataatagcactggagattttctcccta

SEQ ID NO: 22184 - DNA, 3637 bp, Homo sapiens
  source 1..3637: mol_type = unassigned DNA
ttgccgcagagacgccccgcccccgcgcggcgctgcggaaccggagctccgggcggcgtcggcagcggcgcgagaggcgacgaggcccgggcggcaggagccggcgcggcgaccgcggcgagggcggcggggacggagcagagcacgacgaagacgcacaggcagccgggccgggccgggccacggggagagcggccggcgggcagcgggcgggaggccgggcgggccgcgggcagccaccgagccgcgaagcgacatggtgctgctcaaggagtatcgagtaatcctgcctgtgtctgtagatgagtatcaagtggggcagctgtattctgtggctgaggccagtaaaaatgaaacgggtggtggcgaaggcgtggaggtcctggtgaatgagccctacgagaaggacggtgagaaaggccagtacacacacaagatctaccacctgcagagcaaagtacccacgtttgttcgaatgctggccccagagggagccctgaatatacacgagaaagcctggaatgcttacccctactgcagaaccgttattacaaatgagtacatgaaagaagactttctgattaaaattgaaacctggcacaaaccagatcttggcacgcaggagaatgtgcataagctggagcctgaggcgtggaaacacgtggaagccgtatatatagacattgcagatcgaagccaagtgctcagcaaggattacaaggcagaggaagacccagcaaaatttaaatctatcaaaacaggccgaggacccttgggccccaattggaagcaagagcttgtaaaccagaaggactgcccatatatgtgtgcatacaaactggtgaccgtcaagttcaagtggtggggcctgcagaacaaagtggagaacttcatccataagcaagagaggcgtctgtttacaaacttccacaggcagctgttctgttggctcgataagtgggttgacctgaccatggacgacattcgaaggatggaagaagagacgaagagacagctggatgaaatgagacaaaaggacccagtgaaaggaatgacagcagatgactaaagccgcctttcccctctgcactttttgcaagacagtggtcaacaggaagacccagcagctccaccctcccaagtgacaggccattttcggacgcagccgttctgtgcccattcttcaggcaactttcgattccttactgtagctaattctagatgcccttcagtattgtgaacaaatagaccgtctggtgtcacagagcccgcgtgtgcaggagcctgctcctccgagatacgtggcgtgtaggttgctgtagttacagcgcctccgtctctctccattgtgttccgatccatttctgtgtgttcccccaacctttatttccaagtgacattttcagtctttcaaatagctgccttttgtgatgtggtgatttaaatgatttaagttcatttgttctcaaccttggggtaaactgaggtattttgcttcctgggaagatcttcgcaattttgagtgctcctgtggggagcggggatgagctaaagatacaatgtttccctgccccgcaccgcttccacaaaatagcaatgtggttttgcagctctgacttctgctcccagtaacccatcgttagggcactctagcactatggaggtacccaaggctcagccagtctctatttaagaaaatttaacaaatacgagtaaccctgtcccaatcactgaatctctagttactactcttagaaacacctgtggcttcttggccctcctgttgcccgctctgaatctctctgcagtctacaaaatcgccccagtcaactctccacttggagggaattgtccagtgtggcccctagaattgagtcaccccctagataccaactgtctgaccccgaggagctctgtaagtccctgctcctcctcttccctttggggctggtgctgccactcagcaataatcctcttttctctgtgctttcttaggtccctgtcctctgtctttgaggctggttaggaagcaagagtcctgatctttcatgctgcacaatatgagcatgcaaaaagctttttccagcagaacatgttccctcgtctccagttgccggaaaggaatttggggatcaagaacttagctcgtcctacccccatgttgagttctgccctggaaaacccaaagcaagtagtgatcatagtacagaacccgaccaaagtaggctggtgaggaagtccaggctccaggggaacagacgctgcccagtgttcatagcttcctgcaacttgacagagcctgagtttgcctcttagtgggagaatgagagagagctgtagtgtcacctgacattccccaaaccttgtgaagcacgttggcctaagtgtgccgtgatcccagcccacactagcctgggtgcatctgctaatgggagaccaaatctttgtccgggaagcaagaagtgggtgggagaatgtatcctgtttttgtcagtttgtttgccttactcatttctaagtgcaataagggagtgtctcacaggattgcacctgtgacatcctgatggatgcttccctgtggccctcctggggcaagggtggacagactcagacccccagcatggttagcgctgaccttcattgaggtccctttggaaccagatgtcttgttacagacaccttcctctgtgtaagtctcctcaccttgaggggtctttagtaatgcatctgggtagcatctcaactgctggtagcatttatctgacttggaaagttggagaagaggcattcctactggagaaaaatgtcagtgttttcctataagctctgtgttagctattcattatatttgtgcttaaagatgttccttcattcatcaactaggggaagtccagatgcgggttatcttgaaagaaacaaactgacattctaggcagacagttgtctatgtggtctgagggtcagcagctgttagtctccttcctttggctcttgagacccacacatatcactttagccctaacaagggctcctcccacctccacctgttgccccagttgaaaagcatccattatgagctgaggtcagcctggatctggaattgcagcccacataaacataaaggaggatgtccctggtctgttccatccccacggatggtgttgctgctgggcaacagtgttggcttcttttaagtaccccctttcctcctcacccacctccaaactgactagcactcagagggacttatgataaaggttcagctccaggggtagtacctgagtgtgtgccatgccccttcagaccagctgcttccatcagaattccagggtcacagccccaacagaagcagcagtgcctctgtaggaggggtgctgggctctggccttctcatgcagagaggtccgggacagggtcagtatcgtgggcatgtgtatagcttcccaagttcttttacagtccctgctgggactccctgacttactttggttggttcctagtgctacttgttttacaaactacactttgtagaattgattagattaccttgtttatttaatgtgagtttgtgcctttttgtctcaatcttccaatacaggtatattgagaaaaaaagcagtctaataaaatcctagac

SEQ ID NO: 22185 - DNA, 3637 bp, Homo sapiens
  source 1..3637: mol_type = unassigned DNA
ttgccgcagagacgccccgcccccgcgcggcgctgcggaaccggagctccgggcggcgtcggcagcggcgcgagaggcgacgaggcccgggcggcaggagccggcgcggcgaccgcggcgagggcggcggggacggagcagagcacgacgaagacgcacaggcagccgggccgggccgggccacggggagagcggccggcgggcagcgggcgggaggccgggcgggccgcgggcagccaccgagccgcgaagcgacatggtgctgctcaaggagtatcgagtaatcctgcctgtgtctgtagatgagtatcaagtggggcagctgtattctgtggctgaggccagtaaaaatgaaacgggtggtggcgaaggcgtggaggtcctggtgaatgagccctacgagaaggacggtgagaaaggccagtacacacacaagatctaccacctgcagagcaaagtacccacgtttgttcgaatgctggccccagagggagccctgaatatacacgagaaagcctggaatgcttacccctactgcagaaccgttcttccaaatgagtacatgaaagaagactttctgattaaaattgaaacctggcacaaaccagatcttggcacgcaggagaatgtgcataagctggagcctgaggcgtggaaacacgtggaagccgtatatatagacattgcagatcgaagccaagtgctcagcaaggattacaaggcagaggaagacccagcaaaatttaaatctatcaaaacaggccgaggacccttgggccccaattggaagcaagagcttgtaaaccagaaggactgcccatatatgtgtgcatacaaactggtgaccgtcaagttcaagtggtggggcctgcagaacaaagtggagaacttcatccataagcaagagaggcgtctgtttacaaacttccacaggcagctgttctgttggctcgataagtgggttgacctgaccatggacgacattcgaaggatggaagaagagacgaagagacagctggatgaaatgagacaaaaggacccagtgaaaggaatgacagcagatgactaaagccgcctttcccctctgcactttttgcaagacagtggtcaacaggaagacccagcagctccaccctcccaagtgacaggccattttcggacgcagccgttctgtgcccattcttcaggcaactttcgattccttactgtagctaattctagatgcccttcagtattgtgaacaaatagaccgtctggtgtcacagagcccgcgtgtgcaggagcctgctcctccgagatacgtggcgtgtaggttgctgtagttacagcgcctccgtctctctccattgtgttccgatccatttctgtgtgttcccccaacctttatttccaagtgacattttcagtctttcaaatagctgccttttgtgatgtggtgatttaaatgatttaagttcatttgttctcaaccttggggtaaactgaggtattttgcttcctgggaagatcttcgcaattttgagtgctcctgtggggagcggggatgagctaaagatacaatgtttccctgccccgcaccgcttccacaaaatagcaatgtggttttgcagctctgacttctgctcccagtaacccatcgttagggcactctagcactatggaggtacccaaggctcagccagtctctatttaagaaaatttaacaaatacgagtaaccctgtcccaatcactgaatctctagttactactcttagaaacacctgtggcttcttggccctcctgttgcccgctctgaatctctctgcagtctacaaaatcgccccagtcaactctccacttggagggaattgtccagtgtggcccctagaattgagtcaccccctagataccaactgtctgaccccgaggagctctgtaagtccctgctcctcctcttccctttggggctggtgctgccactcagcaataatcctcttttctctgtgctttcttaggtccctgtcctctgtctttgaggctggttaggaagcaagagtcctgatctttcatgctgcacaatatgagcatgcaaaaagctttttccagcagaacatgttccctcgtctccagttgccggaaaggaatttggggatcaagaacttagctcgtcctacccccatgttgagttctgccctggaaaacccaaagcaagtagtgatcatagtacagaacccgaccaaagtaggctggtgaggaagtccaggctccaggggaacagacgctgcccagtgttcatagcttcctgcaacttgacagagcctgagtttgcctcttagtgggagaatgagagagagctgtagtgtcacctgacattccccaaaccttgtgaagcacgttggcctaagtgtgccgtgatcccagcccacactagcctgggtgcatctgctaatgggagaccaaatctttgtccgggaagcaagaagtgggtgggagaatgtatcctgtttttgtcagtttgtttgccttactcatttctaagtgcaataagggagtgtctcacaggattgcacctgtgacatcctgatggatgcttccctgtggccctcctggggcaagggtggacagactcagacccccagcatggttagcgctgaccttcattgaggtccctttggaaccagatgtcttgttacagacaccttcctctgtgtaagtctcctcaccttgaggggtctttagtaatgcatctgggtagcatctcaactgctggtagcatttatctgacttggaaagttggagaagaggcattcctactggagaaaaatgtcagtgttttcctataagctctgtgttagctattcattatatttgtgcttaaagatgttccttcattcatcaactaggggaagtccagatgcgggttatcttgaaagaaacaaactgacattctaggcagacagttgtctatgtggtctgagggtcagcagctgttagtctccttcctttggctcttgagacccacacatatcactttagccctaacaagggctcctcccacctccacctgttgccccagttgaaaagcatccattatgagctgaggtcagcctggatctggaattgcagcccacataaacataaaggaggatgtccctggtctgttccatccccacggatggtgttgctgctgggcaacagtgttggcttcttttaagtaccccctttcctcctcacccacctccaaactgactagcactcagagggacttatgataaaggttcagctccaggggtagtacctgagtgtgtgccatgccccttcagaccagctgcttccatcagaattccagggtcacagccccaacagaagcagcagtgcctctgtaggaggggtgctgggctctggccttctcatgcagagaggtccgggacagggtcagtatcgtgggcatgtgtatagcttcccaagttcttttacagtccctgctgggactccctgacttactttggttggttcctagtgctacttgttttacaaactacactttgtagaattgattagattaccttgtttatttaatgtgagtttgtgcctttttgtctcaatcttccaatacaggtatattgagaaaaaaagcagtctaataaaatcctagac

SEQ ID NO: 22186 - DNA, 1002 bp, Homo sapiens
  source 1..1002: mol_type = unassigned DNA
cctgctactttcctgcttggtgtcttgcctttgagtcgagtaatcctgcctgtgtctgtagatgagtatcaagtggggcagctgtattctgtggctgaggccagtaaaaatgaaacgggtggtggcgaaggcgtggaggtcctggtgaatgagccctacgagaaggacggtgagaaaggccagtacacacacaagatctaccacctgcagagcaaagtacccacgtttgttcgaatgctggccccagagggagccctgaatatacacgagaaagcctggaatgcttacccctactgcagaaccgttcttccaaatgagtacatgaaagaagactttctgattaaaattgaaacctggcacaaaccagatcttggcacgcaggagaatgtgcataagctggagcctgaggcgtggaaacacgtggaagccgtatatatagacattgcagatcgaagccaagtgctcagcaaggattacaaggcagaggaagacccagcaaaatttaaatctatcaaaacaggccgaggacccttgggccccaattggaagcaagagcttgtaaaccagaaggactgcccatatatgtgtgcatacaaactggtgaccgtcaagttcaagtggtggggcctgcagaacaaagtggagaacttcatccataagcaagagaggcgtctgtttacaaacttccacaggcagctgttctgttggctcgataagtgggttgacctgaccatggacgacattcgaaggatggaagaagagacgaagagacagctggatgaaatgagacaaaaggacccagtgaaaggaatgacagcagatgactaaagccgcctttcccctctgcactttttgcaagacagtggtcaacaggaagacccagcagctccaccctcccaagtgacaggccattttcggacgcagccgttctgtgcccattcttcaggcaactttcgattccttactgtagctaattctagatgcccttcagtattgtgaaca

SEQ ID NO: 22187 - DNA, 2826 bp, Homo sapiens
  source 1..2826: mol_type = unassigned DNA
tgagaggcggtagcggcggcggcggcggtggtatcggcggcagctgtgagggggttccgggaagatggtgctgatcaaggaattccgtgtggttttgccatgttctgttcaggagtatcaggttgggcagctttactctgttgcagaagctagtaagaatgagactggtggtggagaaggaattgaagtcttaaagaatgaaccttatgagaaggatggagaaaagggacagtatacgcacaaaatttatcacctaaagagcaaagtgcctgcattcgtgaggatgattgctcccgagggctccttggtgtttcatgagaaagcctggaatgcgtacccctactgtagaacaattgtaacgaatgaatatatgaaagatgatttcttcattaaaatcgaaacatggcacaaaccagacttgggaacattagaaaatgtacatggtttagatccaaacacatggaaaactgttgaaattgtccatatagatattgcagatagaagtcaagttgaaccagcagactacaaagctgatgaagacccagcattattccagtcagtcaagaccaagagaggccctttgggacccaactggaagaaggagctggcaaacagccctgactgtccccagatgtgtgcctataagctggtgaccatcaaattcaagtggtggggactgcaaagcaaagtagaaaacttcattcaaaagcaagaaaaacggatatttacaaacttccatcgccagcttttttgttggattgacaagtggatcgatctcacgatggaagacattaggagaatggaagacgagactcagaaagaactagaaacattacgtaatcaaggtcaagtgaggggaacaagcgcagccagtgatgagtgaagaagaatctgaccagtatcttgcagtgttgacgtttcccagatgtgtgcttgtgatgatacacacacatgcacaggttctcaaccacgtgtgtatatatgtatgtgtgcatatgtctgtagctgtatataaagcgcatgtagagctacagatccagatacacacacttgtgtatatatgtacatacagacatactgaagggattagtacaatttctccaaagtactgtacctatcttcagcaagaatgcaaaagaaaatattttcaatatatatacctggaacagattttaataattatcagagtaataccattaatggacaaattgactgcaatgtaatactagctggtatgtttcataaatgtcaagctgtggaccaacatatatagccttttattatttttctcttcttttaagtcagtctgttataaatttttttttagtcccataagcagtagactcccacagaaaatttcttcaaaattttttggtgttccaatgaatctgggatgtaaactctgaatgtatttataactatttatttctggatggtcattatcttgtagccaaatttgacaatataaagtaaggagcaaagttacaggccagtttttacttgtttgccctgagggaaaaatccttttaaaaaaaatttctggtttttattggatttttgtattttaaatttcaaatatttttctacatcaaacctagcaaaaatggagatgacggtttctgatttataataaatactagacagttttcaggctcctgttagacaaacacattgatgaagaaattagtcttaataggattgtaggctgtgtagaaaagttggaaatatagcacttcatggagtcttgttttgaagatgacagttttctgtaactacagcttggaaactatgcaaatggtctagattcctcagagctcacatgataggatatagttagtgatgacattttgctcttcttgtgggaacacacacttcaaggaggagatagtgactttgagataggaacagtttaagatgcagtgtgagtctggcctgcgtgcggtgaggaggccccgccaagagactggtggacatctgactgtgggatgtgctctcaagtaggacgtcatcaggacagattctgaataggcatcatgagagtgctggtcagaaacggctgccactttttttaatttaattttattttttatttaaaggaaggaacaatagctaggtaagatttttatcagctttctctgtctgaatccagtttttcctctgtcagtcctggaagcttgaatagaattatattgttgaagccttcaggtcacaaactgtcttttgtaacctcctgtccctcctaaaacacgccaacccctgcagtcaaatcacattagtaatctgatttgctgacagtcctgccctgcctgctcctcgttttcccacatgtcctgcatccctcccccactggagtgatttcagtgaatcagacaaggaaggatgtgtaggatcactactgcattgcaataccctgttatcctcagcaacaaaacccacatttcatacatcctttgtgtactcaggataaagactgatgtttactctctgggcactgttgtaagataggttttgtcagagcataatcattgtctgcaaagtgtttggtgcgaggaagattattgctaattttgtgaaataaagagtctagccctctccttttaatgaacttaactctcgctggcatctgtagtatcattgggagcttaggcgcacatggaaatgagagcccggcgcatggattttaatgtttttctaacaactgtggagatttgagggaatgtgtggtgaatgtaaaatacctagtttacttgccagtctcttgtgtaaattacagtaaaacaaagtaaatgaaatttaaacaaaaaataaatttgatcacaaaatgcc

SEQ ID NO: 22188 - DNA, 2926 bp, Homo sapiens
  source 1..2926: mol_type = unassigned DNA
cgcgcaggcgctgtgagaggcggtagcggcggcggcggcggtggtatcggcggcagctgtgagggggttccgggaagatggtgctgatcaaggaattccgtgtggttttgccatgttctgttcaggagtatcaggttgggcagctttactctgttgcagaagctagtaagaatgagactggtggtggagaaggaattgaagtcttaaagaatgaaccttatgagaaggatggagaaaagggacagtatacgcacaaaatttatcacctaaagagcaaagtgcctgcattcgtgaggatgattgctcccgagggctccttggtgtttcatgagaaagcctggaatgcgtacccctactgtagaacaattgtaacgaatgaatatatgaaagatgatttcttcattaaaatcgaaacatggcacaaaccagacttgggaacattagaaaatgtacatggtttagatccaaacacatggaaaactgttgaaattgtccatatagatattgcagatagaagtcaagttgaaccagcagactacaaagctgatgaagacccagcattattccagtcagtcaagaccaagagaggccctttgggacccaactggaagaaggagctggcaaacagccctgactgtccccagatgtgtgcctataagctggtgaccatcaaattcaagtggtggggactgcaaagcaaagtagaaaacttcattcaaaagcaagaaaaacggatatttacaaacttccatcgccagcttttttgttggattgacaagtggatcgatctcacgatggaagacattaggagaatggaagacgagactcagaaagaactagaaacaatgcgtaagaggggttccgttcgaggcacgtcggctgctgatgtctagatgagtcccctgtagggtcagagacaatgtcaaactgtttacgtaatcaaggtcaagtgaggggaacaagcgcagccagtgatgagtgaagaagaatctgaccagtatcttgcagtgttgacgtttcccagatgtgtgcttgtgatgatacacacacatgcacaggttctcaaccacgtgtgtatatatgtatgtgtgcatatgtctgtagctgtatataaagcgcatgtagagctacagatccagatacacacacttgtgtatatatgtacatacagacatactgaagggattagtacaatttctccaaagtactgtacctatcttcagcaagaatgcaaaagaaaatattttcaatatatatacctggaacagattttaataattatcagagtaataccattaatggacaaattgactgcaatgtaatactagctggtatgtttcataaatgtcaagctgtggaccaacatatatagccttttattatttttctcttcttttaagtcagtctgttataaatttttttttagtcccataagcagtagactcccacagaaaatttcttcaaaattttttggtgttccaatgaatctgggatgtaaactctgaatgtatttataactatttatttctggatggtcattatcttgtagccaaatttgacaatataaagtaaggagcaaagttacaggccagtttttacttgtttgccctgagggaaaaatccttttaaaaaaaatttctggtttttattggatttttgtattttaaatttcaaatatttttctacatcaaacctagcaaaaatggagatgacggtttctgatttataataaatactagacagttttcaggctcctgttagacaaacacattgatgaagaaattagtcttaataggattgtaggctgtgtagaaaagttggaaatatagcacttcatggagtcttgttttgaagatgacagttttctgtaactacagcttggaaactatgcaaatggtctagattcctcagagctcacatgataggatatagttagtgatgacattttgctcttcttgtgggaacacacacttcaaggaggagatagtgactttgagataggaacagtttaagatgcagtgtgagtctggcctgcgtgcggtgaggaggccccgccaagagactggtggacatctgactgtgggatgtgctctcaagtaggacgtcatcaggacagattctgaataggcatcatgagagtgctggtcagaaacggctgccactttttttaatttaattttattttttatttaaaggaaggaacaatagctaggtaagatttttatcagctttctctgtctgaatccagtttttcctctgtcagtcctggaagcttgaatagaattatattgttgaagccttcaggtcacaaactgtcttttgtaacctcctgtccctcctaaaacacgccaacccctgcagtcaaatcacattagtaatctgatttgctgacagtcctgccctgcctgctcctcgttttcccacatgtcctgcatccctcccccactggagtgatttcagtgaatcagacaaggaaggatgtgtaggatcactactgcattgcaataccctgttatcctcagcaacaaaacccacatttcatacatcctttgtgtactcaggataaagactgatgtttactctctgggcactgttgtaagataggttttgtcagagcataatcattgtctgcaaagtgtttggtgcgaggaagattattgctaattttgtgaaataaagagtctagccctctccttttaatgaacttaactctcgctggcatctgtagtatcattgggagcttaggcgcacatggaaatgagagcccggcgcatggattttaatgtttttctaacaactgtggagatttgagggaatgtgtggtgaatgtaaaatacctagtttacttgccagtctcttgtgtaaattacagtaaaacaaagtaaatgaaatttaaacaaaaaataaatttgatcacaaaatgcca

SEQ ID NO: 22189 - DNA, 884 bp, Homo sapiens
  source 1..884: mol_type = unassigned DNA
actgtattcatagcatagcacttccccaccaccccaaattctccctgctttctttccaagtgagttgtctcctctagactgtgagcttcttgagaacagggactgtgtctgcttctagatgcatccccactgcctagaaccgtgtctgacacagagcaagccagcgacctccgggctgcggctttgaggcccacggcgctttcggtgtaactgcgcgaaccaactcctgaacagcccgctttcctgggtctcgaggccaagggcctcttttctcccagagggcctccgtcgggagtgctggccgctcatcctgccgagtcacagccgtgtggttttgccatgttctgttcaggagtatcaggttgggcagctttactctgttgcagaagctagtaagaatgagactggtggtggagaaggaattgaagtcttaaagaatgaaccttatgagaaggatggagaaaagggacagtatacgcacaaaatttatcacctaaagagcaaagtgcctgcattcgtgaggatgattgctcccgagggctccttggtgtttcatgagaaagcctggaatgcgtacccctactgtagaacaattgtaacgaatgaatatatgaaagatgatttcttcattaaaatcgaaacatggcacaaaccagacttgggaacattagaaaatgtacatggtttagatccaaacacatggaaaactgttgaaattgtccatatagatattgcagatagaagtcaagttgaaccagcagactacaaagctgatgaagacccagcattattccagtcagtcaagaccaagagaggccctttgggacccaactggaagaaggagctggcaaacagccctgactgtccccagatgtgtgcctata

SEQ ID NO: 22190 - DNA, 590 bp, Homo sapiens
  source 1..590: mol_type = unassigned DNA
agctgtgagggggttccgggaagatggtgctgatcaaggaattgtgagtgggtctgtgggcgcgagcgaggccgtgggacggcagtgatgggagatttgttgatggagaagtgccgtgtggttttgccatgttctgttcaggagtatcaggttgggcagctttactctgttgcagaagctagtaagaatgagactggtggtggagaaggaattgaagtcttaaagaatgaaccttatgagaaggatggagaaaagggacagtatacgcacaaaatttatcacctaaagagcaaagtgcctgcattcgtgaggatgattgctcccgagggctccttggtgtttcatgagaaagcctggaatgcgtacccctactgtagaacaattgtaacgaatgaatatatgaaagatgatttcttcattaaaatcgaaacatggcacaaaccagacttgggaacattagaaaatgtacatggtttagatccaaacacatggaaaactgttgaaattgtccatatagatattgcagatagaagtcaagttgaaccagcagactacaaagctgatgaagacccagcattattccagtcagt

SEQ ID NO: 22191 - DNA, 2852 bp, Homo sapiens
  source 1..2852: mol_type = unassigned DNA
atgggagatttgttgatggagaagtgccgtgtggttttgccatgttctgttcaggagtatcaggttgggcagctttactctgttgcagaagctagtaagaatgagactggtggtggagaaggaattgaagtcttaaagaatgaaccttatgagaaggatggagaaaagggacagtatacgcacaaaatttatcacctaaagagcaaagtgcctgcattcgtgaggatgattgctcccgagggctccttggtgtttcatgagaaagcctggaatgcgtacccctactgtagaacaattgtaacgaatgaatatatgaaagatgatttcttcattaaaatcgaaacatggcacaaaccagacttgggaacattagaaaatgtacatggtttagatccaaacacatggaaaactgttgaaattgtccatatagatattgcagatagaagtcaagttgaaccagcagactacaaagctgatgaagacccagcattattccagtcagtcaagaccaagagaggccctttgggacccaactggaagaaggagctggcaaacagccctgactgtccccagatgtgtgcctataagctggtgaccatcaaattcaagtggtggggactgcaaagcaaagtagaaaacttcattcaaaagcaagaaaaacggatatttacaaacttccatcgccagcttttttgttggattgacaagtggatcgatctcacgatggaagacattaggagaatggaagacgagactcagaaagaactagaaacaatgcgtaagaggggttccgttcgaggcacgtcggctgctgatgtctagatgagtcccctgtagggtcagagacaatgtcaaactgtttacgtaatcaaggtcaagtgaggggaacaagcgcagccagtgatgagtgaagaagaatctgaccagtatcttgcagtgttgacgtttcccagatgtgtgcttgtgatgatacacacacatgcacaggttctcaaccacgtgtgtatatatgtatgtgtgcatatgtctgtagctgtatataaagcgcatgtagagctacagatccagatacacacacttgtgtatatatgtacatacagacatactgaagggattagtacaatttctccaaagtactgtacctatcttcagcaagaatgcaaaagaaaatattttcaatatatatacctggaacagattttaataattatcagagtaataccattaatggacaaattgactgcaatgtaatactagctggtatgtttcataaatgtcaagctgtggaccaacatatatagccttttattatttttctcttcttttaagtcagtctgttataaatttttttttagtcccataagcagtagactcccacagaaaatttcttcaaaattttttggtgttccaatgaatctgggatgtaaactctgaatgtatttataactatttatttctggatggtcattatcttgtagccaaatttgacaatataaagtaaggagcaaagttacaggccagtttttacttgtttgccctgagggaaaaatccttttaaaaaaaatttctggtttttattggatttttgtattttaaatttcaaatatttttctacatcaaacctagcaaaaatggagatgacggtttctgatttataataaatactagacagttttcaggctcctgttagacaaacacattgatgaagaaattagtcttaataggattgtaggctgtgtagaaaagttggaaatatagcacttcatggagtcttgttttgaagatgacagttttctgtaactacagcttggaaactatgcaaatggtctagattcctcagagctcacatgataggatatagttagtgatgacattttgctcttcttgtgggaacacacacttcaaggaggagatagtgactttgagataggaacagtttaagatgcagtgtgagtctggcctgcgtgcggtgaggaggccccgccaagagactggtggacatctgactgtgggatgtgctctcaagtaggacgtcatcaggacagattctgaataggcatcatgagagtgctggtcagaaacggctgccactttttttaatttaattttattttttatttaaaggaaggaacaatagctaggtaagatttttatcagctttctctgtctgaatccagtttttcctctgtcagtcctggaagcttgaatagaattatattgttgaagccttcaggtcacaaactgtcttttgtaacctcctgtccctcctaaaacacgccaacccctgcagtcaaatcacattagtaatctgatttgctgacagtcctgccctgcctgctcctcgttttcccacatgtcctgcatccctcccccactggagtgatttcagtgaatcagacaaggaaggatgtgtaggatcactactgcattgcaataccctgttatcctcagcaacaaaacccacatttcatacatcctttgtgtactcaggataaagactgatgtttactctctgggcactgttgtaagataggttttgtcagagcataatcattgtctgcaaagtgtttggtgcgaggaagattattgctaattttgtgaaataaagagtctagccctctccttttaatgaacttaactctcgctggcatctgtagtatcattgggagcttaggcgcacatggaaatgagagcccggcgcatggattttaatgtttttctaacaactgtggagatttgagggaatgtgtggtgaatgtaaaatacctagtttacttgccagtctcttgtgtaaattacagtaaaacaaagtaaatgaaatttaaacaaaaaataaatttgatcacaaaatg

SEQ ID NO: 22192 - DNA, 6636 bp, Homo sapiens
  source 1..6636: mol_type = unassigned DNA
cggcgccgcgcggccgcgctagaatggaggcgcccagcggcagcgagcccggcggcgacggggccggggactgcgcccacccggacccccgggcccctggcgccgcggcgcccagctccggccccggcccgtgcgcggccgcccgggagtccgagcgccagctgcgcctccgcctctgcgtcctcaacgagatcttgggcaccgagagggactacgtgggcaccttgcgcttcttgcagtcggcattcctgcatcgcatccggcagaacgtggccgactcagtggagaagggcctcacggaggagaatgtcaaggtcctgttctcgaacatcgaagacatcctggaagttcataaggatttcttggccgccttggagtattgtttacacccggagccgcagtctcagcatgaacttgggaatgttttcttaaaattcaaggacaagttctgcgtgtacgaggagtattgcagcaaccatgagaaagccctgaggctgctggtggagctgaacaagatccctaccgtgcgcgccttccttttgagctgcatgcttctgggaggccggaagaccacggacatccctttggaaggctacctgttgtctccgatccagaggatctgcaagtacccgctcctccttaaggagctggccaagaggactcccggcaagcacccagaccaccccgcggtccagagtgccctgcaggccatgaagaccgtttgctccaacatcaatgagaccaagcggcagatggagaagctggaagccctggagcagctgcagtcccacatcgaaggctgggagggttccaacctcacagacatctgcactcagctcctcctgcaagggactttgttaaagatctctgcgggcaacatccaggaaagggccttcttcctcttcgacaaccttctcgtctactgcaagcggaaatccagggtcaccgggagcaagaagtccaccaagaggaccaaatccatcaacggctccctctacatcttcaggggtcgaatcaacactgaagtcatggaggtggagaatgtggaagatgggacagcggattaccatagcaacggctataccgtcaccaacggctggaagatccacaacacggccaagaataagtggtttgtctgcatggccaagacggcagaggagaagcagaagtggctggatgccatcatccgcgagcgggagcagcgcgagagcctgaagctgggcatggagcgtgatgcctacgtcatgattgcggagaagggggagaagctgtaccacatgatgatgaacaagaaggtgaacctcatcaaggaccgccggagaaagctgagcactgtccccaagtgctttcttggcaatgagttcgttgcctggctcctagaaattggtgaaatcagcaagacggaagaaggagtcaacttgggccaagccctgttggagaatggcatcatccaccatgtttccgacaagcaccagttcaagaatgagcaggtgatgtatcgcttccgctacgacgatggcacctacaaggcccgaagtgagctggaggacatcatgtccaagggtgtgaggctttactgccgtcttcacagcctctacaccccggtgatcaaagaccgtgattaccacctgaagacctacaagtcagtgcttcccgggagcaagctggtggactggctgctggctcagggagactgccagactcgggaggaggcagtggcgctcggcgtgggtctgtgcaacaatggcttcatgcaccacgtgctggagaagagcgagttcagggatgagtcccagtacttccgctttcatgctgacgaggagatggaggggaccagcagcaagaacaaacagcttcgcaacgacttcaagctggtggagaacattctggccaagcgcctgctgatcctgccccaggaggaggactatggctttgacatcgaggagaagaacaaggctgtggtggtgaagtccgtccagaggggctcgctggctgaggtggctggcctgcaggtggggaggaagatctactccatcaatgaggacctggtgttcctgcggccgttttcagaggtggagtccatcctcaaccagtccttctgctcccgccgccctctgcgcctcctggtggccacgaaggccaaagagatcatcaaaatccccgaccagccggacacactgtgcttccagattcgtggagctgccccaccgtacgtctatgctgtggggagaggctctgaggccatggctgcagggctctgtgctggtcagtgcattctgaaggtcaatggcagcaacgtgatgaacgatggtgcccctgaggtcctggagcacttccaggcattccggagtcggcgcgaagaggccctgggcctgtaccagtggatctaccacacccatgaggatgcccaggaagcacgagccagtcaggaggcctccactgaggaccccagtggcgagcaggcccaggaggaagaccaggctgattcagccttcccactgctgtccctgggtccccggctgagcctgtgtgaggacagccccatggtcaccctgactgtggacaacgtgcacctggaacacggcgtggtgtatgagtatgtgagcacggcaggcgtcaggtgccatgtgctggagaagatcgtggagccccgcggctgcttcggcctcaccgccaagatcctcgaggcctttgctgccaatgacagcgtcttcgtggagaactgcaggcggctcatggccctgagcagcgccatcgtgaccatgccccactttgagttccgcaacatctgtgacaccaagctggagagcattggccagaggattgcctgctaccaggagtttgcagcccaactgaagagcagggtcagcccacccttcaaacaagcccccctggagccccacccgctgtgtggcctggacttctgccccaccaattgccacatcaacctcatggaagtgtcctaccccaagaccaccccctcagtgggcaggtccttcagcatccgctttggacgcaaaccctccctcatcggccttgacccggagcaaggccacctgaaccccatgtcgtacacccagcactgcatcaccaccatggctgctccctcctggaagtgcttgcctgctgcagagggtgatccccaaggccagggtctccatgatggcagcttcgggccagccagtgggacccttggtcaggaagaccggggcctcagcttcctactcaagcaggaggaccgtgagatccaggatgcctacctgcagctcttcaccaagctggatgtggccctgaaggagatgaagcaatatgtcacccagatcaacaggctgctgtccaccatcacagagcccacctcgggtgggtcctgcgacgcatccttggctgaggaggcctcctccctgcccctggtcagtgaagagagcgagatggacaggagtgaccatgggggcatcaagaaggtgtgcttcaaggtggccgaggaggaccaggaggactcaggccacgacaccatgagttatcgcgactcctacagcgagtgtaacagcaatcgagactcggtcctgtcctacaccagcgtgagaagtaacagctcctacttgggcagcgacgagatggggtctggagatgagctgccctgtgacatgcggatcccatctgacaagcaggacaagcttcatggctgcctggagcacctctttaaccaggtggactccatcaatgctctcctcaaggggccagtcatgagccgggctttcgaagagaccaagcatttccctatgaaccacagcttacaagagtttaaacagaaagaagagtgtacaatccgtggccggagcctgatccagattagcatccaggaggacccctggaacctccccaactccatcaagaccctggtggacaacattcagagatatgtggaagatgggaagaaccagctgctcctggccttgctgaagtgcacagacacggagctgcagctgcgcagagacgcgatcttctgccaggccctggtggccgccgtgtgcaccttctccaagcagctgctggcggccctgggctaccgctacaacaacaatggcgagtacgaggagagcagccgcgacgccagccgcaagtggctggagcaggtggcggccacgggcgtcctgctgcactgccagtccctgctctcgccagccacagtgaaggaggaacggaccatgctggaggacatctgggtgacgctgtcagagctggacaatgtcaccttctcctttaagcagctggacgagaactatgtggccaacaccaacgtcttctaccacattgagggcagccggcaggcgctgaaggtcatcttctacctcgacagctaccacttctccaagctgccctcccgcctggagggtggggccagcctgaggctgcacacagcgctgttcacgaaagtgctggagaacgtggaggggctgccttctccaggcagccaggccgcggaggatttgcagcaggacatcaacgcgcagtccctggagaaagttcagcagtattaccgcaaactcagggcattttacctggagcggtctaacctgcccacggatgccagcaccacggcggtaaagatagaccagctgatccgccccatcaatgccctggatgagctctgccgcctcatgaagtcctttgtccacccaaagcctggtgctgctgggagtgtgggcgccggcctcatccccatctcctcggagctctgctaccgcctgggggcctgccagatggtcatgtgtggcacaggcatgcagaggagcaccctgagcgtgtccctggagcaggcggccatcttggcacggagccacgggttgctgcccaagtgcatcatgcaggccacggacatcatgcggaagcagggcccaagggtggagattctggccaaaaacctgcgagtcaaggaccagatgccccagggtgctccgcgcctctaccgcctctgccagccgccggtggatggggacctctgaacacccaaatgccccacgctgggccgcggcctctggagctgggatttgggaggacacagcaggcagcgctggccttctccagggatggcccaaggcttccgcagccgcccgttccgggacctgcccagcgtcctccctgcctccttccgggacaagcctggccaccctcgctgtgatgacgagctggctgattggccctgggccggcccattcttcacacgcctgccagaagctggaggggtgctggagacccatagagctgatgggagcagctggtgcctggccttcggctcctgcgtccccagaacccaagggaacgtcatggaggccacatggggccacccggctccctcgggatggctccgcctgcacttttgaaaccccggtttccttcaacgtccacattccaggtgaccacacgtgtctcctcctcctcatcttagcttccaggttcaccctaaccctgtactaacctgcttggtggacttggaaaagacttggctctgtcgggaaaggagagacggggcctccatcacgcctgttaccagaggatccccgagagccacaccagctctggacatcaccgcccctggaactggggccaccagccctgggcacgagatttgctctgactttatttatatggcatgaaatctctggtttattttgggattttttgttgttggtgttgtcaaagtttgttttttctaaagttgtgtgattatatatttgacattttacatttcaaagaaaggtatgttgtctaacaggggaccaacagaaggtagtattgacaactgttcctgcttctactaaaaaaaaaagagcacaaaagaaaaactaaattattgaaaaattaaaaaatgtcattgtttcctgtttgttaatattagggttgtaaggtgtcgttttgaggtatcgactgtgattccttcccccaccctccattctccagcggttggccggtgttagaactcgctctctttgagtgactggctacaagggcctgagaggtggccagccagggttggagctggaggggatggagccccacctgaggtgccgtgtcacacgggttagagggtcactgggaaacaccgggcggtggcttctgtgatttattttcttgatggtaacttctcagagcagggcgattgggacatcaccagccagagcacaggaagccaccctgcctgctggggaggagggacccacacaagccccctcggcagtttgtccccccagcttcggtatgccttcagggaaaggtcacagctggggaggaagcggggggacgcctgtcacccctggcaggtggtgagttcaggtgggggctccctgctgcccccaggcctgggagcttgaagccctcccggcatctggcatccgagcctcccgccctccagggtgcgcttccctctcttgccgcagcatacacgagggcaggcagtggccttgtcactgtatcttgcatcagagacaaaggaggacccgctttagccctgctgcgggaaatgggggagggcccagggccagcgcattgtgcactggtttactttaaaatgtacagattcttctcgttaaattcttgatagattttttattattattaaaagtcagtttataatacaaa

SEQ ID NO: 22193 - DNA, 6737 bp, Homo sapiens
  source 1..6737: mol_type = unassigned DNA
cggcgccgcgcggccgcgctagaatggaggcgcccagcggcagcgagcccggcggcgacggggccggggactgcgcccacccggacccccgggcccctggcgccgcggcgcccagctccggccccggcccgtgcgcggccgcccgggagtccgagcgccagctgcgcctccgcctctgcgtcctcaacgagatcttgggcaccgagagggactacgtgggcaccttgcgcttcttgcagtcggcattcctgcatcgcatccggcagaacgtggccgactcagtggagaagggcctcacggaggagaatgtcaaggtcctgttctcgaacatcgaagacatcctggaagttcataaggatttcttggccgccttggagtattgtttacacccggagccgcagtctcagcatgaacttgggaatgttttcttaaaattcaaggacaagttctgcgtgtacgaggagtattgcagcaaccatgagaaagccctgaggctgctggtggagctgaacaagatccctaccgtgcgcgccttccttttgagctgcatgcttctgggaggccggaagaccacggacatccctttggaaggctacctgttgtctccgatccagaggatctgcaagtacccgctcctccttaaggagctggccaagaggactcccggcaagcacccagaccaccccgcggtccagagtgccctgcaggccatgaagaccgtttgctccaacatcaatgagaccaagcggcagatggagaagctggaagccctggagcagctgcagtcccacatcgaaggctgggagggttccaacctcacagacatctgcactcagctcctcctgcaagggactttgttaaagatctctgcgggcaacatccaggaaagggccttcttcctcttcgacaaccttctcgtctactgcaagcggaaatccagggtcaccgggagcaagaagtccaccaagaggaccaaatccatcaacggctccctctacatcttcaggggtcgaatcaacactgaagtcatggaggtggagaatgtggaagatgggacagcggattaccatagcaacggctataccgtcaccaacggctggaagatccacaacacggccaagaataagtggtttgtctgcatggccaagacggcagaggagaagcagaagtggctggatgccatcatccgcgagcgggagcagcgcgagagcctgaagctgggcatggagcgtgatgcctacgtcatgattgcggagaagggggagaagctgtaccacatgatgatgaacaagaaggtgaacctcatcaaggaccgccggagaaagctgagcactgtccccaagtgctttcttggcaatgagttcgttgcctggctcctagaaattggtgaaatcagcaagacggaagaaggagtcaacttgggccaagccctgttggagaatggcatcatccaccatgtttccgacaagcaccagttcaagaatgagcaggtgatgtatcgcttccgctacgacgatggcacctacaaggcccgaagtgagctggaggacatcatgtccaagggtgtgaggctttactgccgtcttcacagcctctacaccccggtgatcaaagaccgtgattaccacctgaagacctacaagtcagtgcttcccgggagcaagctggtggactggctgctggctcagggagactgccagactcgggaggaggcagtggcgctcggcgtgggtctgtgcaacaatggcttcatgcaccacgtgctggagaagagcgagttcagggatgagtcccagtacttccgctttcatgctgacgaggagatggaggggaccagcagcaagaacaaacagcttcgcaacgacttcaagctggtggagaacattctggccaagcgcctgctgatcctgccccaggaggaggactatggctttgacatcgaggagaagaacaaggctgtggtggtgaagtccgtccagaggggctcgctggctgaggtggctggcctgcaggtggggaggaagatctactccatcaatgaggacctggtgttcctgcggccgttttcagaggtggagtccatcctcaaccagtccttctgctcccgccgccctctgcgcctcctggtggccacgaaggccaaagagatcatcaaaatccccgaccagccggacacactgtgcttccagattcgtggagctgccccaccgtacgtctatgctgtggggagaggctctgaggccatggctgcagggctctgtgctggtcagtgcattctgaaggtcaatggcagcaacgtgatgaacgatggtgcccctgaggtcctggagcacttccaggcattccggagtcggcgcgaagaggccctgggcctgtaccagtggatctaccacacccatgaggatgcccaggaagcacgagccagtcaggaggcctccactgaggaccccagtggcgagcaggcccaggaggaagaccaggctgattcagccttcccactgctgtccctgggtccccggctgagcctgtgtgaggacagccccatggtcaccctgactgtggacaacgtgcacctggaacacggcgtggtgtatgagtatgtgagcacggcaggcgtcaggtgccatgtgctggagaagatcgtggagccccgcggctgcttcggcctcaccgccaagatcctcgaggcctttgctgccaatgacagcgtcttcgtggagaactgcaggcggctcatggccctgagcagcgccatcgtgaccatgccccactttgagttccgcaacatctgtgacaccaagctggagagcattggccagaggattgcctgctaccaggagtttgcagcccaactgaagagcagggtcagcccacccttcaaacaagcccccctggagccccacccgctgtgtggcctggacttctgccccaccaattgccacatcaacctcatggaagtgtcctaccccaagaccaccccctcagtgggcaggtccttcagcatccgctttggacgcaaaccctccctcatcggccttgacccggagcaaggccacctgaaccccatgtcgtacacccagcactgcatcaccaccatggctgctccctcctggaagtgcttgcctgctgcagagggtgatccccaaggccagggtctccatgatggcagcttcgggccagccagtgggacccttggtcaggaagaccggggcctcagcttcctactcaagcaggaggaccgtgagatccaggatgcctacctgcagctcttcaccaagctggatgtggccctgaaggagatgaagcaatatgtcacccagatcaacaggctgctgtccaccatcacagagcccacctcgggtgggtcctgcgacgcatccttggctgaggaggcctcctccctgcccctggtcagtgaagagagcgagatggacaggagtgaccatgggggcatcaagaaggtgtgcttcaaggtggccgaggaggaccaggaggactcaggccacgacaccatgagttatcgcgactcctacagcgagtgtaacagcaatcgagactcggtcctgtcctacaccagcgtgagaagtaacagctcctacttgggcagcgacgagatggggtctggagatgagctgccctgtgacatgcggatcccatctgacaagcaggacaagcttcatggctgcctggagcacctctttaaccaggtggactccatcaatgctctcctcaaggggccagtcatgagccgggctttcgaagagaccaagcatttccctatgaaccacagcttacaagagtttaaacagaaagaagagtgtacaatccgtggccggagcctgatccagattagcatccaggaggacccctggaacctccccaactccatcaagaccctggtggacaacattcagagatatgtggaagatgggaagaaccagctgctcctggccttgctgaagtgcacagacacggagctgcagctgcgcagagacgcgatcttctgccaggccctggtggccgccgtgtgcaccttctccaagcagctgctggcggccctgggctaccgctacaacaacaatggcgagtacgaggagagcagccgcgacgccagccgcaagtggctggagcaggtggcggccacgggcgtcctgctgcactgccagtccctgctctcgccagccacagtgaaggaggaacggaccatgctggaggacatctgggtgacgctgtcagagctggacaatgtcaccttctcctttaagcagctggacgagaactatgtggccaacaccaacgtcttctaccacattgagggcagccggcaggcgctgaaggtcatcttctacctcgacagctaccacttctccaagctgccctcccgcctggagggtggggccagcctgaggctgcacacagcgctgttcacgaaaggtgagcttcaggcctggggcagggaggaccacgggggccgggccaaggccaccaagcacaccggctcccaaccgcctgcccgcccccgacatctcccctcccagtgctggagaacgtggaggggctgccttctccaggcagccaggccgcggaggatttgcagcaggacatcaacgcgcagtccctggagaaagttcagcagtattaccgcaaactcagggcattttacctggagcggtctaacctgcccacggatgccagcaccacggcggtaaagatagaccagctgatccgccccatcaatgccctggatgagctctgccgcctcatgaagtcctttgtccacccaaagcctggtgctgctgggagtgtgggcgccggcctcatccccatctcctcggagctctgctaccgcctgggggcctgccagatggtcatgtgtggcacaggcatgcagaggagcaccctgagcgtgtccctggagcaggcggccatcttggcacggagccacgggttgctgcccaagtgcatcatgcaggccacggacatcatgcggaagcagggcccaagggtggagattctggccaaaaacctgcgagtcaaggaccagatgccccagggtgctccgcgcctctaccgcctctgccagccgccggtggatggggacctctgaacacccaaatgccccacgctgggccgcggcctctggagctgggatttgggaggacacagcaggcagcgctggccttctccagggatggcccaaggcttccgcagccgcccgttccgggacctgcccagcgtcctccctgcctccttccgggacaagcctggccaccctcgctgtgatgacgagctggctgattggccctgggccggcccattcttcacacgcctgccagaagctggaggggtgctggagacccatagagctgatgggagcagctggtgcctggccttcggctcctgcgtccccagaacccaagggaacgtcatggaggccacatggggccacccggctccctcgggatggctccgcctgcacttttgaaaccccggtttccttcaacgtccacattccaggtgaccacacgtgtctcctcctcctcatcttagcttccaggttcaccctaaccctgtactaacctgcttggtggacttggaaaagacttggctctgtcgggaaaggagagacggggcctccatcacgcctgttaccagaggatccccgagagccacaccagctctggacatcaccgcccctggaactggggccaccagccctgggcacgagatttgctctgactttatttatatggcatgaaatctctggtttattttgggattttttgttgttggtgttgtcaaagtttgttttttctaaagttgtgtgattatatatttgacattttacatttcaaagaaaggtatgttgtctaacaggggaccaacagaaggtagtattgacaactgttcctgcttctactaaaaaaaaaagagcacaaaagaaaaactaaattattgaaaaattaaaaaatgtcattgtttcctgtttgttaatattagggttgtaaggtgtcgttttgaggtatcgactgtgattccttcccccaccctccattctccagcggttggccggtgttagaactcgctctctttgagtgactggctacaagggcctgagaggtggccagccagggttggagctggaggggatggagccccacctgaggtgccgtgtcacacgggttagagggtcactgggaaacaccgggcggtggcttctgtgatttattttcttgatggtaacttctcagagcagggcgattgggacatcaccagccagagcacaggaagccaccctgcctgctggggaggagggacccacacaagccccctcggcagtttgtccccccagcttcggtatgccttcagggaaaggtcacagctggggaggaagcggggggacgcctgtcacccctggcaggtggtgagttcaggtgggggctccctgctgcccccaggcctgggagcttgaagccctcccggcatctggcatccgagcctcccgccctccagggtgcgcttccctctcttgccgcagcatacacgagggcaggcagtggccttgtcactgtatcttgcatcagagacaaaggaggacccgctttagccctgctgcgggaaatgggggagggcccagggccagcgcattgtgcactggtttactttaaaatgtacagattcttctcgttaaattcttgatagattttttattattattaaaagtcagtttataatac

SEQ ID NO: 22194 - DNA, 10750 bp, Homo sapiens
  source 1..10750: mol_type = unassigned DNA
gccagagcagcggggccgggcgcgcagggcctggccggagcccccactcccaggagtttcctctgcagagccccgcgccccccgcgccgggatttcagcccgatcccctcctctccctgcgcccagcctctccccagcatgtaaagtcttctgtctctcctcggagttggcggaggcggcaactttccattctcgccgccgggggccgggcagcagcgggcgcgcgggtcagcgctcagcacggcgggcagcgccgcgctgcgcaccgccgccgaccatgagcgaggacagccgcggagacagccgcgccgagagcgccaaggacctggagaagcagcttcgcctgcgcgtgtgcgtgctcagcgagctccagaagaccgagcgggactatgtgggcacgctggagttcctggtgtcggcattcttacacagaatgaaccagtgtgcagcatcaaaagttgacaaaaatgtgacagaagaaacagtgaagatgttgttctcaaacattgaagacatccttgcagtacataaagaattcttaaaagtcgtggaagaatgcttacaccccgaacctaatgctcaacaagaagtgggaacctgctttcttcactttaaagacaagtttcgtatctatgatgaatattgtagtaaccatgagaaggcacaaaaattacttcttgaactcaacaaaataagaacaatccggacatttcttttgaactgcatgctgcttggaggacggaagaacacagatgttcccttggaaggatatttagtaacaccaatacaaagaatatgcaagtaccctcttattttgaaggagttgctgaagcggactccacggaaacacagtgactatgcagcagtgatggaagccctccaagccatgaaagctgtctgttccaacataaacgaggccaagagacagatggagaagttagaagttttagaggaatggcagtctcacattgaaggctgggaggggtccaacatcactgacacctgcactgaaatgctaatgtgtggagtcttactgaaaatttcttctggaaatattcaagaacgggtgttttttcttttcgataatcttttggtgtactgcaaaagaaaacacagacggttgaagaacagcaaggcatctacagatggacatcggtacctttttcgtggccggatcaacacggaggtgatggaagtggagaatgtggatgatggcaccgctgatttccatagcagtggacacattgttgttaatggatggaagatacataacacagcaaaaaataaatggtttgtttgtatggcaaaaacacctgaagagaagcatgaatggtttgaagctattttgaaagaaagagaacggcggaaaggtttaaaattaggaatggagcaagatacctgggtcatgatctctgaacagggtgagaaactttataaaatgatgtgcagacaaggaaatctgatcaaagaccgaaagagaaaactgactacgttccctaaatgctttcttggaagcgaatttgtgtcatggctgttggaaattggagagattcacaggcctgaggaaggcgtgcacttgggacaagcattattagaaaatggaatcattcaccatgttactgataaacatcaattcaaaccagaacagatgttatatagatttcgctatgatgatggaacattttatccaagaaatgagatgcaggacgtgatttcaaagggtgtaagattatattgtcgtcttcatagcctttttactccagtgataagagataaagattaccatttaaggacctacaaatctgtggtcatggccaacaaactgatagactggttaattgcacagggagattgccgcaccagagaagaggcaatgatatttggcgttggactctgtgacaatggatttatgcaccatgtccttgaaaaaagcgaattcaaagatgaacccctacttttccgttttttttcggatgaggaaatggagggatcaaatatgaaacatcgacttatgaaacatgacttaaaagttgtggaaaatgttatagctaagtcattattgattaaatccaatgaaggcagctatggctttggattagaagacaaaaataaagttccaataataaagttggtagaaaagggatctaatgctgagatggctggcatggaagtcgggaaaaagatttttgctattaatggtgacctagtttttatgagacctttcaatgaagtggattgcttcctgaaatcgtgtttaaacagcagaaaacctctaagagttcttgtgagcacaaagccaagagagacagtgaaaattccagattcagctgatggacttggcttccagatccggggatttggcccttctgttgtgcatgctgtaggaagaggaactgtggctgcagcagctggtcttcaccctggacagtgcattatcaaggtgaatggaatcaatgtcagcaaagagacacatgccagtgtcattgcacacgttacagcctgcaggaagtacaggcggccaacgaagcaagattccatacaatgggtttataatagcattgagagtgctcaagaagaccttcaaaaatctcactccaagccccctggagatgaagcaggggatgcttttgactgtaaagtagaagaggttattgacaaattcaacactatggccatcattgatgggaagaaggagcatgtgagtctgacagtggacaatgtccacctggaatatggtgtcgtgtatgagtacgacagcacagctggcatcaagtgcaatgtggtggaaaagatgattgagcccaaaggtttcttcagcttaactgccaagattcttgaagccctggctaaaagtgatgagcattttgtacaaaactgtaccagcctaaattctctaaatgaagtgattcctactgaccttcagagtaaattcagtgccctttgcagtgaaagaattgaacacctatgtcagagaatatccagttataaaaagttttctcgtgtactgaagaatagggcctggcctacttttaaacaggccaaatctaaaatctccccactgcacagcagtgatttctgccctaccaactgccatgtcaatgtgatggaagtttcttatcccaaaacatcaacctctttgggaagtgcatttggtgttcagttggatagcaggaagcataattctcatgataaagaaaacaaatcttcggagcaagggaaactgagccctatggtgtacattcagcacaccatcacaaccatggcggccccttcaggtctgtctctgggacagcaggatggccatggtctcaggtatctgctaaaagaagaagacttagaaacccaagacatctatcagaaactgctgggcaaacttcagactgcactgaaagaggtggagatgtgtgtttgtcaaatagatgaccttctgtcttcaataacatattctcctaaattagaacgtaagacatcagagggcataataccaacagacagtgacaatgagaagggagaaagaaacagcaaacgggtatgttttaatgtagcaggagatgaacaggaagattctggtcatgacaccatcagcaacagagactcttacagtgactgcaacagcaataggaattccatcgcctccttcaccagcatctgcagcagccagtgcagctcgtatttccacagtgatgaaatggactcaggtgatgaacttcccttaagtgttcgcatatctcatgataaacaggacaagatacatagttgccttgagcatcttttcagccaggtggattcaattaccaatctcctaaaagggcaggctgttgtgagggcctttgaccaaaccaagtatctcactccaggccgaggattgcaagaatttcaacaggaaatggaaccaaagctgagttgtccaaaaaggctacggcttcatatcaagcaagatccttggaatcttcccagcagcgtccggactcttgctcagaacatcaggaaatttgttgaagaggtaaagtgtaggctactcctggctcttcttgaatattcagatagtgagacacagctccgtagagacatggttttctgccagactcttgtggccactgtctgtgccttctctgagcagctcatggcggccttgaaccagatgtttgacaacagcaaggaaaatgagatggaaacttgggaagccagcaggaggtggctggaccagatagcgaatgcaggtgttctttttcactttcagtcacttctgtcaccaaacttgacagatgaacaagccatgttagaagatacactggttgcactatttgatttggaaaaggtttccttttactttaaaccatcagaagaggaacctctggttgcaaatgttcctcttacatatcaagcagaaggaagtcggcaagctctgaaagtttacttctacattgatagttatcattttgaacaacttcctcaacggctgaaaaatggaggagggtttaaaattcatcctgttctttttgcacaagcactagagagcatggaaggatattattacagagacaatgtttctgtggaagaatttcaagctcagataaatgcagcctcactggaaaaggtcaaacagtacaaccagaagctcagggcattctacttggacaagtcaaattcaccaccaaactccacatccaaagctgcctatgtagataagctaatgaggcctctcaacgctttggatgaactttaccgactggtagcctcgtttatcagatccaagcgcacagctgcctgtgcaaacacagcttgcagtgcttctggggttggactgctgtcagtttcctcggagctgtgcaacaggctgggcgcctgccacatcatcatgtgcagcagcggtgtgcatcggtgcaccctgagcgtgacgctggagcaagccatcattctggccagaagccacggactgccacctcgttacatcatgcaggctacagatgtgatgcggaagcagggagcaagagttcagaacacagcgaagaatttgggagtcagagaccggactccacagtctgcaccaaggctgtacaagctgtgcgagccacctcccccagctggagaagaatgaaaagaactcccaagaaaccaggcaggcagaagctcctgaatgctggactagacaaactacatgctggctaaacattctccactgaagatacatcaatgcttttttttttttttttttctgtaaatctttcttcccattgcaaacaagtagtgatcagtttatactttgatatttatgctggaaatggatagaagttcaatcagacagttcagcttcacgaactgatgtctctctgtattgacattaagtattcacttttagagtaaaatccatccctgggacataaagaaaaaaatattagagatttaaaaattaaccaccatgcctcctctcccattcattaaaatggttttattatgcttgttttcatctttcccaagtggacacatgtaataatggagagttcctcttgaagaaggccattattgaagaaacctggcgacatcttgcaaatcatcatgagaaatgttaaggacaatatagactgtgtgctatacattttcagtcccccatttgcaagagagaaagtcattaatgtgtaaaaggtggaaaagcatgctttactctttctcctaagggcttatttcttattagaggagaagaaagctgactaaggcctccagcaggactcactttcttctagctgcctttgggcatcctttattcttgtggacagctctagcaaatcaatgctatttttggtgtctgcaatgggcatggcttccttgggccatgaatactgggtgctgtgccataatggccctggggatcagggaagtgccctggggatcagggaggggaaccaggatgaagaaggggactgtaagcctattttaaaactaaacctttaagttagatacctaaaactcttaattttatgaaggctctcatatgagaggtcagactcttcaaagaatacaccatcatgagaatttttctgttaagatatatgtataagatatgaaaataaggctttatttgtactttaaaaggaccattaggggacttgtaatttatggatgcacaaggtgtattctatccttattctaaagtatatgtaatgtttatcatttctacattgatgcaataacattgtttttagcatagtaaatacagtaatatttattttaaatccataattttcaaacaaaacactcatgattgtgataattatatgggtttacactaatttagtatgtgaaatgcttttcatatctaaattatgtgcaaactattattaattttttttttattttttgaaactgagtctcactctgttacccagactggagtgcggtggtgcaatcttggctcactgcaacctccacctcctgggttcaagccattctcttgcctcagcctcccaggagctgggactacaggtgtgcaccaccatgctcagctaatttttgtatttttagtagagacgtgttttcaccatgttggccaggctggtcttgaactcctgacatcaagtgatccacccacctcagcctcccaaagtgctaggattacaggcgtgagccgctgctcccggcccattattaaattttaatttatgaaatttgatcatggttttcaaactattattaaaacctttatcattaaccattatgtattgaataacaaaaataccatgttacatgtgtaggcaatatgtgtatactactaggtaaggtaataataattgttatttggcacagaagctctagagacttttgtgagaagtccatatacaatgaaaaacaaggaacctaacatcagagttttcaagaaaaagttgaacattttgaatttaataaagatatctttacaaaaataaccttcaaggatttaacatttgtaggactaataaaggaacacagctgattagctagcaagtcctttcatattgtcatgactgttttctcatcaccatcctggaagcagtaatcctcattagaggcatgcaagggtcattaaaatgatttcagttgtactttgccatatttcatggggcaaattatcagctatattgtggtatttataagctaacatattttatatttttaaggatctactttcttcataatagaatgtgcttcatattatttttagggttaaacataagtgtgtcgtctatcatgcttggtacttactaaatgctcaaaaattagtaatggtttatattaacatcagtcactctaacttctgatcgtaataaaaattgtagctaacacttattaagggattactacatgcccagtaatacctccaaatgctttgcctgtattctgttgttattgcttcacttaatcctcataataatgacgtgacatggtactctttttatcgcgcccatttttagagttgaggaaccaaagcaaagaataacccagtgacttgcacaaagtcacatgattgacaaggggtagaaccaaaatttgaacccaggaagtctgccttcttaatgcattatgctacttttccttatcaatataagaactattgtaatattacgatgatttgtaagtaaatttggagttatgcggcatgtgttgtcattaaattatacatcttgtattaaaaaacggtgaatggaaatatgtaaatgctttaattatatgaaaattatagtgtttcctggacattttacaactctggatgcacattttgaggtaactcaacagtgttgcaatctgaaaaactattttgtatcatgttcctcctcatcaaaaataacagttttagatagtacatctcatacaactttattataattccaacacagtggtaagagtaaaaaacatacctaatggatgaatgaataatgacaattttttcaatgccatatgtacctccatgtgacattgggcattaaatggccttgaggttttaggatgtgtttaccttaatgctacatgctcctctataaccagtgcaccttcaaatactgctaaaacctgctaacttcttccaggttctgagcatggacaactcccaccgccccccaacctaaaagggaaggtcatgcatagaaagtttggattttaacttagagcctgactcaaaaataattgtgaactaaaaattcatagtcaatactttttaagcattctattatctcctataattttttctaatattaattccaaatattacaaaatttaatgtgatattaaagtatgaaaaatttgagaagattagaattttacatgtatttccattcctatttaaagagagaaaatggggagataatttctgtgctagttttacttatattggatatataatattgaatttatagtataagctttattttatcagttcgcaaatctgaagtctcatactgttttctgtctctttaaaacacattcttctggtggcttgggttcattgtgcattcattggccactcttcttgcagcaaattttaaatcaatttaaaattaggtaaactttttatgatactataatatatatgacgttgaaatgacattggttctgagtctattaatttaaattttgggatcattacattcagaatgaaatgaaattgaccttgatactaactttgagagccaaaaaaatgaatgggtaaacaaagcctaagggtcatgttaattaatttaacaaaacacactattttcagtcctttgggcttgtacattttatagacaaaattagcatttattgatttggaagtgttcaattgagagtaaatgactctgtgttttgaaactaatacctttgcatttaaaatactgaagtattattttgttagttgaagtagatcttttcctgtgtagcatgatttaatgcagagcagttattcacttatacttctgaaaagccataatattgaaatttaaaatgaatagtcttactttaaggtcacttttactttacattttactttaaaggtcgtttttagactttatgcactagtggtattgaaactaacctttaatatttgactaaattgcttgtgaatttttggaaactatgtttaatttttaaagacattgttatgtgaattatcttactaaattatcacttaagaactctctcatagcagtaatttcattaacacatatatatactaaccaatttgctaaatgaattgtcggttgtcctgcttaagtactagggccaagctttgaaatgacttaaagtgatctgaattttgattgagaaaaataatctgtcttctatcgaatgtttgaacttttagtgatgagcctcagcaaagtttcaccctgcatgaagcagaacaggtgggggaaaattacaagaggggtctgtaccaaaaatggccccaggatattccattgaacaaatattgaccattatcttcctaggtgctacaactccatactagtcattacagttagtctttggtttcacaaaaatgttactgcttcaaaggcttggcattaacagtgatgtcagcattcatactgccaacagtctgctggtcatacatggaagactgttaaagtgtggtctgtgcatcattgagcaattgttatgtagacacaaggcctgcttcactcaggatagcttgctcctctcgctgagaagagatacctgaagtctactaagtctactaaatgagatatatatgtgtatgtatatgcctatatatattattatatttactagtgtttgtgataatgttataaaaattaataagattgttttgttttgtatgaatgtacgacaaatcgagttgttcaatgtattgaatgaatgtcttactgtaagcatcagagctgtccaaccatgtgtaaatgtacctggtcttttgatcactgacactactttgctgttcaatctggaatcaactgacctggctctgccattgagaaataactaatttagaacaaaattgttaaattttaaaattgcatttctactagaaatagctttggagagttaattttaggtgcgaataacaggataaatgctatctgatcaagcattcatccgaaaaatgtttttgagaattcactttgtgcaaggcacagctgttggggctggtatatgtgtggacatgtttgatttgaaaaccttcgtggtgtctctgtgtgttattgatcatctgtgtcttttgcttaaaatggcattatttgtaacacaaacctaatatcatatatacaaatatactgtatgtagccaagaacactaaattggtaagacgctttagaaaatatgcatttgaatttgaatatctaatgcctcaagcaaatttattagagtttcagatgaatatatatttttgtaactggcaagtaaatgagtagaacagagctttttgcctaaaaatatttttataagtactcatttacatagtattcattattttaaatgacaaaatatcaaattggttctataaatagtaattgttttgaatatatccatacttaacatcatatgaaatccaaaatttaatgataaatttcatctggatgtgttattataaaagtcatctttttttcctttgtaaaatatccatgtaacatagcttccattactccatattttatgtatggttaaaattatcaaagtgcattatgtattttatattgtttatttttgtctgcatgaaagattggaatagtaaccgtgtatgataaatgttaataataataaagtgaaatgtagtatgacc

SEQ ID NO: 22195 - DNA, 5400 bp, Homo sapiens
  source 1..5400: mol_type = unassigned DNA
gccagagcagcggggccgggcgcgcagggcctggccggagcccccactcccaggagtttcctctgcagagccccgcgccccccgcgccgggatttcagcccgatcccctcctctccctgcgcccagcctctccccagcatgtaaagtcttctgtctctcctcggagttggcggaggcggcaactttccattctcgccgccgggggccgggcagcagcgggcgcgcgggtcagcgctcagcacggcgggcagcgccgcgctgcgcaccgccgccgaccatgagcgaggacagccgcggagacagccgcgccgagagcgccaaggacctggagaagcagcttcgcctgcgcgtgtgcgtgctcagcgagctccagaagaccgagcgggactatgtgggcacgctggagttcctggtgtcggcattcttacacagaatgaaccagtgtgcagcatcaaaagttgacaaaaatgtgacagaagaaacagtgaagatgttgttctcaaacattgaagacatccttgcagtacataaagaattcttaaaagtcgtggaagaatgcttacaccccgaacctaatgctcaacaagaagtgggaacctgctttcttcactttaaagacaagtttcgtatctatgatgaatattgtagtaaccatgagaaggcacaaaaattacttcttgaactcaacaaaataagaacaatccggacatttcttttgaactgcatgctgcttggaggacggaagaacacagatgttcccttggaaggatatttagtaacaccaatacaaagaatatgcaagtaccctcttattttgaaggagttgctgaagcggactccacggaaacacagtgactatgcagcagtgatggaagccctccaagccatgaaagctgtctgttccaacataaacgaggccaagagacagatggagaagttagaagttttagaggaatggcagtctcacattgaaggctgggaggggtccaacatcactgacacctgcactgaaatgctaatgtgtggagtcttactgaaaatttcttctggaaatattcaagaacgggtgttttttcttttcgataatcttttggtgtactgcaaaagaaaacacagacggttgaagaacagcaaggcatctacagatggacatcggtacctttttcgtggccggatcaacacggaggtgatggaagtggagaatgtggatgatggcaccgctgatttccatagcagtggacacattgttgttaatggatggaagatacataacacagcaaaaaataaatggtttgtttgtatggcaaaaacacctgaagagaagcatgaatggtttgaagctattttgaaagaaagagaacggcggaaaggtttaaaattaggaatggagcaagatacctgggtcatgatctctgaacagggtgagaaactttataaaatgatgtgcagacaaggaaatctgatcaaagaccgaaagagaaaactgactacgttccctaaatgctttcttggaagcgaatttgtgtcatggctgttggaaattggagagattcacaggcctgaggaaggcgtgcacttgggacaagcattattagaaaatggaatcattcaccatgttactgataaacatcaattcaaaccagaacagatgttatatagatttcgctatgatgatggaacattttatccaagaaatgagatgcaggacgtgatttcaaagggtgtaagattatattgtcgtcttcatagcctttttactccagtgataagagataaagattaccatttaaggacctacaaatctgtggtcatggccaacaaactgatagactggttaattgcacagggagattgccgcaccagagaagaggcaatgatatttggcgttggactctgtgacaatggatttatgcaccatgtccttgaaaaaagcgaattcaaagatgaacccctacttttccgttttttttcggatgaggaaatggagggatcaaatatgaaacatcgacttatgaaacatgacttaaaagttgtggaaaatgttatagctaagtcattattgattaaatccaatgaaggcagctatggctttggattagaagacaaaaataaagttccaataataaagttggtagaaaagggatctaatgctgagatggctggcatggaagtcgggaaaaagatttttgctattaatggtgacctagtttttatgagacctttcaatgaagtggattgcttcctgaaatcgtgtttaaacagcagaaaacctctaagagttcttgtgagcacaaagccaagagagacagtgaaaattccagattcagctgatggacttggcttccagatccggggatttggcccttctgttgtgcatgctgtaggaagaggaactgtggctgcagcagctggtcttcaccctggacagtgcattatcaaggtgaatggaatcaatgtcagcaaagagacacatgccagtgtcattgcacacgttacagcctgcaggaagtacaggcggccaacgaagcaagattccatacaatgggtttataatagcattgagagtgctcaagaagaccttcaaaaatctcactccaagccccctggagatgaagcaggggatgcttttgactgtaaagtagaagaggttattgacaaattcaacactatggccatcattgatgggaagaaggagcatgtgagtctgacagtggacaatgtccacctggaatatggtgtcgtgtatgagtacgacagcacagctggcatcaagtgcaatgtggtggaaaagatgattgagcccaaaggtttcttcagcttaactgccaagattcttgaagccctggctaaaagtgatgagcattttgtacaaaactgtaccagcctaaattctctaaatgaagtgattcctactgaccttcagagtaaattcagtgccctttgcagtgaaagaattgaacacctatgtcagagaatatccagttataaaaaggtaagtgttctattgattttatacacaattattgttgaaatgtaccattttactgagatgataacattatataacattttagaacttgtaagaccacctaattctgaattcttcttttcttttctcccaactaagagaatgaaaactctcaatcagaaaaaagttactcacatgaagaaaactaatattcagttgcagttttctcgtgtactgaagaatagggcctggcctacttttaaacaggccaaatctaaaatctccccactgcacagcagtgatttctgccctaccaactgccatgtcaatgtgatggaagtttcttatcccaaaacatcaacctctttgggaagtgcatttggtgttcagtggaaactgagccctatggtgtacattcagcacaccatcacaaccatggcggccccttcaggtctgtctctgggacagcaggatggccatggtctcaggtatctgttagaacgtaagacatcagagggcataataccaacagacagtgacaatgagaagggagaaagaaacagcaaacgggtatgttttaatgtagcaggagatgaacaggaagattctggtcatgacaccatcagcaacagagactcttacagtttcagtgactgcaacagcaataggaattccatcgcctccttcaccagcatctgcagcagccagtgcagctcgtatttccacagtgatgaaatggactcagggagtgatgaacttcccttaagtgttcgcatatctcatgataaacaggacaagatacatagttgccttgagcatcttttcagccaggtggattcaattaccaatctcctaaaagggcaggctgttgtgagggcctttgaccaaaccaagtatctcactccaggccgaggattgcaagaatttcaacaggaaatggaaccaaagctgagttgtccaaaaaggctacggcttcatatcaagcaagatccttggaatcttcccagcagcgtccggactcttgctcagaacatcaggaaatttgttgaagaggtaaagtgtaggctactcctggctcttcttgaatattcagatagtgagacacagctccgtagagacatggttttctgccagactcttgtggccactgtctgtgccttctctgagcagctcatggcggccttgaaccagatgtttgacaacagcaaggaaaatgagatggaaacttgggaagccagcaggaggtggctggaccagatagcgaatgcaggtgttctttttcactttcagtcacttctgtcaccaaacttgacagatgaacaagccatgttagaagatacactggttgcactatttgatttggaaaaggtttccttttactttaaaccatcagaagaggaacctctggttgcaaatgttcctcttacatatcaagcagaaggaagtcggcaagctctgaaagtttacttctacattgatagttatcattttgaacaacttcctcaacggctgaaaaatggaggagggtttaaaattcatcctgttctttttgcacaagcactagagagcatggaaggatattattacagagacaatgtttctgtggaagaatttcaagctcagataaatgcagcctcactggaaaaggtcaaacagtacaaccagaagctcagggcattctacttggacaagtcaaattcaccaccaaactccacatccaaagctgcctatgtagataagctaatgaggcctctcaacgctttggatgaactttaccgactggtagcctcgtttatcagatccaagcgcacagctgcctgtgcaaacacagcttgcagtgcttctggggttggactgctgtcagtttcctcggagctgtgcaacaggctgggcgcctgccacatcatcatgtgcagcagcggtgtgcatcggtgcaccctgagcgtgacgctggagcaagccatcattctggccagaagccacggactgccacctcgttacatcatgcaggctacagatgtgatgcggaagcagggagcaagagttcagaacacagcgaagaatttgggagtcagagaccggactccacagtctgcaccaaggctgtacaagctgtgcgagccacctcccccagctggagaagaatgaaaagaactcccaagaaaccaggcaggcagaagctcctgaatgctggactagacaaactacatgctggctaaacattctccactgaagatacatcaatgcttttttttttttttttttctgtaaatctttcttcccattgcaaacaagtagtgatcagtttatactttgatatttatgctggaaatggatagaagttcaatcagacagttcagcttcacgaactgatgtctctctgtattgacattaagtattcacttttagagtaaaatccatccctgggacat

SEQ ID NO: 22196 - DNA, 3767 bp, Homo sapiens
  source 1..3767: mol_type = unassigned DNA
ggattttttgcttggctacccggagtgaagcggccgggttgggcgattaacaggccgtggttaggaaggacggagaaggggcgttcgctcctttgggacttttcatgcctcgtttttttttcagatgtggcttggtctgggcgcaaggtcccagcagccagcttaagcttactcttctgtgaaaggggaaagtatcccctgtggaaagcggttaaacttgtggagggggtgcgggacgtgagttcttccccatgccaggcgaatggtgtggccttgagctggtccaggagccggctcgacgtgtctgagggaggccccggagggggcggggaggtggcccacagaacgcgggttctgtaaagagacgttgggaagattcgattccgagaagaggaagaaccggattgaaagagagccaggccgctgagggggagggggctgctaagatggcgtcggcctcctccgggccgtcgtcttcggtcggtttttcatcctttgatcccgcggtcccttcctgtaccttgtcctcagcatctggaatcaagagacccatggcatctgaggtgccttatgcctctggcatgcccatcaagaaaataggccatagaagtgttgattcctcaggagagacaacatataaaaagacaacctcatcagccttgaaaggtgccatccagttaggcattacccacactgtggggagcctgagtaccaaaccagagcgtgatgtcctcatgcaagatttctacgtggttgagagtatcttctttcccagtgaagggagcaacctgacccctgctcatcactacaatgactttcgtttcaagacctatgcacctgttgccttccgctacttccgggagctatttggtatccggcccgatgattacttgtattccctctgcagtgagccgctgattgaactctgtagctctggagctagtggttccctattctatgtgtccagcgacgatgagttcattattaagacagtccaacataaagaggcggaatttctgcagaagctgcttccaggatactacatgaacctcaaccagaaccctcggactttgctgcctaaattctatggactgtactgtgtgcaggcaggtggcaagaacattcggattgtggtgatgaacaatcttttaccaagatcggtaaaaatgcatatcaaatatgacctcaaaggctcaacctacaaacggcgggcttcccagaaagagcgagagaagcctcttcccacatttaaagacctagacttcttacaagacatccctgatggtctttttttggatgctgacatgtacaacgctctctgtaagaccctgcagcgtgactgtttggtgctgcagagcttcaagataatggattacagcctcttgatgtcaatccataatatagatcatgcacaacgagagcccttaagcagtgaaacacagtactcagttgatactcgaagaccggccccccaaaaggctctgtattccacagccatggaatccatccagggagaggctcgacggggtggtaccatggagactgatgaccatatgggtggcatccctgcccggaatagtaaaggggaaaggcttctgctttatattggcatcattgacattctacagtcttacaggtttgttaagaagttggagcactcttggaaagccctggtacatgacggagacactgtctcagtgcatcgcccaggcttctacgctgaacggttccagcgcttcatgtgcaacacagtatttaagaagattcccttgaagccttctccttccaaaaagtttcggtctggctcatctttctctcggcgagcaggctccagtggcaactcctgcattacttaccagccatcggtctctggggaacacaaggcacaagtgacaacaaaggcagaagtggagccaggcgttcaccttggtcgtcctgatgttttacctcagactccacctttggaggaaatcagtgagggctcgcctattcctgaccccagtttctcacctctagttggagagactttgcaaatgctaactacaagtacaaccttggaaaagcttgaagttgcagagtcagagttcacccattaagcgcaaagcctcagaagacctggaacaagattctgccatctctgtgatcccaagatgtcagcccttgccccagcaatgctgaattttcttctacttggtcatcaaaaaaggagtgtaatagaagtgaggggagctgctcctccatcttcttcctgaagaagaaccttctctccttcctcttcctcatgaatgggccttagtgcctcagagagttgaggaccgcagcatcccctccactccagagttgggtggtatggattttcaactggccaaccctttgcctccactattgaatttttttcagacccccattcttcatgctggaaatgggattgctggacttggcagctttctttcccctcgtctttgactaggaaccggactcttaatttcctcaggacagactagctggcacattatccctaccttagttctttctctctgactcctggaagaatactcctgtaatctctgtaaaggtttttgggggataagggtgtttaaccacctcccagctttcttcttctttttttttttctgaaaaaaggaaaaagcacacagcacacaatttcaagccattttcagatcagaactccagaagtgttgacaagatgcctattcgtagagttccctcagaagagccatggtgtttatgaagagaagagtagtgattgctctgccagaagcagctcctctttaaactcctcctctcttgatgaatttcttaaggctgaaggaatgaagagagtgggacatggggtaatctttatcccttttgttaaaacaggaggcagccatgggctgggagatcatagcccttcctaggcagaatcctgttcactgccaggctatagtaattattactattttgcaatttgaaatatattctggttgtttttctaaatgtgaagacttaccaaatgaattttagatcattctccagaggagattttttttgctcttctcatcttttccaacagtgttctcctgtttgtggagctaaggtaaagaggggacacttctgtctgtttaacagacagtccatatctgtgaggccagcaaatattttcttaaactcatggggagacagcagattcttgccttggtgaggtcattgctgtgccatatgtcctacccccctgtcttcatgcagggaagttggaaatgggggctacatatgccctctcctccccgtctacaagagttgtggttttccatctgatccttccactcttgtcaggggaagaagggggcctggtatctcaggcagattgttgaattcctgttctatcccttctctatcccaccctgccttgataatatgttagcccataccccaaataactgtctatattagacacccccagccagtttctggctgcctgtctttgctgccatgttttttacaagaaggaaagaattcttgctatttttttttcataatttactatttatgatgtatttaagtgttttattaaggacagagttctgttaggggtgggagggaatatttgagggagggctgggtcttagggaaaggaatggggaagcaacatttttattaagtgttactatttgcctctactttgtattgttcagaaatggcaaatacaatataaaagtgatatatggttttaatgtaataaactttaatgagttatttagacctct

SEQ ID NO: 22197 - DNA, 2134 bp, Homo sapiens
  source 1..2134: mol_type = unassigned DNA
gtgaagcggccgggttgggcgattaacaggccgtggttaggaaggacggagaaggggcgttcgctcctttgggacttttcatgcctcgtttttttttcagatgtggcttggtctgggcgcaaggtcccagcagccagcttaagcttactcttctgtgaaaggggaaagtatcccctgtggaaagcggttaaacttgtggagggggtgcgggacgtgagttcttccccatgccaggcgaatggtgtggccttgagctggtccaggagccggctcgacgtgtctgagggaggccccggagggggcggggaggtggcccacagaacgcgggttctgtaaagagacgttgggaagattcgattccgagaagaggaagaaccggattgaaagagagccaggccgctgagggggagggggctgctaagatggcgtcggcctcctccgggccgtcgtcttcggtcggtttttcatcctttgatcccgcggtcccttcctgtaccttgtcctcagcagcatctggaatcaagagacccatggcatctgaggtcttggaagctagacaggattcttacatctcattggtgccttatgcctctggcatgcccatcaagaaaataggccatagaagtgttgattcctcaggagagacaacatataaaaagacaacctcatcagccttgaaaggtgccatccagttaggcattacccacactgtggggagcctgagtaccaaaccagagcgtgatgtcctcatgcaagatttctacgtggttgagagtatcttctttcccagtgaagggagcaacctgacccctgctcatcactacaatgactttcgtttcaagacctatgcacctgttgccttccgctacttccgggagctatttggtatccggcccgatgattacttgtattccctctgcagtgagccgctgattgaactctgtagctctggagctagtggttccctattctatgtgtccagcgacgatgagttcattattaagacagtccaacataaagaggcggaatttctgcagaagctgcttccaggatactacatgaacctcaaccagaaccctcggactttgctgcctaaattctatggactgtactgtgtgcaggcaggtggcaagaacattcggattgtggtgatgaacaatcttttaccaagatcggtaaaaatgcatatcaaatatgacctcaaaggctcaacctacaaacggcgggcttcccagaaagagcgagagaagcctcttcccacatttaaagacctagacttcttacaagacatccctgatggtctttttttggatgctgacatgtacaacgctctctgtaagaccctgcagcgtgactgtttggtgctgcagagcttcaagataatggattacagcctcttgatgtcaatccataatatagatcatgcacaacgagagcccttaagcagtgaaacacagtactcagttgatactcgaagaccggccccccaaaaggctctgtattccacagccatggaatccatccagggagaggctcgacggggtggtaccatggagactgatgaccatatgggtggcatccctgcccggaatagtaaaggggaaaggcttctgctttatattggcatcattgacattctacagtcttacaggtttgttaagaagttggagcactcttggaaagccctggtacatgacggagacactgtctcagtgcatcgcccaggcttctacgctgaacggttccagcgcttcatgtgcaacacagtatttaagaagattcccttgaagccttctccttccaaaaagtttcggtctggctcatctttctctcggcgagcaggctccagtggcaactcctgcattacttaccagccatcggtctctggggaacacaaggcacaagtgacaacaaaggcagaagtggagccaggcgttcaccttggtcgtcctgatgttttacctcagactccacctttggaggaaatcagtgagggctcgcctattcctgaccccagtttctcacctctagttggagagactttgcaaatgctaactacaagtacaaccttggaaaagcttgaagttgcagagtcagagttcacccattaagcgcaaagcctcagaagacctgg

SEQ ID NO: 22198 - DNA, 3613 bp, Homo sapiens
  source 1..3613: mol_type = unassigned DNA
attttttgcttggctacccggagtgaagcggccgggttgggcgattaacaggccgtggttaggaaggacggagaaggggcgttcgctcctttgggacttttcatgcctcgtttttttttcagatgtggcttggtctgggcgcaaggtcccagcagccagcttaagcttactcttctgtgaaaggggaaagtatcccctgtggaaagcggttaaacttgtggagggggtgcgggacgtgagttcttccccatgccaggcgaatggtgtggccttgagctggtccaggagccggctcgacgtgtctgagggaggccccggagggggcggggaggtggcccacagaacgcgggttctgtaaagagacgttgggaagattcgattccgagaagaggaagaaccggattgaaagagagccaggccgctgagggggagggggctgctaagatggcgtcggcctcctccgggccgtcgtcttcggtcggtttttcatcctttgatcccgcggtcccttcctgtaccttgtcctcagcatctggaatcaagagacccatggcatctgaggtgccttatgcctctggcatgcccatcaagaaaataggccatagaagtgttgattcctcaggagagacaacatataaaaagacaacctcatcagccttgaaaggtgccatccagttaggcattacccacactgtggggagcctgagtaccaaaccagagcgtgatgtcctcatgcaagatttctacgtggttgagagtatcttctttcccagtgaagggagcaacctgacccctgctcatcactacaatgactttcgtttcaagacctatgcacctgttgccttccgctacttccgggagctatttggtatccggcccgatgattacttgtattccctctgcagtgagccgctgattgaactctgtagctctggagctagtggttccctattctatgtgtccagcgacgatgagttcattattaagacagtccaacataaagaggcggaatttctgcagaagctgcttccaggatactacatgaacctcaaccagaaccctcggactttgctgcctaaattctatggactgtactgtgtgcaggcaggtggcaagaacattcggattgtggtgatgaacaatcttttaccaagatcggtaaaaatgcatatcaaatatgacctcaaaggctcaacctacaaacggcgggcttcccagaaagagcgagagaagcctcttcccacatttaaagacctagacttcttacaagacatccctgatggtctttttttggatgctgacatgtacaacgctctctgtaagaccctgcagcgtgactgtttggtgctgcagagcttcaagataatggattacagcctcttgatgtcaatccataatatagatcatgcacaacgagagcccttaagcagtgaaacacagtactcagttgatactcgaagaccggccccccaaaaggctctgtattccacagccatggaatccatccagggagaggctcgacggggtggtaccatggagactgatgaccatatgggtggcatccctgcccggaatagtaaaggggaaaggcttctgctttatattggcatcattgacattctacagtcttacaggtttgttaagaagttggagcactcttggaaagccctggtacatgacggagacactgtctcagtgcatcgcccaggcttctacgctgaacggttccagcgcttcatgtgcaacacagtatttaagaagattccctgcgttcaccttggtcgtcctgatgttttacctcagactccacctttggaggaaatcagtgagggctcgcctattcctgaccccagtttctcacctctagttggagagactttgcaaatgctaactacaagtacaaccttggaaaagcttgaagttgcagagtcagagttcacccattaagcgcaaagcctcagaagacctggaacaagattctgccatctctgtgatcccaagatgtcagcccttgccccagcaatgctgaattttcttctacttggtcatcaaaaaaggagtgtaatagaagtgaggggagctgctcctccatcttcttcctgaagaagaaccttctctccttcctcttcctcatgaatgggccttagtgcctcagagagttgaggaccgcagcatcccctccactccagagttgggtggtatggattttcaactggccaaccctttgcctccactattgaatttttttcagacccccattcttcatgctggaaatgggattgctggacttggcagctttctttcccctcgtctttgactaggaaccggactcttaatttcctcaggacagactagctggcacattatccctaccttagttctttctctctgactcctggaagaatactcctgtaatctctgtaaaggtttttgggggataagggtgtttaaccacctcccagctttcttcttctttttttttttctgaaaaaaggaaaaagcacacagcacacaatttcaagccattttcagatcagaactccagaagtgttgacaagatgcctattcgtagagttccctcagaagagccatggtgtttatgaagagaagagtagtgattgctctgccagaagcagctcctctttaaactcctcctctcttgatgaatttcttaaggctgaaggaatgaagagagtgggacatggggtaatctttatcccttttgttaaaacaggaggcagccatgggctgggagatcatagcccttcctaggcagaatcctgttcactgccaggctatagtaattattactattttgcaatttgaaatatattctggttgtttttctaaatgtgaagacttaccaaatgaattttagatcattctccagaggagattttttttgctcttctcatcttttccaacagtgttctcctgtttgtggagctaaggtaaagaggggacacttctgtctgtttaacagacagtccatatctgtgaggccagcaaatattttcttaaactcatggggagacagcagattcttgccttggtgaggtcattgctgtgccatatgtcctacccccctgtcttcatgcagggaagttggaaatgggggctacatatgccctctcctccccgtctacaagagttgtggttttccatctgatccttccactcttgtcaggggaagaagggggcctggtatctcaggcagattgttgaattcctgttctatcccttctctatcccaccctgccttgataatatgttagcccataccccaaataactgtctatattagacacccccagccagtttctggctgcctgtctttgctgccatgttttttacaagaaggaaagaattcttgctatttttttttcataatttactatttatgatgtatttaagtgttttattaaggacagagttctgttaggggtgggagggaatatttgagggagggctgggtcttagggaaaggaatggggaagcaacatttttattaagtgttactatttgcctctactttgtattgttcagaaatggcaaatacaatataaaagtgatatatggttttaatgtaataaactttaatgagttatttaga

SEQ ID NO: 22199 - DNA, 3737 bp, Homo sapiens
  source 1..3737: mol_type = unassigned DNA
gattttttgcttggctacccggagtgaagcggccgggttgggcgattaacaggccgtggttaggaaggacggagaaggggcgttcgctcctttgggacttttcatgcctcgtttttttttcagatgtggcttggtctgggcgcaaggtcccagcagccagcttaagcttactcttctgtgaaaggggaaagtatcccctgtggaaagcggttaaacttgtggagggggtgcgggacgtgagttcttccccatgccaggcgaatggtgtggccttgagctggtccaggagccggctcgacgtgtctgagggaggccccggagggggcggggaggtggcccacagaacgcgggttctgtaaagagacgttgggaagattcgattccgagaagaggaagaaccggattgaaagagagccaggccgctgagggggagggggctgctaagatggcgtcggcctcctccgggccgtcgtcttcggtcggtttttcatcctttgatcccgcggtcccttcctgtaccttgtcctcagcagcatctggaatcaagagacccatggcatctgaggtgccttatgcctctggcatgcccatcaagaaaataggccatagaagtgttgattcctcaggagagacaacatataaaaagacaacctcatcagccttgaaaggtgccatccagttaggcattacccacactgtggggagcctgagtaccaaaccagagcgtgatgtcctcatgcaagatttctacgtggttgagagtatcttctttcccagtgaagggagcaacctgacccctgctcatcactacaatgactttcgtttcaagacctatgcacctgttgccttccgctacttccgggagctatttggtatccggcccgatgattacttgtattccctctgcagtgagccgctgattgaactctgtagctctggagctagtggttccctattctatgtgtccagcgacgatgagttcattattaagacagtccaacataaagaggcggaatttctgcagaagctgcttccaggatactacatgaacctcaaccagaaccctcggactttgctgcctaaattctatggactgtactgtgtgcaggcaggtggcaagaacattcggattgtggtgatgaacaatcttttaccaagatcggtaaaaatgcatatcaaatatgacctcaaaggctcaacctacaaacggcgggcttcccagaaagagcgagagaagcctcttcccacatttaaagacctagacttcttacaagacatccctgatggtctttttttggatgctgacatgtacaacgctctctgtaagaccctgcagcgtgactgtttggtgctgcagagcttcaagataatggattacagcctcttgatgtcaatccataatatagatcatgcacaacgagagcccttaagcagtgaaacacagtactcagttgatactcgaagaccggccccccaaaaggctctgtattccacagccatggaatccatccagggagaggctcgacggggtggtaccatggagactgatgaccatatgggtggcatccctgcccggaatagtaaaggggaaaggcttctgctttatattggcatcattgacattctacagtcttacaggtttgttaagaagttggagcactcttggaaagccctggtacatgacggagacactgtctcagtgcatcgcccaggcttctacgctgaacggttccagcgcttcatgtgcaacacagtatttaagaagattcccttgaagccttctccttccaaaaagtttcggtctggctcatctttctctcggcgagcaggctccagtggcaactcctgcattacttaccagccatcggtctctggggaacacaaggcacaagtgacaacaaaggcagaagtggagccaggcgttcaccttggtcgtcctgatgttttacctcagactccacctttggaggaaatcagtgagggctcgcctattcctgaccccagtttctcacctctagttggagagactttgcaaatgctaactacaagtacaaccttggaaaagcttgaagttgcagagtcagagttcacccattaagcgcaaagcctcagaagacctggaacaagattctgccatctctgtgatcccaagatgtcagcccttgccccagcaatgctgaattttcttctacttggtcatcaaaaaaggagtgtaatagaagtgaggggagctgctcctccatcttcttcctgaagaagaaccttctctccttcctcttcctcatgaatgggccttagtgcctcagagagttgaggaccgcagcatcccctccactccagagttgggtggtatggattttcaactggccaaccctttgcctccactattgaatttttttcagacccccattcttcatgctggaaatgggattgctggacttggcagctttctttcccctcgtctttgactaggaaccggactcttaatttcctcaggacagactagctggcacattatccctaccttagttctttctctctgactcctggaagaatactcctgtaatctctgtaaaggtttttgggggataagggtgtttaaccacctcccagctttcttcttctttttttttttctgaaaaaaggaaaaagcacacagcacacaatttcaagccattttcagatcagaactccagaagtgttgacaagatgcctattcgtagagttccctcagaagagccatggtgtttatgaagagaagagtagtgattgctctgccagaagcagctcctctttaaactcctcctctcttgatgaatttcttaaggctgaaggaatgaagagagtgggacatggggtaatctttatcccttttgttaaaacaggaggcagccatgggctgggagatcatagcccttcctaggcagaatcctgttcactgccaggctatagtaattattactattttgcaatttgaaatatattctggttgtttttctaaatgtgaagacttaccaaatgaattttagatcattctccagaggagattttttttgctcttctcatcttttccaacagtgttctcctgtttgtggagctaaggtaaagaggggacacttctgtctgtttaacagacagtccatatctgtgaggccagcaaatattttcttaaactcatggggagacagcagattcttgccttggtgaggtcattgctgtgccatatgtcctacccccctgtcttcatgcagggaagttggaaatgggggctacatatgccctctcctccccgtctacaagagttgtggttttccatctgatccttccactcttgtcaggggaagaagggggcctggtatctcaggcagattgttgaattcctgttctatcccttctctatcccaccctgccttgataatatgttagcccataccccaaataactgtctatattagacacccccagccagtttctggctgcctgtctttgctgccatgttttttacaagaaggaaagaattcttgctatttttttttcataatttactatttatgatgtatttaagtgttttattaaggacagagttctgttaggggtgggagggaatatttgagggagggctgggtcttagggaaaggaatggggaagcaacatttttattaagtgttactatttgcctctactttgtattgttcagaaatggcaaatacaatataaaagtgatatatggttttaat

SEQ ID NO: 22200 - DNA, 1252 bp, Homo sapiens
  source 1..1252: mol_type = unassigned DNA
ggatgctgacatgtacaacgctctctgtaagaccctgcagcgtgactgtttggtgctgcagagcttcaagataatggattacagcctcttgatgtcaatccataatatagatcatgcacaacgagagcccttaagcagtgaaacacagtactcagttgatactcgaagaccggccccccaaaaggctctgtattccacagccatggaatccatccagggagaggctcgacggggtggtaccatggagactgatgaccatatgggtggcatccctgcccggaatagtaaaggggaaaggcttctgctttatattggcatcattgacattctacagtcttacaggtttgttaagaagttggagcactcttggaaagccctggtacatgacggagacactgtctcagtgcatcgcccaggcttctacgctgaacggttccagcgcttcatgtgcaacacagtatttaagaagattcccttacaaccttggaaaagcttgaagttgcagagtcagagttcacccattaagcgcaaagcctcagaagacctggaacaagattctgccatctctgtgatcccaagatgtcagcccttgccccagcaatgctgaattttcttctacttggtcatcaaaaaaggagtgtaatagaagtgaggggagctgctcctccatcttcttcctgaagaagaaccttctctccttcctcttcctcatgaatgggccttagtgcctcagagagttgaggaccgcagcatcccctccactccagagttgggtggtatggattttcaactggccaaccctttgcctccactattgaatttttttcagacccccattcttcatgctggaaatgggattgctggacttggcagctttctttcccctcgtctttgactaggaaccggactcttaatttcctcaggacagactagctggcacattatccctaccttagttctttctctctgactcctggaagaatactcctgtaatctctgtaaaggtttttgggggataagggtgtttaaccacctcccagctttcttcttctttttttttttctgaaaaaaggaaaaagcacacagcacacaatttcaagccattttcagatcagaactccagaagtgttgacaagatgcctattcgtagagttccctcagaagagccatggtgtttatgaagagaagagtagtgattgctctgccagaagcagctcctctttaaactcctcctctcttgatgaatttctta

SEQ ID NO: 22201 - DNA, 353 bp, Homo sapiens
  source 1..353: mol_type = unassigned DNA
aagagagaatctcttatatgtgctgatacaggtttcaactttctgtgctgtggggtcagtggtaagagagcagcatctggaatcaagagacccatggcatctgaggtcttggaagctagacaggattcttacatctcattggtgccttatgcctctggcatgcccatcaagaaaataggccatagaagtgttgattcctcaggagagacaacatataaaaagacaacctcatcagccttgaaaggtgccatccagttaggcattacccacactgtggggagcctgagtaccaaaccagagcgtgatgtcctcatgcaagatttctacgtggttgagagtatcttctttcccag

SEQ ID NO: 22202 - DNA, 2297 bp, Homo sapiens
  source 1..2297: mol_type = unassigned DNA
attttttgcttggctacccggagtgaagcggccgggttgggcgattaacaggccgtggttaggaaggacggagaaggggcgttcgctcctttgggacttttcatgcctcgtttttttttcagatgtggcttggtctgggcgcaaggtcccagcagccagcttaagcttactcttctgtgaaaggggaaagtatcccctgtggaaagcggttaaacttgtggagggggtgcgggacgtgagttcttccccatgccaggcgaatggtgtggccttgagctggtccaggagccggctcgacgtgtctgagggaggccccggagggggcggggaggtggcccacagaacgcgggttctgtaaagagacgttgggaagattcgattccgagaagaggaagaaccggattgaaagagagccaggccgctgagggggagggggctgctaagatggcgtcggcctcctccgggccgtcgtcttcggtcggtttttcatcctttgatcccgcggtcccttcctgtaccttgtcctcagcagcatctggaatcaagagacccatggcatctgaggtgccttatgcctctggcatgcccatcaagaaaataggccatagaagtgttgattcctcaggagagacaacatataaaaagacaacctcatcagccttgaaaggtgccatccagttaggcattacccacactgtggggagcctgagtaccaaaccagagcgtgatgtcctcatgcaagatttctacgtggttgagagtatcttctttcccagtgaagggagcaacctgacccctgctcatcactacaatgactttcgtttcaagacctatgcacctgttgccttccgctacttccgggagctatttggtatccggcccgatgattacttgtattccctctgcagtgagccgctgattgaactctgtagctctggagctagtggttccctattctatgtgtccagcgacgatgagttcattattaagacagtccaacataaagaggcggaatttctgcagaagctgcttccaggatactacatgaacctcaaccagaaccctcggactttgctgcctaaattctatggactgtactgtgtgcaggcaggtggcaagaacattcggattgtggtgatgaacaatcttttaccaagatcggtaaaaatgcatatcaaatatgacctcaaaggctcaacctacaaacggcgggcttcccagaaagagcgagagaagcctcttcccacatttaaagacctagacttcttacaagacatccctgatggtctttttttggatgctgacatgtacaacgctctctgtaagaccctgcagcgtgactgtttggtgctgcagagcttcaagataatggattacagcctcttgatgtcaatccataatatagatcatgcacaacgagagcccttaagcagtgaaacacagtactcagttgatactcgaagaccggccccccaaaaggctctgtattccacagccatggaatccatccagggagaggctcgacggggtggtaccatggagactgatgaccagtttgttaagaagttggagcactcttggaaagccctggtacatgacggagacactgtctcagtgcatcgcccaggcttctacgctgaacggttccagcgcttcatgtgcaacacagtatttaagaagattcccttgaagccttctccttccaaaaagtttcggtctggctcatctttctctcggcgagcaggctccagtggcaactcctgcattacttaccagccatcggtctctggggaacacaaggcacaagtgacaacaaaggcagaagtggagccaggcgttcaccttggtcgtcctgatgttttacctcagactccacctttggaggaaatcagtgagggctcgcctattcctgaccccagtttctcacctctagttggagagactttgcaaatgctaactacaagtacaaccttggaaaagcttgaagttgcagagtcagagttcacccattaagcgcaaagcctcagaagacctggaacaagattctgccatctctgtgatcccaagatgtcagcccttgccccagcaatgctgaattttcttctacttggtcatcaaaaaaggagtgtaatagaagtgaggggagctgctcctccatcttcttcctgaagaagaaccttctctccttcctcttcctcatgaatgggccttagtgcctcagagagttgaggaccgcagcatcccctccactccagagttgggtggtatggattttcaactggccaaccctttgcctc

SEQ ID NO: 22203 - DNA, 2654 bp, Homo sapiens
  source 1..2654: mol_type = unassigned DNA
aacttgcagactgtggcgcaactggtcttggtagcggaggcacccgaatgctgcccgggtgagatgaggaagccaaggcccagcagagctgagatgtgactgcagagccgtccaaccccagtcctgtgacctttctctggtgcctgatacctctcagcatttgagggccttttctcttcctgcttcatctctaaaggtccttctaggagagaggtgaaagaaacctggcaaagaaaacggtctcgacaatgagtaggccacccatcactactaactacagatgacttgccatttcatttacaaagatgtcttctgctgctgaaaatggagaggcagcacctggaaaacaaaatgaagaaaaaacctataaaaagactgcatcatctgctattaaaggtgctattcagctgggaataggatacacagtgggtaatctcacttccaagccagaacgagatgttcttatgcaagacttttatgtggtggaaagtgtgttcctacccagcgaagggagcaatctgaccccagcacatcactacccagactttagatttaagacatacgctccattagcattccgatatttcagagaactttttggtatcaagcctgatgattacttgtattccatctgcagtgaacctctaatagaactgtctaaccctggagccagtggatccttgttttttgtgaccagtgatgatgaatttatcatcaaaacagttcagcacaaagaagctgagtttcttcagaagctactgccaggctattacatgaatttaaaccagaatccaaggactcttttgccaaaattttacggactgtattgtatgcaatcaggaggcattaatatcaggattgtggtgatgaacaacgttttgccacgctccatgagaatgcactttacatatgacttgaaaggctcaacgtataagcgaagagcatcccgtaaagagagagagaaatccaaccccacatttaaggacttagatttcctgcaagacatgcacgaagggttgtattttgatacggaaacatacaacgcgcttatgaaaacacttcagagagactgccgggtgctagaaagcttcaagatcatggattatagccttctgttgggaattcatttcctggaccattccctcaaagagaaagaggaggagaccccacaaaatgtgcctgatgctaagcggactgggatgcagaaggttctctactcaacagccatggaatctatccagggtccagggaaatctggagatgggataatcacagagaacccagacacaatgggaggcattccagctaaaagccataggggagaaaaactacttttatttatgggcattattgacattctgcaatcatataggttaatgaagaagttagaacattcctggaaagctcttgtttatgatggggacactgtttctgttcatagaccaagcttttatgcagacagatttcttaagttcatgaattccagagttttcaagaaaattcaagctttgaaggcttcaccgtctaagaaacggtgcaattcaatcgccgccctaaaggccacttcacaggagattgtgtcctcaattagccaggaatggaaggatgagaagcgggatttgctgactgaaggacaaagttttagcagccttgatgaagaagccctgggatcccgacacaggccagacctggtccctagcactccatcactgtttgaagctgcttccttggcaaccacaatttcatcttcttccttatacgtcaatgagcactatccacacgacaggcctacactctattcaaacagcaaagggttaccttccagttcaacatttaccttggaagaggggaccatctacttgaccgctgagcccaacactctggaagtgcaggatgacaatgcttctgtgcttgacgtctatttataagtgaaaatggtgatcacctaagcacatggatgagacgtgagcacagttatggcagagaagtttctccgcaccagaattatccacagcaacttggctgagccccactacacacagagaaatcatcaacctgacttaagagttttcaagatgtcaacttcaggctgatcagcagatgggatgtgaaaaatactaccctattctatcatttgctgttgcttgctgaactgtgaagaactgcatgaactatatttaagctgctttctgtaccattgccaatcacctttttggagttggaagtgctattttcctatggacttttgcattatttcattgtgcatgcatccagtgattatacataagcaacatatgtaatctgcttatatatttttaaaaatccatccacacacatggtaaattaagtataaattcttttgcaaaattatagttcatgtcattgaaagtttaaattggtttcatttaaagatcaatatactaggtctgccttcactttatagaaaactagcttctataaagattttttcactgtttactagtgaaatgagaaaagcaaagctatttataaaaggccttatgtcgtgtacatacattgtctttgaaatatttgtgatctagtttattgcttgtaaaagagaaattatataatttatttagtaaatactactgtaaactatagttttgtgagagaaataaaatattttgttctca

SEQ ID NO: 22204 - DNA, 612 bp, Homo sapiens
  source 1..612: mol_type = unassigned DNA
gctgaacccaagagactgatgtattgcccagactcctgcacgctgtctgccagccacagatgaggaagccaaggcccagcagagctgagatgtgactgcagagccgtccaaccccagtcctgtgacctttctctggtgcctgatacctctcagcatttgagggccttttctcttcctgcttcatctctaaaggtccttctaggagagaggtgaaagaaacctggcaaagaaaacggtctcgacaatgagtaggccacccatcactactaactacagatgacttgccatttcatttacaaagatgtcttctgctgctgaaaatggagaggcagcacctggaaaacaaaatgaagaaaaaacctataaaaagactgcatcatctgctattaaaggtgctattcagctgggaataggatacacagtgggtaatctcacttccaagccagaacgagatgttcttatgcaagacttttatgtggtggaaagtgtgttcctacccagcgaagggagcaatctgaccccagcacatcactacccagactttagatttaagacatacgctccattagcattccgatatttcagagaactttttggtatcaagcctgatga

SEQ ID NO: 22205 - DNA, 2654 bp, Homo sapiens
  source 1..2654: mol_type = unassigned DNA
aacttgcagactgtggcgcaactggtcttggtagcggaggcacccgaatgctgcccgggtgaggtaaggaagccaaggcccagcagagctgagatgtgactgcagagccgtccaaccccagtcctgtgacctttctctggtgcctgatacctctcagcatttgagggccttttctcttcctgcttcatctctaaaggtccttctaggagagaggtgaaagaaacctggcaaagaaaacggtctcgacaatgagtaggccacccatcactactaactacagatgacttgccatttcatttacaaagatgtcttctgctgctgaaaatggagaggcagcacctggaaaacaaaatgaagaaaaaacctataaaaagactgcatcatctgctattaaaggtgctattcagctgggaataggatacacagtgggtaatctcacttccaagccagaacgagatgttcttatgcaagacttttatgtggtggaaagtgtgttcctacccagcgaagggagcaatctgaccccagcacatcactacccagactttagatttaagacatacgctccattagcattccgatatttcagagaactttttggtatcaagcctgatgattacttgtattccatctgcagtgaacctctaatagaactgtctaaccctggagccagtggatccttgttttttgtgaccagtgatgatgaatttatcatcaaaacagttcagcacaaagaagctgagtttcttcagaagctactgccaggctattacatgaatttaaaccagaatccaaggactcttttgccaaaattttacggactgtattgtatgcaatcaggaggcattaatatcaggattgtggtgatgaacaacgttttgccacgctccatgagaatgcactttacatatgacttgaaaggctcaacgtataagcgaagagcatcccgtaaagagagagagaaatccaaccccacatttaaggacttagatttcctgcaagacatgcacgaagggttgtattttgatacggaaacatacaacgcgcttatgaaaacacttcagagagactgccgggtgctagaaagcttcaagatcatggattatagccttctgttgggaattcatttcctggaccattccctcaaagagaaagaggaggagaccccacaaaatgtgcctgatgctaagcggactgggatgcagaaggttctctactcaacagccatggaatctatccagggtccagggaaatctggagatgggataatcacagagaacccagacacaatgggaggcattccagctaaaagccataggggagaaaaactacttttatttatgggcattattgacattctgcaatcatataggttaatgaagaagttagaacattcctggaaagctcttgtttatgatggggacactgtttctgttcatagaccaagcttttatgcagacagatttcttaagttcatgaattccagagttttcaagaaaattcaagctttgaaggcttcaccgtctaagaaacggtgcaattcaatcgccgccctaaaggccacttcacaggagattgtgtcctcaattagccaggaatggaaggatgagaagcgggatttgctgactgaaggacaaagttttagcagccttgatgaagaagccctgggatcccgacacaggccagacctggtccctagcactccatcactgtttgaagctgcttccttggcaaccacaatttcatcttcttccttatacgtcaatgagcactatccacacgacaggcctacactctattcaaacagcaaagggttaccttccagttcaacatttaccttggaagaggggaccatctacttgaccgctgagcccaacactctggaagtgcaggatgacaatgcttctgtgcttgacgtctatttataagtgaaaatggtgatcacctaagcacatggatgagacgtgagcacagttatggcagagaagtttctccgcaccagaattatccacagcaacttggctgagccccactacacacagagaaatcatcaacctgacttaagagttttcaagatgtcaacttcaggctgatcagcagatgggatgtgaaaaatactaccctattctatcatttgctgttgcttgctgaactgtgaagaactgcatgaactatatttaagctgctttctgtaccattgccaatcacctttttggagttggaagtgctattttcctatggacttttgcattatttcattgtgcatgcatccagtgattatacataagcaacatatgtaatctgcttatatatttttaaaaatccatccacacacatggtaaattaagtataaattcttttgcaaaattatagttcatgtcattgaaagtttaaattggtttcatttaaagatcaatatactaggtctgccttcactttatagaaaactagcttctataaagattttttcactgtttactagtgaaatgagaaaagcaaagctatttataaaaggccttatgtcgtgtacatacattgtctttgaaatatttgtgatctagtttattgcttgtaaaagagaaattatataatttatttagtaaatactactgtaaactatagttttgtgagagaaataaaatattttgttctca

SEQ ID NO: 22206 - DNA, 1811 bp, Homo sapiens
  source 1..1811: mol_type = unassigned DNA
aacttgcagactgtggcgcaactggtcttggtagcggaggcacccgaatgctgcccgggtgagatgaggaagccaaggcccagcagagctgagatgtgactgcagagccgtccaaccccagtcctgtgacctttctctggtgcctgatacctctcagcatttgagggccttttctcttcctgcttcatctctaaaggtccttctaggagagaggtgaaagaaacctggcaaagaaaacggtctcgacaatgagtaggccacccatcactactaactacagatgacttgccatttcatttacaaagatgtcttctgctgctgaaaatggagaggcagcacctggaaaacaaaatgaagaaaaaacctataaaaagactgcatcatctgctattaaaggtgctattcagctgggaataggatacacagtgggtaatctcacttccaagccagaacgagatgttcttatgcaagacttttatgtggtggaaagtgtgttcctacccagcgaagggagcaatctgaccccagcacatcactacccagactttagatttaagacatacgctccattagcattccgatatttcagagaactttttggtatcaagcctgatgattacttgtattccatctgcagtgaacctctaatagaactgtctaaccctggagccagtggatccttgttttttgtgaccagtgatgatgaatttatcatcaaaacagttcagcacaaagaagctgagtttcttcagaagctactgccaggctattacatgaatttaaaccagaatccaaggactcttttgccaaaattttacggactgtattgtatgcaatcaggaggcattaatatcaggattgtggtgatgaacaacgttttgccacgctccatgagaatgcactttacatatgacttgaaaggctcaacgtataagcgaagagcatcccgtaaagagagagagaaatccaaccccacatttaaggacttagatttcctgcaagacatgcacgaagggttgtattttgatacggaaacatacaacgcgcttatgaaaacacttcagagagactgccgggtgctagaaagcttcaagatcatggattatagccttctgttgggaattcatttcctggaccattccctcaaagagaaagaggaggagaccccacaaaatgtgcctgatgctaagcggactgggatgcagaaggttctctactcaacagccatggaatctatccagggtccagggaaatctggagatgggataatcacagagaacccagacacaatgggaggcattccagctaaaagccataggggagaaaaactacttttatttatgggcattattgacattctgcaatcatataggttaatgaagaagttagaacattcctggaaagctcttgtttatgatggggacactgtttctgttcatagaccaagcttttatgcagacagatttcttaagttcatgaattccagagttttcaagaaaattcaagctttgaaggcttcaccgtctaagaaacggtgcaattcaatcgccgccctaaaggccacttcacaggagattgtgtcctcaattagccaggaatggaaggatgagaagcgggatttgctgactgaaggacaaagttttagcagccttgatgaagaagccctgggatcccgacacaggccagacctggtccctagcactccatcactgtttgaagctgcttccttggcaaccacaatttcatcttcttccttatacgtcaatgagcactatccacacgacaggcctacactctattcaaacagtaaa

SEQ ID NO: 22207 - DNA, 791 bp, Homo sapiens
  source 1..791: mol_type = unassigned DNA
cgaaagcccaccaatccattgtggaatgacctctacaaatagttttgcttctgcacaaccagatgaggaagccaaggcccagcagagctgagatgtgactgcagagccgtccaaccccagtcctgtgacctttctctggtgcctgatacctctcagcatttgagggccttttctcttcctgcttcatctctaaaggtccttctaggagagaggtgaaagaaacctggcaaagaaaacggtctcgacaatgagtaggccacccatcactactaactacagatgacttgccatttcatttacaaagatgtcttctgctgctgaaaatggagaggcagcacctggaaaacaaaatgaagaaaaaacctataaaaagactgcatcatctgctattaaaggtgctattcagctgggaataggatacacagtgggtaatctcacttccaagccagaacgagatgttcttatgcaagacttttatgtggtggaaagtgtgttcctacccagcgaagggagcaatctgaccccagcacatcactacccagactttagatttaagacatacgctccattagcattccgatatttcagagaactttttggtatcaagcctgatgattacttgtattccatctgcagtgaacctctaatagaactgtctaaccctggagccagtggatccttgttttttgtgaccagtgatgatgaatttatcatcaaaacagttcagcacaaagaagctgagtttcttcagaagctactgccaggctattacatgaatttaaaccagaatc

SEQ ID NO: 22208 - DNA, 813 bp, Homo sapiens
  source 1..813: mol_type = unassigned DNA
agtgcattccaagttctaaacagctgagttttggatctcagctcctttgagagttgtggaccagtcagacacaaaattatctttaaatatacagatagggatgaggaagccaaggcccagcagagctgagatgtgactgcagagccgtccaaccccagtcctgtgacctttctctggtgcctgatacctctcagcatttgagggccttttctcttcctgcttcatctctaaaggtccttctaggagagaggtgaaagaaacctggcaaagaaaacggtctcgacaatgagtaggccacccatcactactaactacagatgacttgccatttcatttacaaagatgtcttctgctgctgaaaatggagaggcagcacctggaaaacaaaatgaagaaaaaacctataaaaagactgcatcatctgctattaaaggtgctattcagctgggaataggatacacagtgggtaatctcacttccaagccagaacgagatgttcttatgcaagacttttatgtggtggaaagtgtgttcctacccagcgaagggagcaatctgaccccagcacatcactacccagactttagatttaagacatacgctccattagcattccgatatttcagagaactttttggtatcaagcctgatgattacttgtattccatctgcagtgaacctctaatagaactgtctaaccctggagccagtggatccttgttttttgtgaccagtgatgatgaatttatcatcaaaacagttcagcacaaagaagctgagtttcttcagaagctactgccaggctattacatg

SEQ ID NO: 22209 - DNA, 2019 bp, Homo sapiens
  source 1..2019: mol_type = unassigned DNA
actgctctcccttcgctgtggggaagcgacaacgtcccgataacttgcagactgtggcgcaactggtcttggtagcggaggcacccgaatgctgcccgggtgagaaacctggcaaagaaaacggtctcgacaatgagtaggccacccatcactactaactacagatgacttgccatttcatttacaaagatgtcttctgctgctgaaaatggagaggcagcacctggaaaacaaaatgaagaaaaaacctataaaaagactgcatcatctgctattaaaggtgctattcagctgggaataggatacacagtgggtaatctcacttccaagccagaacgagatgttcttatgcaagacttttatgtggtggaaagtgtgttcctacccagcgaagggagcaatctgaccccagcacatcactacccagactttagatttaagacatacgctccattagcattccgatatttcagagaactttttggtatcaagcctgatgattacttgtattccatctgcagtgaacctctaatagaactgtctaaccctggagccagtggatccttgttttttgtgaccagtgatgatgaatttatcatcaaaacagttcagcacaaagaagctgagtttcttcagaagctactgccaggctattacatgaatttaaaccagaatccaaggactcttttgccaaaattttacggactgtattgtatgcaatcaggaggcattaatatcaggattgtggtgatgaacaacgttttgccacgctccatgagaatgcactttacatatgacttgaaaggctcaacgtataagcgaagagcatcccgtaaagagagagagaaatccaaccccacatttaaggacttagatttcctgcaagacatgcacgaagggttgtattttgatacggaaacatacaacgcgcttatgaaaacacttcagagagactgccgggtgctagaaagcttcaagatcatggattatagccttctgttgggaattcatttcctggaccattccctcaaagagaaagaggaggagaccccacaaaatgtgcctgatgctaagcggactgggatgcagaaggttctctactcaacagccatggaatctatccagggtccagggaaatctggagatgggataatcacagagaacccagacacaatgggaggcattccagctaaaagccataggggagaaaaactacttttatttatgggcattattgacattctgcaatcatataggttaatgaagaagttagaacattcctggaaagctcttgtttatgatggggacactgtttctgttcatagaccaagcttttatgcagacagatttcttaagttcatgaattccagagttttcaagaaaattcaagctttgaaggcttcaccgtctaagaaacggtgcaattcaatcgccgccctaaaggccacttcacaggagattgtgtcctcaattagccaggaatggaaggatgagaagcgggatttgctgactgaaggacaaagttttagcagccttgatgaagaagccctgggatcccgacacaggccagacctggtccctagcactccatcactgtttgaagctgcttccttggcaaccacaatttcatcttcttccttatacgtcaatgagcactatccacacgacaggcctacactctattcaaacagtaagtgaaaatggtgatcacctaagcacatggatgagacgtgagcacagttatggcagagaagtttctccgcaccagaattatccacagcaacttggctgagccccactacacacagagaaatcatcaacctgacttaagagttttcaagatgtcaacttcaggctgatcagcagatgggatgtgaaaaatactaccctattctatcatttgctgttgcttgctgaactgtgaagaactgcatgaactatatttaagctgctttctgtaccattgccaatcacctttttggagttggaagtgctattttcctatggacttttgcatta

SEQ ID NO: 22210 - DNA, 5047 bp, Homo sapiens
  source 1..5047: mol_type = unassigned DNA
gcggcggtcgcagctcgggtccccctcgggcgcccccgccgccgtccgcgcgcggccatggagctggaggtaccggacgaggcggagagcgctgaggcgggggccgtgccctcggaggcggcgtgggcggcagagagcggggcggcggcaggtttggctcagaagaaggcggccccaacagaggttctgtccatgacggcacagccgggccctggccatgggaagaagttgggccatcgaggtgtggacgcatccggcgaaaccacctacaagaagaccacctcctccaccctgaagggtgccatccagctgggcatcggctacaccgtgggccacctgagctccaagcccgaacgcgacgtgctcatgcaggacttctacgtggtggagagcatcttcttccccagcgaaggcagcaacctcacccccgcccaccacttccaggacttccgcttcaagacctatgcacctgtcgccttccgctacttccgggagctctttgggatccggccagatgattacttgtactccctgtgcaatgagccgctgatcgagctgtccaacccgggcgccagtggctccctcttctacgtcaccagcgacgacgagttcatcatcaagaccgtcatgcacaaggaggccgagttcctgcagaagctgctccctggctactacatgaacctcaaccagaacccgcggacgctgctgcccaagttctatgggctgtactgcgtgcagtcggggggcaagaacatccgcgtcgtggtcatgaacaacatcctgccccgcgtggtcaagatgcacctcaagttcgacctcaagggctccacctacaagcggcgcgccagcaagaaggagaaggagaagagcttccccacctacaaggacctggacttcatgcaggacatgcccgaggggctcctgctggacgccgacaccttcagcgccctggtcaagacgctgcagcgggactgcctggtcctggaaagtttcaagatcatggactacagcctgctgctgggcgtgcacaacatcgaccagcacgagcgcgagcggcaggcgcagggcgcccagagcacctcagatgagaagcggcctgtgggccagaaggcgctctactccacggccatggagtccatccagggtggcgccgcgcgcggggaggccatcgaatcggatgacacgatgggcgggatccccgctgtgaacggccgcggggagcggctgctgctgcacattggcatcatcgacatcctgcagtcctacaggttcatcaagaaactggagcacacctggaaggccctcgtccacgatggggacacggtgtccgtccaccgccccagcttctatgccgagcgctttttcaagttcatgagcaacacggtctttcggaagaactcctccctgaagtcctcgccctccaagaaggggcgcggcggagccttgctagctgtgaaaccgctggggcccaccgctgccttctcggccagccagatccctagcgagcgggaggaggcccagtacgacctgcggggggcccgcagctaccccacgctggaggacgaaggccggcccgacctcctgccctgcacgccaccttctttcgaagaagccactacagcctccattgccacgactctgtcatccacatccctctccattcctgagcggtccccctcggagacgtcggagcagccgcggtacaggcggcgcacacagtcgtctggacaggatggcaggccgcaggaggagccacccgcggaagaggatctgcagcagattacagtgcaggtggagcctgcgtgcagcgtggagattgtggtccccaaagaggaggacgcaggggtggaggcttccccggccggtgcctctgctgctgttgaagtagaaactgccagccaggcctcagacgaggagggcgcacctgccagccaggcctcggacgaggaggacgcgcccgccaccgacatctactttcccaccgatgagaggagctgggtgtactccccgctccactatagcgcccaggcccccccggcctccgacggcgagagcgacacataatttctatgcagcccccgacccagagccgagctccacttctgctccggctgcccccgaaggcgctgcccaccccgctgaggcccagagctcgggagatgcccgcctcgccgccccaccggacctcgtcctccccctgcacggatgccgacggccgggcccctccccgacaagcctcccagggccccggcaccccggtcggcagcctgcccctgtgagacccaccctcccgagcggccaatcgcatttgagtccttatttggcacagagacggaagcacgtgtgtgccgttttaggaaaagaacaaaaaagacacaaacaaaccaaccagagggagaagagcccctgcccactgcactctttggttctctgctgtgcctgcctgtgtcctgaggaagaagccaggctgttcgcggtggcctctggggacctgagccccgggggccccatcggcctgcagaggggacggctggggtcccgagcaactctgcctccatccacgtgggaagcggaccctcctgccctcagcttgggtttgggggcctcagtgcaggacatctggcctgaacatcgactgtggggacagccctcgccctgccaagcactgcggccactcagcagctatgttcccgccgcagtggggccctgacgcccacctcccaggtgcccctcgagcaaaaacctctggcgcctccaatccagacccaccacagctggagggccaggcctcctcttccccaggctgccacccacgctggcggagctcagggctggggacttgtccttctcttccaacgtaggccactcagcaactggcatggagggcccaggcaacggagacgttttctccatggcaggacagagcgggaggccgggccttgggccacaggagaccagctcagggcggaaggtcaggctccccgccccctccacgtggagacatggcctagggggccaggcccggctccacaggagtctccttcaggactggtgtggatgtccgccgcctctttcttgtttaagtgatgtgatgtctccgaggaggggagagaagactttgtttccgactcatcaccctccaagagggcagcgctcccagtggtgggactcagcccagactgccctggggcagcttcctgggcccgctgcgctcagagggtgctggttggaggccagagctcggcagagtcacccaccctgcccttccccaggacccctgagaggggcttattggtgatggctgtgggaatcccccacttccaagatgtgcccaggatgtgaggagctggagtggaagctgcacctttgggaagaattcctctccagacctggcagagcctggtgtggggtctgagacggccggagaacctcccaggcagggctctgtgttttgtctgttacaacctccgtatgacgccacgccacccgctgttcacgtcccgtcggcctcctgcacagcccacacgctgcgcccggaaggcccctgctgtggagaagccggacccatccccgaggtccccagcgaggacacacactccacgagagcagcccctccactctgcccaggagaggggccgaccctcctcgggaaccggccagccgcgtggctcccagcatccatcaggacaagcccacgtggggtcctccctgcgtgctcagagggtctgtccagccctgggaagcgaccttggcctcagttcacagcctggtgctcatctgctggcaccgggcatccacccatcagcccccgccctgtccctccgaaggacacccagcaggcaccccccggggaggcaggggcagaggtcagaaggggtgtctgggacctggatggccagcagggacaggggcattgtcatctcaaaggcccaacccccagaggccacaccagtcctcccagggagtcctcgagtcgccctgcccagagccctggcaccagagacgccaagagcctgtggggtgactcggagcagcaggtgtggccccgggcgggcggcaccgcgtccagggcagcctccctccgctgagtgacacgggacaccagtgcccggccgacgcgcctttgcaggagaaatgtgcaaacctctgtggataccatttcatttccattcttgtgttgtctccaaggcccttttggagatatacttggtgttggttgtgttttttggttccttttcagagaactgtaaaccgaggctgacgtgctccactgactgtgccgaggggcgggggcaggaggacggcaagacctatttataatatttagcgaactcggtctccctcagatcccccgcgagggaggctgctggacccaccccgctgtcccccatgatagaagtctgtaaataccttggtgaccaatgcccacttcccctcctgggtcacctctgatggctgctgtccactgagaacgtgggcagtgtccaaattcctgtactgtaaagactaaaaggcgtttgctctgagactgacaaggcggaaacttccatgtgtctcctgccaggctctgtccccctacgccatcccgacacgtccccgttcccccgaaacctggctcagtgcaatactcccattgccatggggtccttcaccatggtactgtctccacagccctcagtccccaccccaggagaggcgcctgccacctcctcctcatctccggtggttcaatcgctccgcctgtccccaacccagtcccatttttatggccaaactgattctgaaacaaaatgaaactgcaaacctcgtgtgtcttaactccccccagggatgccactccattcctccgccccgtggtctggtgcgtgacaatccaaagcgccgagacgagggtgctgtgtccctcaaacccagagtggtgggcgcctctgaaaccatacagccactcctggccccaaacactggtttgcatcccaggttcctcgcccacctacccccgccacaccccgtctttttagagatctctctaataaatcgggtaataagc

SEQ ID NO: 22211 - DNA, 3326 bp, Homo sapiens
  source 1..3326: mol_type = unassigned DNA
atggagctggaggtaccggacgaggcggagagcgctgaggcgggggccgtgccctcggaggcggcgtgggcggcagagagcggggcggcggcaggtttggctcagaagaaggcggccccaacagaggttctgtccatgacggcacagccgggccctggccatgggaagaagttgggccatcgaggtgtggacgcatccggcgaaaccacctacaagaagaccacctcctccaccctgaagggtgccatccagctgggcatcggctacaccgtgggccacctgagctccaagcccgaacgcgacgtgctcatgcaggacttctacgtggtggagagcatcttcttccccagcgaaggcagcaacctcacccccgcccaccacttccaggacttccgcttcaagacctatgcacctgtcgccttccgctacttccgggagctctttgggatccggccagatgattacttgtactccctgtgcaatgagccgctgatcgagctgtccaacccgggcgccagtggctccctcttctacgtcaccagcgacgacgagttcatcatcaagaccgtcatgcacaaggaggccgagttcctgcagaagctgctccctggctactacatgaacctcaaccagaacccgcggacgctgctgcccaagttctatgggctgtactgcgtgcagtcggggggcaagaacatccgcgtcgtggtcatgaacaacatcctgccccgcgtggtcaagatgcacctcaagttcgacctcaagggctccacctacaagcggcgcgccagcaagaaggagaaggagaagagcttccccacctacaaggacctggacttcatgcaggacatgcccgaggggctcctgctggacgccgacaccttcagcgccctggtcaagacgctgcagcgggactgcctggtcctggaaagtttcaagatcatggactacagcctgctgctgggcgtgcacaacatcgaccagcacgagcgcgagcggcaggcgcagggcgcccagagcacctcagatgagaagcggcctgtgggccagaaggcgctctactccacggccatggagtccatccagggtggcgccgcgcgcggggaggccatcgaatcggatgacacgatgggcgggatccccgctgtgaacggccgcggggagcggctgctgctgcacattggcatcatcgacatcctgcagtcctacaggttcatcaagaaactggagcacacctggaaggccctcgtccacgatggggacacggtgtccgtccaccgccccagcttctatgccgagcgctttttcaagttcatgagcaacacggtctttcggaagaactcctccctgaagtcctcgccctccaagaaggggcgcggcggagccttgctagctgtgaaaccgctggggcccaccgctgccttctcggccagccagatccctagcgagcgggaggaggcccagtacgacctgcggggggcccgcagctaccccacgctggaggacgaaggccggcccgacctcctgccctgcacgccaccttctttcgaagaagccactacagcctccattgccacgactctgtcatccacatccctctccattcctgagcggtccccctcggagacgtcggagcagccgcggtacaggcggcgcacacagtcgtctggacaggatggcaggccgcaggaggagccacccgcggaagaggatctgcagcagattacagtgcaggtggagcctgcgtgcagcgtggagattgtggtccccaaagaggaggacgcaggggtggaggcttccccggccggtgcctctgctgctgttgaagtagaaactgccagccaggcctcagacgaggagggcgcacctgccagccaggcctcggacgaggaggacgcgcccgccaccgacatctacttttggcgcctctggggtccccatgcacccacctggccctggagaagggagggacgggccgcgtgcctgtgcccctacccaccgcacgtcgtcaccccttttcctgggactggtttgtgcgcgtcctggtctccggatggtacggggggcctgggggccatgtcgtgctgtgtgtctgtgtcctgatgccctgccaggtgggcagcagagaagggagaagggtcctcggtcctgcccctgccccggcaccccccaccttctgcttggcagtcagctgtccccacctgctccccgccacctccctccgcctctcccacccgaccacgggggtggccgcctcatccgctgtcctctgttttccttcctcctccggcccacccggcccgccccgtccagttcacggatgggaggtactggatttactctccccgccatcgccgactgcgggccgtgacgctgagcgcctcggggactgtaagtgaccgcagccggccaccctggggagaaggggcagtgcccctcgggcagcagggagccgcaggtccccggccggaagctcagtgtctgacgtcagttgttttccagaagggctttgggtaaatcacggctgcaattgaggtcagccacgctggccccggaccaggcgctgggctgcatgcgtcactgggaatgtcattcggtcccacgtcgaaccgggcgctccatagggcagcaccatcaccaggtgcacagctgaggcccagggtctgcttcggaccccggccagaccccagcgagcccctctctgcccctggacccagccctctcgtgtcagggtgtcttgggtggacgcttctcactcgtgcagacctggctgcccgtggccccgctggctgcacaggggaggttgcacaggtcagcagagtggctgcagggccgggctctgaaccgcagggccatggagacggggaggagatggtctctccacacccacctcacagatggaggcgctgaggcctcggctcccctgggagcctgggagaccacacggtttagtcaaaatccagatccccaagctctcaaggaggtccccctgggacgccacatgggccccacgtagctgtgagatcctcagggcctgctgttgtcattatgaccaataagcaaggggcccagagagcctaagagacctgcccagcaccgcacagccagaacggggcgcagacccaaagcaggagtgtcccctcgagacaaagcctccgccgaggccgccgtgactccccgcccatcagcaaacctctccgagcacctctgtgtgccaggcactgtggagtgaccccaagaggtggagaccacttccccggctgctctaggcagctccgtcccacggagccagcgggaagccagccaccgcgaagccgtgccccgga

SEQ ID NO: 22212 - DNA, 2289 bp, Homo sapiens
  source 1..2289: mol_type = unassigned DNA
ggcgcttgttgttcggcggcggcggtcgcagctcgggtccccctcgggcgcccccgccgccgtccgcgcgcggccatggagctggaggtaccggacgaggcggagagcgctgaggcgggggccgtgccctcggaggcggcgtgggcggcagagagcggggcggcggcaggtttggctcagaagaaggcggccccaacagaggttctgtccatgacggcacagccgggccctggccatgggaagaagttgggccatcgaggtgtggacgcatccggcgaaaccacctacaagaagaccacctcctccaccctgaagggtgccatccagctgggcatcggctacaccgtgggccacctgagctccaagcccgaacgcgacgtgctcatgcaggacttctacgtggtggagagcatcttcttccccagcgaaggcagcaacctcacccccgcccaccacttccaggacttccgcttcaagacctatgcacctgtcgccttccgctacttccgggagctctttgggatccggccagatgattacttgtactccctgtgcaatgagccgctgatcgagctgtccaacccgggcgccagtggctccctcttctacgtcaccagcgacgacgagttcatcatcaagaccgtcatgcacaaggaggccgagttcctgcagaagctgctccctggctactacatgaacctcaaccagaacccgcggacgctgctgcccaagttctatgggctgtactgcgtgcagtcggggggcaagaacatccgcgtcgtggtcatgaacaacatcctgccccgcgtggtcaagatgcacctcaagttcgacctcaagggctccacctacaagcggcgcgccagcaagaaggagaaggagaagagcttccccacctacaaggacctggacttcatgcaggacatgcccgaggggctcctgctggacgccgacaccttcagcgccctggtcaagacgctgcagcgggactgcctggtcctggaaagtttcaagatcatggactacagcctgctgctgggcgtgcacaacatcgaccagcacgagcgcgagcggcaggcgcagggcgcccagagcacctcagatgagaagcggcctgtgggccagaaggcgctctactccacggccatggagtccatccagggtggcgccgcgcgcggggaggccatcgaatcggatgacacgatgggcgggatccccgctgtgaacggccgcggggagcggctgctgctgcacattggcatcatcgacatcctgcagtcctacaggttcatcaagaaactggagcacacctggaaggccctcgtccacgatggggacacggtgtccgtccaccgccccagcttctatgccgagcgctttttcaagttcatgagcaacacggtctttcggaagaactcctccctgaagtcctcgccctccaagaaggggcgcggcggagccttgctagctgtgaaaccgctggggcccaccgctgccttctcggccagccagatccctagcgagcgggaggaggcccagtacgacctgcggggggcccgcagctaccccacgctggaggacgaaggccggcccgacctcctgccctgcacgccaccttctttcgaagaagccactacagcctccattgccacgactctgtcatccacatccctctccattcctgagcggtccccctcggagacgtcggagcagccgcggtacaggcggcgcacacagtcgtctggacaggatggcaggccgcaggaggagccacccgcggaagaggatctgcagcagattacagtgcaggtggagcctgcgtgcagcgtggagattgtggtccccaaagaggaggacgcaggggtggaggcttccccggccggtgcctctgctgctgttgaagtagaaactgccagccaggcctcagacgaggagggcgcacctgccagccaggcctcggacgaggaggacgcgcccgccaccgacatctacttttaatttctatgcagcccccgacccagagccgagctccacttctgctccggctgcccccgaaggcgctgcccaccccgctgaggcccagagctcgggagatgcccgcctcgccgccccaccggacctcgtcctccccctgcacggatgccgacggccgggcccctccccgacaagcctcccagggccccggcaccccggtcggcagcctgcccctgtgagacccaccctcccgagcggccaatcgcatttgagtccttatttggcacagagacggaagcacgtgtgtgccgtttt

SEQ ID NO: 22213 - DNA, 1104 bp, Homo sapiens
  source 1..1104: mol_type = unassigned DNA
gtttaggggtgggatcgggtcgggatccggaccagccaaggaagggtccaggtgccgcggatcttgagaaggaggcgtggcctggcgctgggattggcgccggatgcaccccgggttgtggagtttggggatcctcatccggcgccctctccccttccaggagtgcacagtctgcgggtggaccggggaaagaagacgtacttcatcgtcatgcagagcgtcttctaccccgccggccgcatctccgagaggtatgacatcaaaggctgcgaggtgagccgctgggtggatcccgcccctgagggcagcccccttgttctggtgctgaaggacctcaactttcagggcaagaccatcaacctggggccccagcggagctggttcctccgccagatggaactggataccaccttcctccgggagctcaacgtgctggattacagcctcctgatagccttccaacgtctccacgaggatgagaggggcccgggcagcagcctcatcttccgcacggccaggtctgtgcaaggggcacagagcccggaagagtcgagagcccaaaaccgccggctgctgcccgacgcccccaacgccctacacatcctggacgggcccgagcagcgctatttcctgggcgtcgtggatctcgccacagtctacgggctccgcaagcggctggagcacctgtggaagacactgcgctacccaggccggaccttctccactgtcagcccggctcgctacgcccgtcgcctctgccagtgggtggaggcgcacacggagtgacgggcgcccggccccactctccggatctggacgatgggctcacgccaggaacgccggttcccccgggcccgggcatctcgcctgcgcttcctcctgatggtcgccagagggcagcatcccctaactaataccgtaaccgcgcagtcccgtttgacggtggtgccgtgcccagcatcgtgccaaggactcccctactttagctcatttaatcctcaaaaaatgctattattctctttttacagaccatgaaatggaggctcagggggtgaagggactgatcaagatcattcagcaataaatgctggaaccaggactcaa

SEQ ID NO: 22214 - DNA, 2198 bp, Homo sapiens
  source 1..2198: mol_type = unassigned DNA
gcggcggggaatgcggccaaagcccgggaagctgctgcgggggcgatggctgcgccgagcccggggccccgcgaggtcctggccccctcccctgaggctggatgcagagcagtcacctccagccggcgggggcttctctggcgcctccgagacaagcagtctcgcctgggcctgtttgagatcagcccggggcatgaactgcatgggatgacgtgcatgatgcaggcagggctgtgggctgccacccaggtctccatggaccacccacccacggggccgccctcccgggacgatttctcggaggtcctaacccaggttcacgagggcttcgagctgggcacgctggccggccccgcctttgcctggctgcgccgctccctgggcctggcggaggaggactatcaggctgccctgggccccggcggcccctacctgcagttcctcagcacctccaagagcaaggccagcttcttcctgtcccacgaccagcgcttcttcctgaagacccaggggcgccgagaggtgcaggctctgctcgcccacctgccccgctacgtgcagcacctgcagcggcacccgcactcgctgctggcgcggttgctgggagtgcacagtctgcgggtggaccggggaaagaagacgtacttcatcgtcatgcagagcgtcttctaccccgccggccgcatctccgagaggtatgacatcaaaggctgcgaggtgagccgctgggtggatcccgcccctgagggcagcccccttgttctggtgctgaaggacctcaactttcagggcaagaccatcaacctggggccccagcggagctggttcctccgccagatggaactggataccaccttcctccgggagctcaacgtgctggattacagcctcctgatagccttccaacgtctccacgaggatgagaggggcccgggcagcagcctcatcttccgcacggccaggtctgtgcaaggggcacagagcccggaagagtcgagagcccaaaaccgccggctgctgcccgacgcccccaacgccctacacatcctggacgggcccgagcagcgctatttcctgggcgtcgtggatctcgccacagtctacgggctccgcaagcggctggagcacctgtggaagacactgcgctacccaggccggaccttctccactgtcagcccggctcgctacgcccgtcgcctctgccagtgggtggaggcgcacacggagtgacgggcgcccggccccactctccggatctggacgatgggctcacgccaggaacgccggttcccccgggcccgggcatctcgcctgcgcttcctcctgatggtcgccagagggcagcatcccctaactaataccgtaaccgcgcagtcccgtttgacggtggtgccgtgcccagcatcgtgccaaggactcccctactttagctcatttaatcctcaaaaaatgctattattctctttttacagaccatgaaatggaggctcagggggtgaagggactgatcaagatcattcagcaataaatgctggaaccaggactcaaccatggcttttggattccggagcctgtattcttaaccaccagctcctgcagcttggtcctcatgatctgggcaaggggggaggctgaaggctgcagccctcttgtcatccagatggggaaactgaggcccagagactttaaggggcgtaagcacgggtaagtggcaaggtcggccctgagtacccaggcctcccggccccctgctcctggcctgatactctagggatgcaggtgggagaagcaggggtcctgggggctgcctggagctctgggaggcattctgaacggggtctactactgatctcaggtgagctctgccctcctctgaaagtcacttttctcatcagttaaatgggggcaagggtccgtggtccgaccaaggtcttggcttcacagacatcaccaggagcctgcatgcccctgatcactccttctccttcctccaggaaactccagcctggcctctgaccccagttcaatccgaccatgcccaagcccaagcgggcctttcctccagaactgctccggggcctggctgtgtgactggagcaaggtgctaaacctctctgtgcctcgctggtctaatctgtaaaatgaaggaatggaaacagacctcattaactcattaaatatttgttgagcacctgcca

SEQ ID NO: 22215 - DNA, 2655 bp, Homo sapiens
  source 1..2655: mol_type = unassigned DNA
ggaagctggagccacctgcggctctgagagggacagacggtgctcagcctgtgtcctggggcaaagctggattcattttcctccctggcgatcttctggggcccacagctggtgatatggaggcactgacaccctggtctcggcgcttgttttagaagaggcagaacagtgataaagacaaggatctaaatgggcaaggacgccctgccctcactgggctcactggcagccctgaccctctattctgcaccctgtgagccaccgagactgaaccaaacccaggaagcggcgccaccaaccagcctcgcagaggcagaggccctggagcagtgacagcacaggagatctgctggctcgggggaaggggaggaaagaggaaaacaaagggagtgatcgagtgagcctcgccccgccctccctgcgccggcccatgatgtgtcagtcagaggcgcggcaaggaccagagctccgcgcggcgaaatggttgcacttcccccagctggccctgaggcggaggctggggcagctgagctgcatgtccagacccgctctgaaactgcgctcctggcccttgaccgtcctctactacctcctgcccttcggcgccctcagaccgctcagccgggtgggatggaggcccgtaagcagggtggctttgtacaagtcagtgccaacgcgcttgctgtcacgggcctggggtcgcctcaatcaggtggagctgccacactggctgcgcaggcccgtctacagcctgtacatctggacgtttggggtgaacatgaaagaggccgctgtggaggacctgcatcactaccgcaacctcagcgagttcttccggcgcaagctgaagccgcaggcccggcctgtctgtggcctgcacagcgtgattagcccatcggatggaaggatcctcaactttgggcaggtgaagaactgtgaggtggagcaggtaaagggggtcacctactccctggagtcgttcctgggcccgcgtatgtgcacagaggacctgcccttcccaccagccgcgtcgtgtgactccttcaagaaccagctggtcacccgggaagggaatgagctctatcactgtgtcatctacctggcccctggggactaccactgcttccactcccccaccgactggactgtgtcccaccggcgccacttcccaggctccctgatgtcagtgaaccctggcatggctcgctggatcaaagagctcttctgccataacgagcgggtggtcctgacgggggactggaaacatggcttcttctcactgacagctgtgggggccaccaacgtgggctccattcgcatctactttgaccgggacctgcacacaaacagcccaaggcacagcaagggctcctacaatgacttcagcttcgtgacgcacaccaatagagagggcgtccccatgcgtaagggcgagcacctgggcgagttcaacctgggctccaccatcgtgctcatcttcgaggcccccaaggacttcaatttccagctgaaaacaggacagaaaatccgctttggggaagccctgggctcgctctagagtctctttcctgattatggctgctaagggatcttttccaaacagagtgagggtcttttcaagagggaggcccatgaggccatccaggtaagggcctgcctcagcgtggttgggagtctgaccaggtaggacttgaatgattcggctaccacctgttccagaggtgcagacaagaggtggcgagagcccccatcatgcccctcaacctatcccgttccttctgcctacaaataaaaagtgcaggctggaatgatctcagtcacatttggatctttttaaacactgtatagacggaagagcctgcattcctgaccgaaccttcagttggtctcggttgtcgttttttcttgctgctcctccccccatcacctgagctgttttctgttggccccttttgttttttggccttaacgctcctgctgcacagggtgaggtgcctccttggcacagactgtggatgcctctcccccagcagagccacacagccttcgtgacaactgctttccgttcccacattcacctcatcctgctctttagaaaaagcagtctttgtgcttgtggctgaacgcatcaccctggactctgctagtgtcttctgaggacactgatgacactgattaatgatacagacctttgcaggacctgatgagtgacccttctggagctggccaggtcctctgcagcaggcaagaccaatcaatcactgaacctgcctcatggcaccagagtgaacagggcaggcaggtagtaggcccagctggggaaatgggagagttcctgtccccctccacatatccctacatgaaatatgggaaagttgctgctattgattcagggtctgtcttggaggcagaggacccttggtggatagttggtcagtgcctggaaaacctgtcccagtttatcaggaacgcaggcctggggagcccccagtggcggggacagggccagatttcatgttgaccctggggatgctgtgaatttctcctgcaggagagacatcattgaattttttcaactgtatcagtagcacagtatttttgtatgaaaagtgggagacttctgaacagtaattcatttaattgcaaagcattttg

SEQ ID NO: 22216 - DNA, 1736 bp, Homo sapiens
  source 1..1736: mol_type = unassigned DNA
atggcgacgtccgtggggcaccgatgtctgggattactgcacggggtcgcgccgtggcggagcagcctccatccctgtgagatcactgccctgagccaatccctacagcccttacggaagctgccttttagagcctttcgcacagatgccagaaaaatccacactgcccctgcccgaaccatgttcctgctgcgtcccctgcccattctgttggtgacaggcggcgggtatgcagggtaccggcagtatgagaagtacagggagcgagagctggagaagctgggattggagattccacccaaacttgctggtcactgggaggtggctttgtacaagtcagtgccaacgcgcttgctgtcacgggcctggggtcgcctcaatcaggtggagctgccacactggctgcgcaggcccgtctacagcctgtacatctggacgtttggggtgaacatgaaagaggccgctgtggaggacctgcatcactaccgcaacctcagcgagttcttccggcgcaagctgaagccgcaggcccggcctgtctgtggcctgcacagcattagcccatcggatggaaggatcctcaactttgggcaggtgaagaactgtgaggtggagcaggtaaagggggtcacctactccctggagtcgttcctgggcccgcgtatgtgcacagaggacctgcccttcccaccagccgcgtcgtgtgactccttcaagaaccagctggtcacccgggaagggaatgagctctatcactgtgtcatctacctggcccctggggactaccactgcttccactcccccaccgactggactgtgtcccaccggcgccacttcccaggctccctgatgtcagtgaaccctggcatggctcgctggatcaaagagctcttctgccataacgagcgggtggtcctgacgggggactggaaacatggcttcttctcactgacagctgtgggggccaccaacgtgggctccattcgcatctactttgaccgggacctgcacacaaacagcccaaggcacagcaagggctcctacaatgacttcagcttcgtgacgcacaccaatagagagggcgtccccatgcgtaagggcgagcacctgggcgagttcaacctgggctccaccatcgtgctcatcttcgaggcccccaaggacttcaatttccagctgaaaacaggacagaaaatccgctttggggaagccctgggctcgctctagagtctctttcctgattatggctgctaagggatcttttccaaacagagtgagggtcttttcaagagggaggcccatgaggccatccaggtaagggcctgcctcagcgtggttgggagtctgaccaggtaggacttgaatgattcggctaccacctgttccagaggtgcagacaagaggtggcgagagcccccatcatgcccctcaacctatcccgttccttctgcctacaaataaaaagtgcaggctggaatgatctcagtcacatttggatctttttaaacactgtatagacggaagagcctgcattcctgaccgaaccttcagttggtctcggttgtcgttttttcttgctgctcctccccccatcacctgagctgttttctgttggccccttttgttttttggccttaacgctcctgctgcacagggtgaggtgcctccttggcacagactgtggatgcctctcccccagcagagccacacagccttcgtgacaactgctttccgtt

SEQ ID NO: 22217 - DNA, 2669 bp, Homo sapiens
  source 1..2669: mol_type = unassigned DNA
ccatcctgcagctctgagagggacagacggtgctcagcctgtgtcctggggcaaagctggattcattttcctccctggcgatcttctggggcccacagctggtgatatggaggcactgacaccctggtctcggcgcttgttttagaagaggcagaacagtgataaagacaaggatctaaatgggcaaggacgccctgccctcactgggctcactggcagccctgaccctctattctgcaccctgtgagccaccgagactgaaccaaacccaggaagcggcgccaccaaccagcctcgcagaggcagaggccctggagcagtgacagcacaggagatctgctggctcgggggaaggggaggaaagaggaaaacaaagggagtgatcgagtgagcctcgccccgccctccctgcgccggcccatgatgtgtcagtcagaggcgcggcaaggaccagagctccgcgcggcgaaatggttgcacttcccccagctggccctgaggcggaggctggggcagctgagctgcatgtccagacccgctctgaaactgcgctcctggcccttgaccgtcctctactacctcctgcccttcggcgccctcagaccgctcagccgggtgggatggaggcccgtaagcagggtggctttgtacaagtcagtgccaacgcgcttgctgtcacgggcctggggtcgcctcaatcaggtggagctgccacactggctgcgcaggcccgtctacagcctgtacatctggacgtttggggtgaacatgaaagaggccgctgtggaggacctgcatcactaccgcaacctcagcgagttcttccggcgcaagctgaagccgcaggcccggcctgtctgtggcctgcacagcgtgattagcccatcggatggaaggatcctcaactttgggcaggtgaagaactgtgaggtggagcaggtaaagggggtcacctactccctggagtcgttcctgggcccgcgtatgtgcacagaggacctgcccttcccaccagccgcgtcgtgtgactccttcaagaaccagctggtcacccgggaagggaatgagctctatcactgtgtcatctacctggcccctggggactaccactgcttccactcccccaccgactggactgtgtcccaccggcgccacttcccaggctccctgatgtcagtgaaccctggcatggctcgctggatcaaagagctcttctgccataacgagcgggtggtcctgacgggggactggaaacatggcttcttctcactgacagctgtgggggccaccaacgtgggctccattcgcatctactttgaccgggacctgcacacaaacagcccaaggcacagcaagggctcctacaatgacttcagcttcgtgacgcacaccaatagagagggcgtccccatgcgtaagggcgagcacctgggcgagttcaacctgggctccaccatcgtgctcatcttcgaggcccccaaggacttcaatttccagctgaaaacaggacagaaaatccgctttggggaagccctgggctcgctctagagtctctttcctgattatggctgctaagggatcttttccaaacagagtgagggtcttttcaagagggaggcccatgaggccatccaggtaagggcctgcctcagcgtggttgggagtctgaccaggtaggacttgaatgattcggctaccacctgttccagaggtgcagacaagaggtggcgagagcccccatcatgcccctcaacctatcccgttccttctgcctacaaataaaaagtgcaggctggaatgatctcagtcacatttggatctttttaaacactgtatagacggaagagcctgcattcctgaccgaaccttcagttggtctcggttgtcgttttttcttgctgctcctccccccatcacctgagctgttttctgttggccccttttgttttttggccttaacgctcctgctgcacagggtgaggtgcctccttggcacagactgtggatgcctctcccccagcagagccacacagccttcgtgacaactgctttccgttcccacattcacctcatcctgctctttagaaaaagcagtctttgtgcttgtggctgaacgcatcaccctggactctgctagtgtcttctgaggacactgatgacactgattaatgatacagacctttgcaggacctgatgagtgacccttctggagctggccaggtcctctgcagcaggcaagaccaatcaatcactgaacctgcctcatggcaccagagtgaacagggcaggcaggtagtaggcccagctggggaaatgggagagttcctgtccccctccacatatccctacatgaaatatgggaaagttgctgctattgattcagggtctgtcttggaggcagaggacccttggtggatagttggtcagtgcctggaaaacctgtcccagtttatcaggaacgcaggcctggggagcccccagtggcggggacagggccagatttcatgttgaccctggggatgctgtgaatttctcctgcaggagagacatcattgaattttttcaactgtatcagtagcacagtatttttgtatgaaaagtgggagacttctgaacagtaattcatttaattgcaaagcattttgaaataaaaaaaatcaaacttaaaa

SEQ ID NO: 22218 - DNA, 2194 bp, Homo sapiens
  source 1..2194: mol_type = unassigned DNA
ggagcccggaagctggagccacctgcggccctgaccctctattctgcaccctgtgagccaccgagactgaaccaaacccaggaagcggcgccaccaaccagcctcgcagaggcagaggccctggagcagtgacagcacaggagatctgctggctcgggggaaggggaggaaagaggaaaacaaagggagtgatcgagtgagcctcgccccgccctccctgcgccggcccatgatgtgtcagtcagaggcgcggcaaggaccagagctccgcgcggcgaaatggttgcacttcccccagctggccctgaggcggaggctggggcagctgagctgcatgtccagacccgctctgaaactgcgctcctggcccttgaccgtcctctactacctcctgcccttcggcgccctcagaccgctcagccgggtgggatggaggcccgtaagcagggtggctttgtacaagtcagtgccaacgcgcttgctgtcacgggcctggggtcgcctcaatcaggtggagctgccacactggctgcgcaggcccgtctacagcctgtacatctggacgtttggggtgaacatgaaagaggccgctgtggaggacctgcatcactaccgcaacctcagcgagttcttccggcgcaagctgaagccgcaggcccggcctgtctgtggcctgcacagcgtgattagcccatcggatggaaggatcctcaactttgggcaggtgaagaactgtgaggtggagcaggtaaagggggtcacctactccctggagtcgttcctgggcccgcgtatgtgcacagaggacctgcccttcccaccagccgcgtcgtgtgactccttcaagaaccagctggtcacccgggaagggaatgagctctatcactgtgtcatctacctggcccctggggactaccactgcttccactcccccaccgactggactgtgtcccaccggcgccacttcccaggacctgcacacaaacagcccaaggcacagcaagggctcctacaatgacttcagcttcgtgacgcacaccaatagagagggcgtccccatgcgtaagggcgagcacctgggcgagttcaacctgggctccaccatcgtgctcatcttcgaggcccccaaggacttcaatttccagctgaaaacaggacagaaaatccgctttggggaagccctgggctcgctctagagtctctttcctgattatggctgctaagggatcttttccaaacagagtgagggtcttttcaagagggaggcccatgaggccatccaggtaagggcctgcctcagcgtggttgggagtctgaccaggtaggacttgaatgattcggctaccacctgttccagaggtgcagacaagaggtggcgagagcccccatcatgcccctcaacctatcccgttccttctgcctacaaataaaaagtgcaggctggaatgatctcagtcacatttggatctttttaaacactgtatagacggaagagcctgcattcctgaccgaaccttcagttggtctcggttgtcgttttttcttgctgctcctccccccatcacctgagctgttttctgttggccccttttgttttttggccttaacgctcctgctgcacagggtgaggtgcctccttggcacagactgtggatgcctctcccccagcagagccacacagccttcgtgacaactgctttccgttcccacattcacctcatcctgctctttagaaaaagcagtctttgtgcttgtggctgaacgcatcaccctggactctgctagtgtcttctgaggacactgatgacactgattaatgatacagacctttgcaggacctgatgagtgacccttctggagctggccaggtcctctgcagcaggcaagaccaatcaatcactgaacctgcctcatggcaccagagtgaacagggcaggcaggtagtaggcccagctggggaaatgggagagttcctgtccccctccacatatccctacatgaaatatgggaaagttgctgctattgattcagggtctgtcttggaggcagaggacccttggtggatagttggtcagtgcctggaaaacctgtcccagtttatcaggaacgcaggcctggggagcccccagtggcggggacagggccagatttcatgttgaccctggggatgctgtgaatttctcctgcaggagag

SEQ ID NO: 22219 - DNA, 1015 bp, Homo sapiens
  source 1..1015: mol_type = unassigned DNA
gggccggtcactccgcgcaagtttgggttcctgttttagaactgccacctaagcccctcttatttcatctttcctgtggtggaaacccctgcccccaccggagtgtgaggttgactttttggaaagagagccctgaccctctattctgcaccctgtgagccaccgagactgaaccaaacccaggaagcggcgccaccaaccagcctcgcagaggcagaggccctggagcagtgacagcacaggagatctgctggctcgggggaaggggaggaaagaggaaaacaaagggagtgatcgagtgagcctcgccccgccctccctgcgccggcccatgatgtgtcagtcagaggcgcggcaaggaccagagctccgcgcggcgaaatggttgcacttcccccagctggccctgaggcggaggctggggcagctgagctgcatgtccagacccgctctgaaactgcgctcctggcccttgaccgtcctctactacctcctgcccttcggcgccctcagaccgctcagccgggtgggatggaggcccgtaagcagggtggctttgtacaagtcagtgccaacgcgcttgctgtcacgggcctggggtcgcctcaatcaggtggagctgccacactggctgcgcaggcccgtctacagcctgtacatctggacgtttggggtgaacatgaaagaggccgctgtggaggacctgcatcactaccgcaacctcagcgagttcttccggcgcaagctgaagccgcaggcccggcctgtctgtggcctgcacagcgtgattagcccatcggatggaaggatcctcaactttgggcaggtgaagaactgtgaggtggagcaggtaaagggggtcacctactccctggagtcgttcctgggcccgcgtatgtgcacagaggacctgcccttcccaccagccgcgtcgtgtgactccttcaagaaccagctggtcacccgggaagggaatgagctctatcactgtgtcatctacctggcccctggggac

SEQ ID NO: 22220 - DNA, 609 bp, Homo sapiens
  source 1..609: mol_type = unassigned DNA
ccttcatccccccttcctcgcccctccacagacccagggcatttggtggacacttttgcttgcagttaggtcaagtggaggtatggaagaacatggaaatccatggaggaggaccctatctgtcttcttccccctgccgcatcccagggctgtggcttgtcatgtggcacttgcttgggctggatccagccctgaccctctattctgcaccctgtgagccaccgagactgaaccaaacccaggaagcggcgccaccaaccagcctcgcagaggcagaggccctggagcagtgacagcacaggagatctgctggctcgggggaaggggaggaaagaggaaaacaaagggagtgatcgagtgagcctcgccccgccctccctgcgccggcccatgatgtgtcagtcagaggcgcggcaaggaccagagctccgcgcggcgaaatggttgcacttcccccagctggccctgaggcggaggctggggcagctgagctgcatgtccagacccgctctgaaactgcgctcctggcccttgaccgtcctctactacctcctgcccttcggcgccctcagaccgctcagccgggtgggatggaggcccgtaagcagg

SEQ ID NO: 22221 - DNA, 460 bp, Homo sapiens
  source 1..460: mol_type = unassigned DNA
atttggtggacacttttgcttgcagttaggtcaagtggagccctgaccctctattctgcaccctgtgagccaccgagactgaaccaaacccaggaagcggcgccaccaaccagcctcgcagaggcagaggccctggagcagtgacagcacaggagatctgctggctcgggggaaggggaggaaagaggaaaacaaagggagtgatcgagtgagcctcgccccgccctccctgcgccggcccatgatgtgtcagtcagaggcgcggcaaggaccagagctccgcgcggcgaaatggttgcacttcccccagctggccctgaggcggaggctggggcagctgagctgcatgtccagacccgctctgaaactgcgctcctggcccttgaccgtcctctactacctcctgcccttcggcgccctcagaccgctcagccgggtgggatggaggcccgtaagcagg

SEQ ID NO: 22222 - DNA, 1963 bp, Homo sapiens
  source 1..1963: mol_type = unassigned DNA
ctgcgaccaagcccaggtttagcgaaacctacagctccactagttcccctacctccgcaggtgccaagcgggttaggtggggagtagccacagggcggagcttagtcggctccgcccccaacccgcgcttttctcattggcccactgaactcgagactcgtgacgccttaagcgtgcgcccagcgtgtgaagggggcgtggcacgctgagaaggagcagacaagatggcgacgtccgtggggcaccgatgtctgggattactgcacggggtcgcgccgtggcggagcagcctccatccctgtgagatcactgccctgagccaatccctacagcccttacggaagctgccttttagagcctttcgcacagatgccagaaaaatccacactgcccctgcccgaaccatgttcctgctgcgtcccctgcccattctgttggtgacaggcggcgggtatgcagggtaccggcagtatgagaagtacagggagcgagagctggagaagctgggattggagattccacccaaacttgctggtcactgggaggtggctttgtacaagtcagtgccaacgcgcttgctgtcacgggcctggggtcgcctcaatcaggtggagctgccacactggctgcgcaggcccgtctacagcctgtacatctggacgtttggggtgaacatgaaagaggccgctgtggaggacctgcatcactaccgcaacctcagcgagttcttccggcgcaagctgaagccgcaggcccggcctgtctgtggcctgcacagcgtgattagcccatcggatggaaggatcctcaactttgggcaggtgaagaactgtgaggtggagcaggtaaagggggtcacctactccctggagtcgttcctgggcccgcgtatgtgcacagaggacctgcccttcccaccagccgcgtcgtgtgactccttcaagaaccagctggtcacccgggaagggaatgagctctatcactgtgtcatctacctggcccctggggactaccactgcttccactcccccaccgactggactgtgtcccaccggcgccacttcccaggctccctgatgtcagtgaaccctggcatggctcgctggatcaaagagctcttctgccataacgagcgggtggtcctgacgggggactggaaacatggcttcttctcactgacagctgtgggggccaccaacgtgggctccattcgcatctactttgaccgggacctgcacacaaacagcccaaggcacagcaagggctcctacaatgacttcagcttcgtgacgcacaccaatagagagggcgtccccatgcgtaagggcgagcacctgggcgagttcaacctgggctccaccatcgtgctcatcttcgaggcccccaaggacttcaatttccagctgaaaacaggacagaaaatccgctttggggaagccctgggctcgctctagagtctctttcctgattatggctgctaagggatcttttccaaacagagtgagggtcttttcaagagggaggcccatgaggccatccaggtaagggcctgcctcagcgtggttgggagtctgaccaggtaggacttgaatgattcggctaccacctgttccagaggtgcagacaagaggtggcgagagcccccatcatgcccctcaacctatcccgttccttctgcctacaaataaaaagtgcaggctggaatgatctcagtcacatttggatctttttaaacactgtatagacggaagagcctgcattcctgaccgaaccttcagttggtctcggttgtcgttttttcttgctgctcctccccccatcacctgagctgttttctgttggccccttttgttttttggccttaacgctcctgctgcacagggtgaggtgcctccttggcacagactgtggatgcctctcccccagcagagccacacagccttcgtgacaactgctttccgtt

SEQ ID NO: 22223 - DNA, 722 bp, Homo sapiens
  source 1..722: mol_type = unassigned DNA
aagtggggcctgaaagccctggcagcagtggctggtcccctccctgtcatggcttactggaccgggcagccctagggccttgccccctactgcctccccaggccagctgaggaagaggatgagcagtgcaggctggctcagccctgggtagcagggacagagcaggtggccaggactggggacagtgggctttagtgcaggggcttttgcactggactgcaagccctgagcaggtgacctgagcaggtgtgtgaccagtgcctgtctgtctgcaatagccctgaccctctattctgcaccctgtgagccaccgagactgaaccaaacccaggaagcggcgccaccaaccagcctcgcagaggcagaggccctggagcagtgacagcacaggagatctgctggctcgggggaaggggaggaaagaggaaaacaaagggagtgatcgagtgagcctcgccccgccctccctgcgccggcccatgatgtgtcagtcagaggcgcggcaaggaccagagctccgcgcggcgaaatggttgcacttcccccagctggccctgaggcggaggctggggcagctgagctgcatgtccagacccgctctgaaactgcgctcctggcccttgaccgtcctctactacctcctgcccttcggcgccctcagaccgctcagccgggtgggatggaggcccgtaagcagggtggctttgtacaagtcagtgcca

SEQ ID NO: 22224 - DNA, 1349 bp, Homo sapiens
  source 1..1349: mol_type = unassigned DNA
ttggccaacaagcgtttctccctcttccctgttctccccacttccccacttcatcccccttcatccccccttcctcgcccctccacagacccagggcatttggtggacacttttgcttgcagttaggtcaagtggagccctgaccctctattctgcaccctgtgagccaccgagactgaaccaaacccaggaagcggcgccaccaaccagcctcgcagaggcagaggccctggagcagtgacagcacaggagatctgctggctcgggggaaggggaggaaagaggaaaacaaagggagtgatcgagtgagcctcgccccgccctccctgcgccggcccatgatgtgtcagtcagaggcgcggcaaggaccagagctccgcgcggcgaaatggttgcacttcccccagctggccctgaggcggaggctggggcagctgagctgcatgtccagacccgctctgaaactgcgctcctggcccttgaccgtcctctactacctcctgcccttcggcgccctcagaccgctcagccgggtgggatggaggcccgtaagcagggtggctttgtacaagtcagtgccaacgcgcttgctgtcacgggcctggggtcgcctcaatcaggtggagctgccacactggctgcgcaggcccgtctacagcctgtacatctggacgtttggggtgaacatgaaagaggccgctgtggaggacctgcatcactaccgcaacctcagcgagttcttccggcgcaagctgaagccgcaggcccggcctgtctgtggcctgcacagcgtgattagcccatcggatggaaggatcctcaactttgggcaggtgaagaactgtgaggtggagcaggtaaagggggtcacctactccctggagtcgttcctgggcccgcgtatgtgcacagaggacctgcccttcccaccagccgcgtcgtgtgactccttcaagaaccagctggtcacccgggaagggaatgagctctatcactgtgtcatctacctggcccctggggactaccactgcttccactcccccaccgactggactgtgtcccaccggcgccacttcccaggctccctgatgtcagtgaaccctggcatggctcgctggatcaaagagctcttctgccataacgagcgggtggtcctgacgggggactggaaacatggcttcttctcactgacagctgtgggggccaccaacgtgggctccattcgcatctactttgaccgggacctgcacacaaacagcccaaggcacagcaagggctcctacaatgacttcagcgtggttgggagtctgaccaggtaggacttgaatgattcggctaccacctgttcc

SEQ ID NO: 22225 - DNA, 2360 bp, Homo sapiens
  source 1..2360: mol_type = unassigned DNA
cagcctttgctgggcgccagacccggctttgccgtccggctattagcctactgtggctagtcacccccggggtcccggccttctcgggctggggccgccgccaccgcggcaggacggggaggcgggccatggcgtcctgcgtggggagccggaccctaagcaaggatgatgtgaactacaaaatgcatttccggatgatcaacgagcagcaagtggaggacatcaccattgacttcttctaccggccgcataccatcaccctgctcagcttcaccatcgtcagcctcatgtacttcgcctttaccagggatgactctgttccagaagacaacatctggagaggcatcctctctgttattttcttctttcttatcatcagtgtgttagctttccccaatggagtatgctgtgaactgccatgtgatcacctgggagaggattatcagccactttgatatttttgcatttggacatttctggggctgggccatgaaggccttgctgatccgtagttacggtctctgctggacaatcagtattacctgggagctgactgagctcttcttcatgcatctcctccccaattttgccgagtgctggtgggatcaagtcattctggacatcctgttgtgcaatggcggtggcatttggctgggcatggtcgtttgccggtttttagagatgaggacttaccactgggcaagcttcaaggacattcataccaccaccgggaagatcaagagagctgttctgcagttcactcctgctagctggacctatgttcgatggtttgaccccaaatcttcttttcagagagtagctggagtgtaccttttcatgatcatctggcagctgactgagttgaataccttcttcttgaagcatatctttgtgttccaagccagtcatccattaagttggggtagaattctctttattggtggcatcacagctcccacagtgagacagtactacgcttacctcaccgacacacagtgcaagcgcgtaggaacacaatgctgggtgtttggggtcattggtttcctggaggccattgtttgcataaaatttggacaagatctcttctctaagacccaaatactctatgttgtgctttggcttctttgcgtggctttcaccactttcctctgtctgtacggcatgatttggtatgcagaacactatggtcaccgagaaaagacctactcggagtgtgaagatggcacctacagtccagagatctcctggcatcacaggaaagggacaaaaggttctgaagacagcccacccaagcatgcaggcaacaacgaaagccattcttccaggagaaggaatcggcattccaagtcaaaagtcaccaatggcgttggaaagaaatgaaaaaccctggttaatcaaagatgttccagagtgcctagaactgagagggaaatggaactcatttggaactccccgtgaggaggtcgaggcgcacagggcaagcaggaagaggcgagggcacttgggggtcattatttgagatcgtaagtcttgtttcccacagacctggccgcgtcaggcagatcatcgcctggggggcctttgccaacgtggggtctcttctaacttcagcacttgacatgcggtcaccggtggcagcgcggtgtgttgaagggaaacggtagctattcattcacagttgccaagagcagctccgcgcctgctggatcgtggatgcagcgtaaacatcttccttcagacgaggcattaaccccatggttaatggactggtcaccagtttttattttatttttatgaatctacctttccattgattgatttaagttcaggccacttttctgtcttttatttggttactgttgttatttgtttttaagttaggatgctttttaacagcctttagaagccgctgctgaaattgatactgggggaagggttccccttccttctagagcagaaaagggagagaggtgttgtattcctgtttggtaacctcagtctcctgtaagacctcctaccacatggcgagtatacaccaatcaggagagggtagctgcctgcataggagcctcgcttccgattattcccttcccaatattattcatccagacttagccacagtgcacaaaagcaaacctgctagagaggcagtgaacaccacagcttctccccagctaggtgccttttacatcgggtttgttctccttccatggtgtgttgctgacattgtcactgagtcccatgtgaggtgctggtgagtattacctttcatctgtgccatgctctagaaccttgaccttgatagttcaccacctctgatggatccctgttttaaataaaaacgattcactttaaagcct

SEQ ID NO: 22226 - DNA, 5177 bp, Homo sapiens
  source 1..5177: mol_type = unassigned DNA
agccaggggccccggctacccttctccggctcgctattcctctgaagtcctgtggacttggagtctgaaaattcctcgagtggtagagatgcctcagctaggatgacagcgtggggacggccggcggcgtcccctgccccaggccgcggtggcggcgccgcgaccccgccctctcgcgcctgtccttccctctgctcccagcctttgctgggcgccagacccggctttgccgtccggctattagcctactgtggctagtcacccccggggtcccggccttctcgggctggggccgccgccaccgcggcaggacggggaggcgggccatggcgtcctgcgtggggagccggaccctaagcaaggatgatgtgaactacaaaatgcatttccggatgatcaacgagcagcaagtggaggacatcaccattgacttcttctaccggccgcataccatcaccctgctcagcttcaccatcgtcagcctcatgtacttcgcctttaccagggatgactctgttccagaagacaacatctggagaggcatcctctctgttattttcttctttcttatcatcagtgtgttagctttccccaatggtccgttcactcgacctcatccagccttatggcgaatggtttttggactcagtgtgctctacttcctgttcctggtattcctactcttcctgaatttcgagcaggttaaatctctaatgtattggctagatccaaatcttcgatacgccacaagggaagcagatgtcatggagtatgctgtgaactgccatgtgatcacctgggagaggattatcagccactttgatatttttgcatttggacatttctggggctgggccatgaaggccttgctgatccgtagttacggtctctgctggacaatcagtattacctgggagctgactgagctcttcttcatgcatctcctccccaattttgccgagtgctggtgggatcaagtcattctggacatcctgttgtgcaatggcggtggcatttggctgggcatggtcgtttgccggtttttagagatgaggacttaccactgggcaagcttcaaggacattcataccaccaccgggaagatcaagagagctgttctgcagttcactcctgctagctggacctatgttcgatggtttgaccccaaatcttcttttcagagagtagctggagtgtaccttttcatgatcatctggcagctgactgagttgaataccttcttcttgaagcatatctttgtgttccaagccagtcatccattaagttggggtagaattctctttattggtggcatcacagctcccacagtgagacagtactacgcttacctcaccgacacacagtgcaagcgcgtaggaacacaatgctgggtgtttggggtcattggtttcctggaggccattgtttgcataaaatttggacaagatctcttctctaagacccaaatactctatgttgtgctttggcttctttgcgtggctttcaccactttcctctgtctgtacggcatgatttggtatgcagaacactatggtcaccgagaaaagacctactcggagtgtgaagatggcacctacagtccagagatctcctggcatcacaggaaagggacaaaaggttctgaagacagcccacccaagcatgcaggcaacaacgaaagccattcttccaggagaaggaatcggcattccaagtcaaaagtcaccaatggcgttggaaagaaatgaaaaaccctggttaatcaaagatgttccagagtgcctagaactgagagggaaatggaactcatttggaactccccgtgaggaggtcgaggcgcacagggcaagcaggaagaggcgagggcacttgggggtcattatttgagatcgtaagtcttgtttcccacagacctggccgcgtcaggcagatcatcgcctggggggcctttgccaacgtggggtctcttctaacttcagcacttgacatgcggtcaccggtggcagcgcggtgtgttgaagggaaacggtagctattcattcacagttgccaagagcagctccgcgcctgctggatcgtggatgcagcgtaaacatcttccttcagacgaggcattaaccccatggttaatggactggtcaccagtttttattttatttttatgaatctacctttccattgattgatttaagttcaggccacttttctgtcttttatttggttactgttgttatttgtttttaagttaggatgctttttaacagcctttagaagccgctgctgaaattgatactgggggaagggttccccttccttctagagcagaaaagggagagaggtgttgtattcctgtttggtaacctcagtctcctgtaagacctcctaccacatggcgagtatacaccaatcaggagagggtagctgcctgcataggagcctcgcttccgattattcccttcccaatattattcatccagacttagccacagtgcacaaaagcaaacctgctagagaggcagtgaacaccacagcttctccccagctaggtgccttttacatcgggtttgttctccttccatggtgtgttgctgacattgtcactgagtcccatgtgaggtgctggtgagtattacctttcatctgtgccatgctctagaaccttgaccttgatagttcaccacctctgatggatccctgttttaaataaaaacgattcactttaaagcctatcaaaggtctgtctgtaaaatgctcattttcttgcatcttactggtatcttctattgattgtaagcagtctgtgtttttcaagtgactttaggataatatatatgtgttttacatagtgagaagaaaaaagaaaagatgtgtattttaaagggcttacagacatatatgtcctacttcttagactacccaagtgaccaacaggaatgaacaacatagtcattgttttttcctgtggtaatggtttccaagttggacttttttttcctctaacaagaggccagtacccagttgattagcttacagatatcaactcactgaaagtaatcttttgttccctcatttcacacagcacaaaggttcgttctgatgtttcttcttctttaaggaaatctttagccatagaagtgtcactttttttttttctgcaaaagaattccaagatgaacgggttgaatgaatcatgccagccagggtcacatcctgtcctcagggggcccagtgctcaatagtagattctgcgggagtggagaagcgtcagtggcagctccgctcacttggtgagtgagggatttggctgtgatgagcctcagctccgagctctcaaatgtcctccagccagcatctgcctgcttcccacaaaaggatagaagagaggcaaagtgcgtgtttcataaaacctgcctgcacttttataacccatcaaagaggccatttttaaacacaggtacaatttaaacatgatctttctttgcaaataaatatgttttgtttcatcctgtgttctgcttttctaagcatgacatacttgtgcccattggagaagacacctgtctcttctttctcacaccggtggtgcctcactgagtgtttccgggttcattttccgggagcactgggcctgacactttcacactcttctgactttcgccttgttgcaactgatggagcatgtgtgcttcctctgaggccagcctacaggaggcagctgtttcgcaggtggtgaattcgactttactgtggcattgtgaagagcagggtgcacaggagatgattttttctccatggctttgtaagaaacagccaggaaagttctcagatactttccatgccctttctttgagttgaaactttctatttcccttcagtcagagctctttactatagtagttacaaaaccagtgctttccatggctggccagaaccacagctgctattccttttagaagccatactgctgggtttggcctacttttttcaccgtttctatggaaataaacctcacattgatggaaatagaatgcgtgtttcagaatcatcattcaatatctgaaatgatttgattgtaaattatctcatggtccctgtttgcaaaccaccctcttaagagagaacattgttttggacctaaagcttgaagaacggtttatgtatttttctccttaagtagcattgcattgagtgttaggttcttttccctttttttcattcttggtcttcccaaagcttcttcccacatttcgtttgtgtctgtttccaccattcatagaaaccttggaaccactctcacagcaatgctaggatgtttcatggacctgttaagcattttgatgatacaagacatcctatcaatgccagtcttattttcgctaggactctgcttccacagtaagctcctaaggtgctcacccaacccaggagaaaacaaaattcattaccaaatacaacaggttcagccttcttggtcttccctcagaagccaccgtgtagcaccctggaatgatgcctctttatgccaaggcccaccctttggaattgggagggttttgggtagaatcctgcacttacagaggcccttggggtcattgagaagtggaggaggttggacacagaaggggaggctaaacacaaggtggggaagaaaaaatgtaaccattggcagccagactgaagctagccctttaaaatacggggttggggggttaacatccgctctttggaatgtgctcagtgactgctgcagagttcctgggccaccctaatgtttaccaggtgggcgttgtttatatggttcttattgttatgacaactagaaatcccacagtagactagacagtgctccctaccatttcccatttataggattgaaatcaagatgtaaggagagctggccgggcgcagggctcacgcctgtaatcccagcactttgggaggctgaggtgggtggatcgcctgaggtcaggagtttgagaccagcctgaccaatatggtgaaaccctgtctctgctgaaaatacttaaattagccgggcatggtggcaggcacctgtagtcccagctactcgggagacagagacagaagaaatgcttgaacccaggaggtggaggttccagtgagccgagatcacgccaccgcactctctaacctgggcgacagagcgagactatctc

SEQ ID NO: 22227 - DNA, 2445 bp, Homo sapiens
  source 1..2445: mol_type = unassigned DNA
caatgcaccgcacaccctttactggccggccccgcgctgctctcctaagaccccgcgggccagcgccgcgaccccttcccagcgctcctcgcgctgtgtgcggcgcgtcctctcgccggtgacccggtgtgcgtggggtcgaggcgccgggcggagtggctccgggccgaaacgccatgcggaggggcgagcgcagggacgccggaggtccgcggcccgagtccccggtgcccgcgggcagggcctcgctggaggagccgcctgacgggccgtctgccggccaagccaccgggccgggcgagggccgccgcagcaccgagtccgaggtctacgacgacggcaccaacaccttcttctggcgagcccacaccttaaccgtgctcttcatcctcacctgtacgcttggctatgtgacgctgctggaggaaacacctcaggacacggcctacaacaccaagagaggtattgtggccagtattttggttttcttatgttttggagtcacacaagctaaagacgggccattttccagacctcatccagcttactggaggttttggctctgcgtgagtgtggtctacgagctgtttctcatctttatactcttccagactgtccaggacggccggcagtttctaaagtatgttgaccccaagctgggagtcccactgccagagagagactacgggggaaactgcctcatctacgacccagacaatgagactgacccctttcacaacatctgggacaagttggatggctttgttcccgcgcactttcttggctggtacctgaagaccctgatgatccgagactggtggatgtgcatgatcatcagcgtgatgttcgagttcctggagtacagcctggagcaccagctgcccaacttcagcgagtgctggtgggatcactggatcatggacgtgctcgtctgcaacgggctgggcatctactgcggcatgaagacccttgagtggctgtccctgaagacgtacaagtggcagggcctctggaacattccgacctacaagggcaagatgaagaggatcgccttccagttcacgccgtacagctgggttcgcttcgagtggaagccggcctccagcctgcgtcgctggctggccgtgtgcggcatcatcctggtgttcctgttggcagaactgaacacgttctacctgaagtttgtgctgtggatgcccccggagcactacctggtcctcctgcggctcgtcttcttcgtgaacgtgggtggcgtggccatgcgtgagatctacgacttcatggatgacccgaagccccacaagaagctgggcccgcaggcctggctggtggcggccatcacggccacggagctgctcatcgtggtgaagtacgacccccacacgctcaccctgtccctgcccttctacatctcccagtgctggaccctcggctccgtcctggcgctcacctggaccgtctggcgcttcttcctgcgggacatcacattgaggtacaaggagacccggtggcagaagtggcagaacaaggatgaccagggcagcaccgtcggcaacggggaccagcacccactggggctggacgaagacctgctggggcctggggtggccgagggcgagggagcaccaactccaaactgacctgggccgtggctgcctcgtgagcctcccagagcccaggcctccgtggcctcctcctgtgtgagtcccaccaggagccacgtgcccggccttgccctcaaggttttttgcttttctcctgtgcacctggcgaggctgaaggcgaggggtggaggaggccccagcacagcctcatctccatgtgtacacgtgtgtacgtgtgtatgcgtgtgtgtacgcgtgtgtacgcgcgtgtgtacacatgcgtggccgcctgtggtgtgcacgtgtgctctgggctccgaggcttctccagagctgggagctggctggcgtggcaagggcatgctctggggcagtgtgtccctcaggaaccagggtcctccctcccctttctgcctggtcagccccgtggcctctggcccaccaagctccctgtcacccagccatggtgtggtccaggcagggacatctcggtaccctttctgcactccgtgggccctgggtgcgctgaggcctggaggcgtctacactggctccacatccacttcccccgcagctcgtgtgggcgctcgtccacaaacactccgtggctgagaggcagcggatccaggcagcgatgctgagccacctcctccgagccttcctttcacacagaccaccccggaggacacgtggatgatggggtcagagatcactgagctgcccctcaagggggcctggaacccgggtgctggggtcatgctgcctccgtggctccaaggtgagggtcatcttcacgagcaaagagaaccaataaagtgacaacgaacgtctgaggcttcca

SEQ ID NO: 22228 - DNA, 4458 bp, Homo sapiens
  source 1..4458: mol_type = unassigned DNA
gcagcggcggcagccagaacaggagcagcgatagctcgggtttccggaacaggagccggggcagcggcggcagctcagtgctgggcacctgtgcggagcaggagtagcaggaccacggggtggggtcggcgccagccactctgagccagagaaggaaggggcatctcccagattccactgctgggaataatctccaggggaggtggcgctgaactgggaatactggtgggggtgaacatgtgcaggaacagctagaggcctcggggcaggaaaacatttggttcacgtgtaaacaggcaaggaaagctgtctgggaccatggcagcctcccgcctggactttggggaggtggaaactttcctggacaggcacccagagttgtttgaagattacttgatgcggaaggggaagcaggagatggttgaaaagtggctgcagaggcacagtcagggtcagggggctttaggtccaaggccctctttggctggtaccagcagcttggctcacagcacctgcagaggtggcagcagcgttggtggtggcactggaccaaatggctctgcccacagccagccccttcccggtggcggggactgtggtggggttcccttgagtcccagctgggccggtggcagcaggggcgatgggaacctgcagcggagagcttctcagaaagagctaaggaagagttttgcccgctccaaggccatccacgtgaacaggacctacgatgaacaggtgacctcccgggctcaggaacccctgagtagtgtacgacggagggcacttctccggaaggcaagctccctgccccccaccacagcccatattctcagtgcgctgctggaatcgagagtgaatctgcctcggtatccccctacagccatcgactacaagtgccatctgaaaaagcataatgagcgtcagttctttctggaattggtcaaagatatctccaatgaccttgacctcaccagcctgagctacaagattctcatctttgtctgccttatggtggatgctgaccgctgctctcttttcctggtggaaggggcagctgctggcaagaagaccttggtctccaaattctttgatgtgcatgcaggaacacctctgctgccttgcagcagcacagagaactcaaatgaggtgcaggtcccctggggcaaaggtatcattggctatgtcggggagcatggagaaacggtcaacattcctgatgcctaccaggatcgacgattcaatgatgaaatcgacaagctaactggatacaagacaaaatcattattgtgcatgcctatccgaagcagtgatggtgagattattggtgtggcccaagcgataaataagattcctgaaggagctccatttactgaagatgatgaaaaagttatgcagatgtatcttccattttgtggaatcgccatatctaacgctcagctctttgctgcctcaaggaaagaatatgaaagaagcagagctttgctagaggtggttaatgacctctttgaagaacagactgacctggagaaaattgtcaagaaaataatgcatcgggcccaaactctgctgaaatgtgaacgctgttctgttttactcctagaggacatcgaatcaccagtggtgaaatttaccaaatcctttgaattgatgtccccaaagtgcagtgctgatgctgagaacagtttcaaagaaagcatggagaaatcatcatactccgactggctaataaataacagcattgctgagctggttgcttcaacaggccttccagtgaacatcagtgatgcctaccaggatccgcgctttgatgcagaggcagaccagatatctggttttcacataagatctgttctttgtgtccctatttggaatagcaaccaccaaataattggagtggctcaagtgttaaacagacttgatgggaaaccttttgatgatgcagatcaacgactttttgaggcttttgtcatcttttgtggacttggcatcaacaacacaattatgtatgatcaagtgaagaagtcctgggccaagcagtctgtggctcttgatgtgctatcataccatgcaacatgttcaaaagctgaagttgacaagtttaaggcagccaacatccctctggtgtcagaacttgccatcgatgacattcattttgatgacttttctctcgacgttgatgccatgatcacagctgctctccggatgttcatggagctggggatggtacagaaatttaaaattgactatgagacactgtgtaggtggcttttgacagtgaggaaaaactatcggatggttctataccacaactggagacatgccttcaacgtgtgtcagctgatgttcgcgatgttaaccactgctgggtttcaagacattctgaccgaggtggaaattttagcggtgattgtgggatgcctgtgtcatgacctcgaccacaggggaaccaacaatgccttccaagctaagagtggctctgccctggcccaactctatggaacctctgctaccttggagcatcaccatttcaaccacgccgtgatgatccttcaaagtgagggtcacaatatctttgctaacctgtcctccaaggaatatagtgaccttatgcagcttttgaagcagtcaatattggcaacagacctcacgctgtactttgagaggagaactgaattctttgaacttgtcagtaaaggagaatacgattggaacatcaaaaaccatcgtgatatatttcgatcaatgttaatgacagcctgtgaccttggagccgtgaccaaaccgtgggagatctccagacaggtggcagaacttgtaaccagtgagttcttcgaacaaggagatcgggagagattagagctcaaactcactccttcagcaatttttgatcggaaccggaaggatgaactgcctcggttgcaactggagtggattgatagcatctgcatgcctttgtatcaggcactggtgaaggtcaacgtgaaactgaagccgatgctagattcagtagctacaaacagaagtaagtgggaagagctacaccaaaaacgactgctggcctcaactgcctcatcctcccctgccagtgttatggtagccaaggaagacaggaactaaacctccaggtcagctgcagctgcaaaatgactacagcctgaagggccattttcagtccagcaatgtcatccttttgttcttttagctcagaaagacctaacatctcaaggatgcactgggaagcatgcctgggctttcaccttgaagcatggtcagcagcagagagagcaacgggaaggacaaagaaagaggtggggcagggagcacaccccaggaccctcacttttccctaatgaacacgcatgggctgaaatgaaggctctgggtaggggactgttttggatccaaggacctgtggacagtcggcctacttactctgagctgagggaacactgaacagtaaaagcgtcattagcgctgcttcgttttgtatagggcttttctgtttgttacaagccaaacactgcctgtctttgcttcctgtccctgaatgcctttttgtgccagactgtcccaagaatcctaatttgtattccatagaggtattttatttttaatcctagagcttcttattgatggatcctttagaattgcctacctaaaaggtaaactatactatccttataaatactgatcaatcccagttctccccctaaaaatgaatacatagtaggactatagcaaatgtgtttgatgggtaattctagactgggactatggtacccttttccagagttttaaaattcaaccttcattacagacaaagttttctcccagaaggaatggattgatagattttgattaaagtaagggtggaaggaaatctgtagctggatttaccacaagtgacatctagaaactatagttcacaggacagagcagagccatggagactaagcattgactaccttgagttctcctagtgaggagttctggtataaaatttaagattactaccagtaaccaacttaaagcaaactataggggtccctaattttggatttttccttaagtgtaagaaacaatgcttcaaatgttaagaaataacagtctgggcaaagaacgcatattctataggaagccaggtttacaataggtaagaataaactgtattaagtagatgtaatgactagaaagctgctttgctccctatattgagaaattgtggacatggtatgtgttatccaaagaacattgggctagaagatagatttctatccttagctttggcattattgactggattgacttgaacaagtcacttaacttctacaagcttgtttccttatttgtcaaattagattacactaggaaacgattctcgaacatgttttaaccttacaactctttgttcaaataaatctttcaatgaatccccaacatataaaacgtcaaaaa

SEQ ID NO: 22229 - DNA, 3489 bp, Homo sapiens
  source 1..3489: mol_type = unassigned DNA
cgcttgcagcccagggcgtgaggtgctctttctggatcgccagcctcgaagttgaggcgtggactctggccaggtggctgttccagagcaacatgggagatgctgaagcaggcaagaagacctttattcagaaatgtgctcagtgccacacagtggaaaaaggtgaaaatcacaagactggtccaaatctctggggcctctttggctgaaaaacaggaaaagcaccaggattttcttatacagaggcaaacaaaaacaaaggatcgacgattcaatgatgaaatcgacaagctaactggatacaagacaaaatcattattgtgcatgcctatccgaagcagtgatggtgagattattggtgtggcccaagcgataaataagattcctgaaggagctccatttactgaagatgatgaaaaagttatgcagatgtatcttccattttgtggaatcgccatatctaacgctcagctctttgctgcctcaaggaaagaatatgaaagaagcagagctttgctagaggtggttaatgacctctttgaagaacagactgacctggagaaaattgtcaagaaaataatgcatcgggcccaaactctgctgaaatgtgaacgctgttctgttttactcctagaggacatcgaatcaccagtggtgaaatttaccaaatcctttgaattgatgtccccaaagtgcagtgctgatgctgagaacagtttcaaagaaagcatggagaaatcatcatactccgactggctaataaataacagcattgctgagctggttgcttcaacaggccttccagtgaacatcagtgatgcctaccaggatccgcgctttgatgcagaggcagaccagatatctggttttcacataagatctgttctttgtgtccctatttggaatagcaaccaccaaataattggagtggctcaagtgttaaacagacttgatgggaaaccttttgatgatgcagatcaacgactttttgaggcttttgtcatcttttgtggacttggcatcaacaacacaattatgtatgatcaagtgaagaagtcctgggccaagcagtctgtggctcttgatgtgctatcataccatgcaacatgttcaaaagctgaagttgacaagtttaaggcagccaacatccctctggtgtcagaacttgccatcgatgacattcattttgatgacttttctctcgacgttgatgccatgatcacagctgctctccggatgttcatggagctggggatggtacagaaatttaaaattgactatgagacactgtgtaggtggcttttgacagtgaggaaaaactatcggatggttctataccacaactggagacatgccttcaacgtgtgtcagctgatgttcgcgatgttaaccactgctgggtttcaagacattctgaccgaggtggaaattttagcggtgattgtgggatgcctgtgtcatgacctcgaccacaggggaaccaacaatgccttccaagctaagagtggctctgccctggcccaactctatggaacctctgctaccttggagcatcaccatttcaaccacgccgtgatgatccttcaaagtgagggtcacaatatctttgctaacctgtcctccaaggaatatagtgaccttatgcagcttttgaagcagtcaatattggcaacagacctcacgctgtactttgagaggagaactgaattctttgaacttgtcagtaaaggagaatacgattggaacatcaaaaaccatcgtgatatatttcgatcaatgttaatgacagcctgtgaccttggagccgtgaccaaaccgtgggagatctccagacaggtggcagaacttgtaaccagtgagttcttcgaacaaggagatcgggagagattagagctcaaactcactccttcagcaatttttgatcggaaccggaaggatgaactgcctcggttgcaactggagtggattgatagcatctgcatgcctttgtatcaggcactggtgaaggtcaacgtgaaactgaagccgatgctagattcagtagctacaaacagaagtaagtgggaagagctacaccaaaaacgactgctggcctcaactgcctcatcctcccctgccagtgttatggtagccaaggaagacaggaactaaacctccaggtcagctgcagctgcaaaatgactacagcctgaagggccattttcagtccagcaatgtcatccttttgttcttttagctcagaaagacctaacatctcaaggatgcactgggaagcatgcctgggctttcaccttgaagcatggtcagcagcagagagagcaacgggaaggacaaagaaagaggtggggcagggagcacaccccaggaccctcacttttccctaatgaacacgcatgggctgaaatgaaggctctgggtaggggactgttttggatccaaggacctgtggacagtcggcctacttactctgagctgagggaacactgaacagtaaaagcgtcattagcgctgcttcgttttgtatagggcttttctgtttgttacaagccaaacactgcctgtctttgcttcctgtccctgaatgcctttttgtgccagactgtcccaagaatcctaatttgtattccatagaggtattttatttttaatcctagagcttcttattgatggatcctttagaattgcctacctaaaaggtaaactatactatccttataaatactgatcaatcccagttctccccctaaaaatgaatacatagtaggactatagcaaatgtgtttgatgggtaattctagactgggactatggtacccttttccagagttttaaaattcaaccttcattacagacaaagttttctcccagaaggaatggattgatagattttgattaaagtaagggtggaaggaaatctgtagctggatttaccacaagtgacatctagaaactatagttcacaggacagagcagagccatggagactaagcattgactaccttgagttctcctagtgaggagttctggtataaaatttaagattactaccagtaaccaacttaaagcaaactataggggtccctaattttggatttttccttaagtgtaagaaacaatgcttcaaatgttaagaaataacagtctgggcaaagaacgcatattctataggaagccaggtttacaataggtaagaataaactgtattaagtagatgtaatgactagaaagctgctttgctccctatattgagaaattgtggacatggtatgtgttatccaaagaacattgggctagaagatagatttctatccttagctttggcattattgactggattgacttgaacaagtcacttaacttctacaagcttgtttccttatttgtcaaattagattacactaggaaacgattctcgaacatgttttaaccttacaactctttgttcaaataaatctttcaatgaatccccaacatataaaacgtcaaaaa

SEQ ID NO: 22230 - DNA, 1781 bp, Homo sapiens
  source 1..1781: mol_type = unassigned DNA
tggaaagatgttacttcatctcccaggtttgctcactgcaaatacaatcctgagaactgaactagggccttaaagtcctgacatgcatggcttggttttgtggattgcctctctcaacaggtggtgaaatttaccaaatcctttgaattgatgtccccaaagtgcagtgctgatgctgagaacagtttcaaagaaagcatggagaaatcatcatactccgactggctaataaataacagcattgctgagctggttgcttcaacaggccttccagtgaacatcagtgatgcctaccaggatccgcgctttgatgcagaggcagaccagatatctggttttcacataagatctgttctttgtgtccctatttggaatagcaaccaccaaataattggagtggctcaagtgttaaacagacttgatgggaaaccttttgatgatgcagatcaacgactttttgaggcttttgtcatcttttgtggacttggcatcaacaacacaattatgtatgatcaagtgaagaagtcctgggccaagcagtctgtggctcttgatgtgctatcataccatgcaacatgttcaaaagctgaagttgacaagtttaaggcagccaacatccctctggtgtcagaacttgccatcgatgacattcattttgatgacttttctctcgacgttgatgccatgatcacagctgctctccggatgttcatggagctggggatggtacagaaatttaaaattgactatgagacactgtgtaggtggcttttgacagtgaggaaaaactatcggatggttctataccacaactggagacatgccttcaacgtgtgtcagctgatgttcgcgatgttaaccactgctgggtttcaagacattctgaccgaggtggaaattttagcggtgattgtgggatgcctgtgtcatgacctcgaccacaggggaaccaacaatgccttccaagctaagagtggctctgccctggcccaactctatggaacctctgctaccttggagcatcaccatttcaaccacgccgtgatgatccttcaaagtgagggtcacaatatctttgctaacctgtcctccaaggaatatagtgaccttatgcagcttttgaagcagtcaatattggcaacagacctcacgctgtactttgagaggagaactgaattctttgaacttgtcagtaaaggagaatacgattggaacatcaaaaaccatcgtgatatatttcgatcaatgttaatgacagcctgtgaccttggagccgtgaccaaaccgtgggagatctccagacaggtggcagaacttgtaaccagtgagttcttcgaacaaggagatcgggagagattagagctcaaactcactccttcagcaatttttgatcggaaccggaaggatgaactgcctcggttgcaactggagtggattgatagcatctgcatgcctttgtatcaggcactggtgaaggtcaacgtgaaactgaagccgatgctagattcagtagctacaaacagaagtaagtgggaagagctacaccaaaaacgactgctggcctcaactgcctcatcctcccctgccagtgttatggtagccaaggaagacaggaactaaacctccaggtcagctgcagctgcaaaatgactacagcctgaagggccattttcagtccagcaatgtcatccttttgttcttttagctcagaaagacctaacatctcaaggatgcactgggaagcatgcctgggctttcaccttgaagcatggtcagcagca

SEQ ID NO: 22231 - DNA, 2102 bp, Homo sapiens
  source 1..2102: mol_type = unassigned DNA
aaaagtccactgtgtgttgggaatagattatgaagggctttgagtgtaggccctgtaagcaataggaagccatggaacagccagaaaggttatgcagatgtatcttccattttgtggaatcgccatatctaacgctcagctctttgctgcctcaaggaaagaatatgaaagaagcagagctttgctagaggtggttaatgacctctttgaagaacagactgacctggagaaaattgtcaagaaaataatgcatcgggcccaaactctgctgaaatgtgaacgctgttctgttttactcctagaggacatcgaatcaccagtggtgaaatttaccaaatcctttgaattgatgtccccaaagtgcagtgctgatgctgagaacagtttcaaagaaagcatggagaaatcatcatactccgactggctaataaataacagcattgctgagctggttgcttcaacaggccttccagtgaacatcagtgatgcctaccaggatccgcgctttgatgcagaggcagaccagatatctggttttcacataagatctgttctttgtgtccctatttggaatagcaaccaccaaataattggagtggctcaagtgttaaacagacttgatgggaaaccttttgatgatgcagatcaacgactttttgaggcttttgtcatcttttgtggacttggcatcaacaacacaattatgtatgatcaagtgaagaagtcctgggccaagcagtctgtggctcttgatgtgctatcataccatgcaacatgttcaaaagctgaagttgacaagtttaaggcagccaacatccctctggtgtcagaacttgccatcgatgacattcattttgatgacttttctctcgacgttgatgccatgatcacagctgctctccggatgttcatggagctggggatggtacagaaatttaaaattgactatgagacactgtgtaggtggcttttgacagtgaggaaaaactatcggatggttctataccacaactggagacatgccttcaacgtgtgtcagctgatgttcgcgatgttaaccactgctgggtttcaagacattctgaccgaggtggaaattttagcggtgattgtgggatgcctgtgtcatgacctcgaccacaggggaaccaacaatgccttccaagctaagagtggctctgccctggcccaactctatggaacctctgctaccttggagcatcaccatttcaaccacgccgtgatgatccttcaaagtgagggtcacaatatctttgctaacctgtcctccaaggaatatagtgaccttatgcagcttttgaagcagtcaatattggcaacagacctcacgctgtactttgagaggagaactgaattctttgaacttgtcagtaaaggagaatacgattggaacatcaaaaaccatcgtgatatatttcgatcaatgttaatgacagcctgtgaccttggagccgtgaccaaaccgtgggagatctccagacaggtggcagaacttgtaaccagtgagttcttcgaacaaggagatcgggagagattagagctcaaactcactccttcagcaatttttgatcggaaccggaaggatgaactgcctcggttgcaactggagtggattgatagcatctgcatgcctttgtatcaggcactggtgaaggtcaacgtgaaactgaagccgatgctagattcagtagctacaaacagaagtaagtgggaagagctacaccaaaaacgactgctggcctcaactgcctcatcctcccctgccagtgttatggtagccaaggaagacaggaactaaacctccagctcagaaagacctaacatctcaaggatgcactgggaagcatgcctgggctttcaccttgaagcatggtcagcagcagagagagcaacgggaaggacaaagaaagaggtggggcagggagcacaccccaggaccctcacttttccctaatgaacacgcatgggctgaaatgaaggctctgggtaggggactgttttggatccaaggacctgtggacagtcggcctacttactctgagctgagggaacactgaacagtaaaagcgtcattagcgctg

SEQ ID NO: 22232 - DNA, 2449 bp, Homo sapiens
  source 1..2449: mol_type = unassigned DNA
gcgcgcgtccggctgcgcttgcagcccagggcgtgaggtgctctttctggatcgccagcctcgaagttgaggcgtggactctggccaggtggctgttccagagcaacatgggagatgctgaagcaggcaagaagacctttattcagaaatgtgctcagtgccacacagtggaaaaaggtgaaaatcacaagactggtccaaatctctggggcctctttggctgaaaaacaggaaaagcaccaggattttcttatacagaggcaaacaaaaacaaaggatcgacgattcaatgatgaaatcgacaagctaactggatacaagacaaaatcattattgtgcatgcctatccgaagcagtgatggtgagattattggtgtggcccaagcgataaataagattcctgaaggagctccatttactgaagatgatgaaaaagttatgcagatgtatcttccattttgtggaatcgccatatctaacgctcagctctttgctgcctcaaggaaagaatatgaaagaagcagagctttgctagaggtggttaatgacctctttgaagaacagactgacctggagaaaattgtcaagaaaataatgcatcgggcccaaactctgctgaaatgtgaacgctgttctgttttactcctagaggacatcgaatcaccagtggtgaaatttaccaaatcctttgaattgatgtccccaaagtgcagtgctgatgctgagaacagtttcaaagaaagcatggagaaatcatcatactccgactggctaataaataacagcattgctgagctggttgcttcaacaggccttccagtgaacatcagtgatgcctaccaggatccgcgctttgatgcagaggcagaccagatatctggttttcacataagatctgttctttgtgtccctatttggaatagcaaccaccaaataattggagtggctcaagtgttaaacagacttgatgggaaaccttttgatgatgcagatcaacgactttttgaggcttttgtcatcttttgtggacttggcatcaacaacacaattatgtatgatcaagtgaagaagtcctgggccaagcagtctgtggctcttgatgtgctatcataccatgcaacatgttcaaaagctgaagttgacaagtttaaggcagccaacatccctctggtgtcagaacttgccatcgatgacattcattttgatgacttttctctcgacgttgatgccatgatcacagctgctctccggatgttcatggagctggggatggtacagaaatttaaaattgactatgagacactgtgtaggtggcttttgacagtgaggaaaaactatcggatggttctataccacaactggagacatgccttcaacgtgtgtcagctgatgttcgcgatgttaaccactgctgggtttcaagacattctgaccgaggtggaaattttagcggtgattgtgggatgcctgtgtcatgacctcgaccacaggggaaccaacaatgccttccaagctaagagtggctctgccctggcccaactctatggaacctctgctaccttggagcatcaccatttcaaccacgccgtgatgatccttcaaagtgagggtcacaatatctttgctaacctgtcctccaaggaatatagtgaccttatgcagcttttgaagcagtcaatattggcaacagacctcacgctgtactttgagaggagaactgaattctttgaacttgtcagtaaaggagaatacgattggaacatcaaaaaccatcgtgatatatttcgatcaatgttaatgacagcctgtgaccttggagccgtgaccaaaccgtgggagatctccagacaggtggcagaacttgtaaccagtgagttcttcgaacaaggagatcgggagagattagagctcaaactcactccttcagcaatttttgatcggaaccggaaggatgaactgcctcggttgcaactggagtggattgatagcatctgcatgcctttgtatcaggcactggtgaaggtcaacgtgaaactgaagccgatgctagattcagtagctacaaacagaagtaagtgggaagagctacaccaaaaacgactgctggcctcaactgcctcatcctcccctgccagtgttatggtagccaaggaagacaggaactaaacctccagctcagaaagacctaacatctcaaggatgcactgggaagcatgcctgggctttcaccttgaagcatggtcagcagcagagagagcaacgggaaggacaaagaaagaggtggggcagggagcacaccccaggaccctcacttttccctaatgaacacgcatgggctgaaatgaaggctctgggtaggggactgttttggatccaaggacctgtggacagtcggcctacttactctgagctgagggaacactgaacagtaaaagcgtcattagcgctg

SEQ ID NO: 22233 - DNA, 1869 bp, Homo sapiens
  source 1..1869: mol_type = unassigned DNA
caagaaatgtagagggagaagagtgctggaagatgagtcaagaaaagtccactgtgtgttgggaatagattatgaagggctttgagtgtaggccctgtaagcaataggaagccatggaacagccagaaaggttatgcagatgtatcttccattttgtggaatcgccatatctaacgctcagctctttgctgcctcaaggaaagaatatgaaagaagcagagctttgctagaggtggttaatgacctctttgaagaacagactgacctggagaaaattgtcaagaaaataatgcatcgggcccaaactctgctgaaatgtgaacgctgttctgttttactcctagaggacatcgaatcaccagtggtgaaatttaccaaatcctttgaattgatgtccccaaagtgcagtgctgatgctgagaacagtttcaaagaaagcatggagaaatcatcatactccgactggctaataaataacagcattgctgagctggttgcttcaacaggccttccagtgaacatcagtgatgcctaccaggatccgcgctttgatgcagaggcagaccagatatctggttttcacataagatctgttctttgtgtccctatttggaatagcaaccaccaaataattggagtggctcaagtgttaaacagacttgatgggaaaccttttgatgatgcagatcaacgactttttgaggcttttgtcatcttttgtggacttggcatcaacaacacaattatgtatgatcaagtgaagaagtcctgggccaagcagtctgtggctcttgatgtgctatcataccatgcaacatgttcaaaagctgaagttgacaagtttaaggcagccaacatccctctggtgtcagaacttgccatcgatgacattcattttgatgacttttctctcgacgttgatgccatgatcacagctgctctccggatgttcatggagctggggatggtacagaaatttaaaattgactatgagacactgtgtaggtggcttttgacagtgaggaaaaactatcggatggttctataccacaactggagacatgccttcaacgtgtgtcagctgatgttcgcgatgttaaccactgctgggtttcaagacattctgaccgaggtggaaattttagcggtgattgtgggatgcctgtgtcatgacctcgaccacaggggaaccaacaatgccttccaagctaagagtggctctgccctggcccaactctatggaacctctgctaccttggagcatcaccatttcaaccacgccgtgatgatccttcaaagtgagggtcacaatatctttgctaacctgtcctccaaggaatatagtgaccttatgcagcttttgaagcagtcaatattggcaacagacctcacgctgtactttgagaggagaactgaattctttgaacttgtcagtaaaggagaatacgattggaacatcaaaaaccatcgtgatatatttcgatcaatgttaatgacagcctgtgaccttggagccgtgaccaaaccgtgggagatctccagacaggtggcagaacttgtaaccagtgagttcttcgaacaaggagatcgggagagattagagctcaaactcactccttcagcaatttttgatcggaaccggaaggatgaactgcctcggttgcaactggagtggattgatagcatctgcatgcctttgtatcaggcactggtgaaggtcaacgtgaaactgaagccgatgctagattcagtagctacaaacagaagtaagtgggaagagctacaccaaaaacgactgctggcctcaactgcctcatcctcccctgccagtgttatggtagccaaggaagacaggaactaaacctccag

SEQ ID NO: 22234 - DNA, 1204 bp, Homo sapiens
  source 1..1204: mol_type = unassigned DNA
agtgctgccccttgttgaggaaaggaagatatcaatgttaatgacagcctgtgaccttggagccgtgaccaaaccgtgggagatctccagacaggtggcagaacttgtaaccagtgagttcttcgaacaaggagatcgggagagattagagctcaaactcactccttcagcaatttttgatcggaaccggaaggatgaactgcctcggttgcaactggagtggattgatagcatctgcatgcctttgtatcaggcactggtgaaggtcaacgtgaaactgaagccgatgctagattcagtagctacaaacagaagtaagtgggaagagctacaccaaaaacgactgctggcctcaactgcctcatcctcccctgccagtgttatggtagccaaggaagacaggaactaaacctccaggtcagctgcagctgcaaaatgactacagcctgaagggccattttcagtccagcaatgtcatccttttgttcttttagctcagaaagacctaacatctcaaggatgcactgggaagcatgcctgggctttcaccttgaagcatggtcagcagcagagagagcaacgggaaggacaaagaaagaggtggggcagggagcacaccccaggaccctcacttttccctaatgaacacgcatgggctgaaatgaaggctctgggtaggggactgttttggatccaaggacctgtggacagtcggcctacttactctgagctgagggaacactgaacagtaaaagcgtcattagcgctgcttcgttttgtatagggcttttctgtttgttacaagccaaacactgcctgtctttgcttcctgtccctgaatgcctttttgtgccagactgtcccaagaatcctaatttgtattccatagaggtattttatttttaatcctagagcttcttattgatggatcctttagaattgcctacctaaaaggtaaactatactatccttataaatactgatcaatcccagttctccccctaaaaatgaatacatagtaggactatagcaaatgtgtttgatgggtaattctagactgggactatggtacccttttccagagttttaaaattcaaccttcattacagacaaagttttctcccagaaggaatggattgatagattttgattaaagtaagggtggaaggaaatctgtagctggatttaccacaagtgacatcta

SEQ ID NO: 22235 - DNA, 1638 bp, Homo sapiens
  source 1..1638: mol_type = unassigned DNA
atggggtctagtgccacagagattgaagaattggaaaacaccacttttaagtatcttacaggagaacagactgaaaaaatgtggcagcgcctgaaaggaatactaagatgcttggtgaagcagctggaaagaggtgatgttaacgtcgtcgacttaaagaagaatattgaatatgcggcatctgtgctggaagcagtttatatcgatgaaacaagaagacttctggatactgaagatgagctcagtgacattcagactgactcagtcccatctgaagtccgggactggttggcttctacctttacacggaaaatggggatgacaaaaaagaaacctgaggaaaaaccaaaatttcggagcattgtgcatgctgttcaagctggaatttttgtggaaagaatgtaccgaaaaacatatcatatggttggtttggcatatccagcagctgtcatcgtaacattaaaggatgttgataaatggtctttcgatgtatttgccctaaatgaagcaagtggagagcatagtctgaagtttatgatttatgaactgtttaccagatatgatcttatcaaccgtttcaagattcctgtttcttgcctaatcacctttgcagaagctttagaagttggttacagcaagtacaaaaatccatatcacaatttgattcatgcagctgatgtcactcaaactgtgcattacataatgcttcatacaggtatcatgcactggctcactgaactggaaattttagcaatggtctttgctgctgccattcatgattatgagcatacagggacaacaaacaactttcacattcagacaaggtcagatgttgccattttgtataatgatcgctctgtccttgagaatcaccacgtgagtgcagcttatcgacttatgcaagaagaagaaatgaatatcttgataaatttatccaaagatgactggagggatcttcggaacctagtgattgaaatggttttatctacagacatgtcaggtcacttccagcaaattaaaaatataagaaacagtttgcagcagcctgaagggattgacagagccaaaaccatgtccctgattctccacgcagcagacatcagccacccagccaaatcctggaagctgcattatcggtggaccatggccctaatggaggagtttttcctgcagggagataaagaagctgaattagggcttccattttccccactttgtgatcggaagtcaaccatggtggcccagtcacaaataggtttcatcgatttcatagtagagccaacattttctcttctgacagactcaacagagaaaattgttattcctcttatagaggaagcctcaaaagccgaaacttcttcctatgtggcaagcagctcaaccaccattgtggggttacacattgctgatgcactaagacgatcaaatacaaaaggctccatgagtgatgggtcctattccccagactactcccttgcagcagtggacctgaagagtttcaagaacaacctggtggacatcattcagcagaacaaagagaggtggaaagagttagctgcacaaggtgaatctgatcttcataagaactcagaagacttagtaaatgctgaagaaaaacatgatgagacacattcatag

SEQ ID NO: 22236 - DNA, 1991 bp, Homo sapiens
  source 1..1991: mol_type = unassigned DNA
atgggcaaaaagataaacaaactattttgctttaattttctagttcagtgttttaggggtaaatcaaaaccatccaaatgtcagatcagaaagaaagttaaaaatcatatagaaagacttctggatactgaagatgagctcagtgacattcagactgactcagtcccatctgaagtccgggactggttggcttctacctttacacggaaaatggggatgacaaaaaagaaacctgaggaaaaaccaaaatttcggagcattgtgcatgctgttcaagctggaatttttgtggaaagaatgtaccgaaaaacatatcatatggttggtttggcatatccagcagctgtcatcgtaacattaaaggatgttgataaatggtctttcgatgtatttgccctaaatgaagcaagtggagagcatagtctgaagtttatgatttatgaactgtttaccagatatgatcttatcaaccgtttcaagattcctgtttcttgcctaatcacctttgcagaagctttagaagttggttacagcaagtacaaaaatccatatcacaatttgattcatgcagctgatgtcactcaaactgtgcattacataatgcttcatacaggtatcatgcactggctcactgaactggaaattttagcaatggtctttgctgctgccattcatgattatgagcatacagggacaacaaacaactttcacattcagacaaggtcagatgttgccattttgtataatgatcgctctgtccttgagaatcaccacgtgagtgcagcttatcgacttatgcaagaagaagaaatgaatatcttgataaatttatccaaagatgactggagggatcttcggaacctagtgattgaaatggttttatctacagacatgtcaggtcacttccagcaaattaaaaatataagaaacagtttgcagcagcctgaagggattgacagagccaaaaccatgtccctgattctccacgcagcagacatcagccacccagccaaatcctggaagctgcattatcggtggaccatggccctaatggaggagtttttcctgcagggagataaagaagctgaattagggcttccattttccccactttgtgatcggaagtcaaccatggtggcccagtcacaaataggtttcatcgatttcatagtagagccaacattttctcttctgacagactcaacagagaaaattgttattcctcttatagaggaagcctcaaaagccgaaacttcttcctatgtggcaagcagctcaaccaccattgtggggttacacattgctgatgcactaagacgatcaaatacaaaaggctccatgagtgatgggtcctattccccagactactcccttgcagcagtggacctgaagagtttcaagaacaacctggtggacatcattcagcagaacaaagagaggtggaaagagttagctgcacaaggtgaatctgatcttcataagaactcagaagacttagtaaatgctgaagaaaaacatgatgagacacattcataggcccgaaacaccttaaagacttctgtcattttaaacatgagaggacaatgaaatcagcatgaaaacatcctaaattctcaactttccacaaagctatggctcttctttcaacatagaattggattgggccattttaattgactcctatacaaggaattaagaagaacataaattttgagctagtaactctggccaaataaatacactcaagtttttatcagagtttttggccagtgcttctgccatttttttccctccacaatttggccttcttcaatcaagccagataaatttttgagacaaaagtcagacagtttttaatttttcttgctttgaaccctgtcataatgactgtgcaatacatgtgcagaagatgaggtattttaaaatttacttccttgcactgtcttacacagagtgctataactataaatttttcaaggtcttaaataaaa

SEQ ID NO: 22237 - DNA, 2263 bp, Homo sapiens
  source 1..2263: mol_type = unassigned DNA
ccagcatgtggaaggagagctctcatggctgcaataacttagggagttcctacctggatgacactggggtaggaagttttctgtttgttttgttctgtttcggagggtcccgtgcacttctcttgcctggatcaacgtgactcttggtggtttttgcacaccctgctctgtgggggagtgccccaacgtgcctgtcttatgtggcctctatggacacactgctcagctggcagagaacagggaagttttctcccagcacccaaaaagagaaagaggaaactactttttctttctgggctccttgcagcacaatagatcaggataagcttccacatttcctctctggagtttctggagtggtttccaggaagaagttaaaccttcacctttaaatggatgaccatgtcacaatcaggaagaaacatctccaaagacccatctttagactaagatgcttggtgaagcagctggaaagaggtgatgttaacgtcgtcgacttaaagaagaatattgaatatgcggcatctgtgctggaagcagtttatatcgatgaaacaagaagacttctggatactgaagatgagctcagtgacattcagactgactcagtcccatctgaagtccgggactggttggcttctacctttacacggaaaatggggatgacaaaaaagaaacctgaggaaaaaccaaaatttcggagcattgtgcatgctgttcaagctggaatttttgtggaaagaatgtaccgaaaaacatatcatatggttggtttggcatatccagcagctgtcatcgtaacattaaaggatgttgataaatggtctttcgatgtatttgccctaaatgaagcaagtggagagcatagtctgaagtttatgatttatgaactgtttaccagatatgatcttatcaaccgtttcaagattcctgtttcttgcctaatcacctttgcagaagctttagaagttggttacagcaagtacaaaaatccatatcacaatttgattcatgcagctgatgtcactcaaactgtgcattacataatgcttcatacaggtatcatgcactggctcactgaactggaaattttagcaatggtctttgctgctgccattcatgattatgagcatacagggacaacaaacaactttcacattcagacaaggtcagatgttgccattttgtataatgatcgctctgtccttgagaatcaccacgtgagtgcagcttatcgacttatgcaagaagaagaaatgaatatcttgataaatttatccaaagatgactggagggatcttcggaacctagtgattgaaatggttttatctacagacatgtcaggtcacttccagcaaattaaaaatataagaaacagtttgcagcagcctgaagggattgacagagccaaaaccatgtccctgattctccacgcagcagacatcagccacccagccaaatcctggaagctgcattatcggtggaccatggccctaatggaggagtttttcctgcagggagataaagaagctgaattagggcttccattttccccactttgtgatcggaagtcaaccatggtggcccagtcacaaataggtttcatcgatttcatagtagagccaacattttctcttctgacagactcaacagagaaaattgttattcctcttatagaggaagcctcaaaagccgaaacttcttcctatgtggcaagcagctcaaccaccattgtggggttacacattgctgatgcactaagacgatcaaatacaaaaggctccatgagtgatgggtcctattccccagactactcccttgcagcagtggacctgaagagtttcaagaacaacctggtggacatcattcagcagaacaaagagaggtggaaagagttagctgcacaagaagcaagaaccagttcacagaagtgtgagtttattcatcagtaaacacctttaagtaaaacctcgtgcatggtggcagctctaatttgaccaaaagacttggagattttgattatgcttgctggaaatctaccctgtcctgtgtgagacaggaaatctatttttgcagattgctcaataagcatcatgagccacataaataacagctgtaaactccttaattcaccgggctcaactgctaccgaacagattcatctagtggctacatcagcaccttgtgctttcagatatctgtttcaatggcattttgtggcatttgtctttaccgagtgccaataaattttctttgagcagct

SEQ ID NO: 22238 - DNA, 1608 bp, Homo sapiens
  source 1..1608: mol_type = unassigned DNA
atggggtctagtgccacagagattgaagaattggaaaacaccacttttaagtatcttacaggagaacagactgaaaaaatgtggcagcgcctgaaaggaatactaagatgcttggtgaagcagctggaaagaggtgatgttaacgtcgtcgacttaaagaagaatattgaatatgcggcatctgtgctggaagcagtttatatcgatgaaacaagaagacttctggatactgaagatgagctcagtgacattcagactgactcagtcccatctgaagtccgggactggttggcttctacctttacacggaaaatggggatgacaaaaaagaaacctgaggaaaaaccaaaatttcggagcattgtgcatgctgttcaagctggaatttttgtggaaagaatgtaccgaaaaacatatcatatggttggtttggcatatccagcagctgtcatcgtaacattaaaggatgttgataaatggtctttcgatgtatttgccctaaatgaagcaagtggagagcatagtctgaagtttatgatttatgaactgtttaccagatatgatcttatcaaccgtttcaagattcctgtttcttgcctaatcacctttgcagaagctttagaagttggttacagcaagtacaaaaatccatatcacaatttgattcatgcagctgatgtcactcaaactgtgcattacataatgcttcatacaggtatcatgcactggctcactgaactggaaattttagcaatggtctttgctgctgccattcatgattatgagcatacagggacaacaaacaactttcacattcagacaaggtcagatgttgccattttgtataatgatcgctctgtccttgagaatcaccacgtgagtgcagcttatcgacttatgcaagaagaagaaatgaatatcttgataaatttatccaaagatgactggagggatcttcggaacctagtgattgaaatggttttatctacagacatgtcaggtcacttccagcaaattaaaaatataagaaacagtttgcagcagcctgaagggattgacagagccaaaaccatgtccctgattctccacgcagcagacatcagccacccagccaaatcctggaagctgcattatcggtggaccatggccctaatggaggagtttttcctgcagggagataaagaagctgaattagggcttccattttccccactttgtgatcggaagtcaaccatggtggcccagtcacaaataggtttcatcgatttcatagtagagccaacattttctcttctgacagactcaacagagaaaattgttattcctcttatagaggaagcctcaaaagccgaaacttcttcctatgtggcaagcagctcaaccaccattgtggggttacacattgctgatgcactaagacgatcaaatacaaaaggctccatgagtgatgggtcctattccccagactactcccttgcagcagtggacctgaagagtttcaagaacaacctggtggacatcattcagcagaacaaagagaggtggaaagagttagctgcacaagaagcaagaaccagttcacagaagtgtgagtttattcatcagtaa

SEQ ID NO: 22239 - DNA, 2034 bp, Homo sapiens
  source 1..2034: mol_type = unassigned DNA
ggagcttgaccagcatgtggaaggagagctctcatggctgcaataacttagggagttcctacctggatgacactggggtaggaagttttctgtttgttttgttctgtttcggagggtcccgtgcacttctcttgcctggatcaacgtgactcttggtggtttttgcacaccctgctctgtgggggagtgccccaacgtgcctgtcttatgtggcctctatggacacactgctcagctggcagagaacagggaagttttctcccagcacccaaaaagagaaagaggaaactactttttctttctgggctccttgcagcacaatagatcaggataagcttccacatttcctctctggagtttctggagtggtttccaggaagaagttaaaccttcacctttaaatggatgaccatgtcacaatcaggaagaaacatctccaaagacccatctttagactaagatgcttggtgaagcagctggaaagaggtgatgttaacgtcgtcgacttaaagaagaatattgaatatgcggcatctgtgctggaagcagtttatatcgatgaaacaagaagacttctggatactgaagatgagctcagtgacattcagactgactcagtcccatctgaagtccgggactggttggcttctacctttacacggaaaatggggatgacaaaaaagaaacctgaggaaaaaccaaaatttcggagcattgtgcatgctgttcaagctggaatttttgtggaaagaatgtaccgaaaaacatatcatatggttggtttggcatatccagcagctgtcatcgtaacattaaaggatgttgataaatggtctttcgatgtatttgccctaaatgaagcaagtggagagcatagtctgaagtttatgatttatgaactgtttaccagatatgatcttatcaaccgtttcaagattcctgtttcttgcctaatcacctttgcagaagctttagaagttggttacagcaagtacaaaaatccatatcacaatttgattcatgcagctgatgtcactcaaactgtgcattacataatgcttcatacaggtatcatgcactggctcactgaactggaaattttagcaatggtctttgctgctgccattcatgattatgagcatacagggacaacaaacaactttcacattcagacaaggtcagatgttgccattttgtataatgatcgctctgtccttgagaatcaccacgtgagtgcagcttatcgacttatgcaagaagaagaaatgaatatcttgataaatttatccaaagatgactggagggatcttcggaacctagtgattgaaatggttttatctacagacatgtcaggtcacttccagcaaattaaaaatataagaaacagtttgcagcagcctgaagggattgacagagccaaaaccatgtccctgattctccacgcagcagacatcagccacccagccaaatcctggaagctgcattatcggtggaccatggccctaatggaggagtttttcctgcagggagataaagaagctgaattagggcttccattttccccactttgtgatcggaagtcaaccatggtggcccagtcacaaataggtttcatcgatttcatagtagagccaacattttctcttctgacagactcaacagagaaaattgttattcctcttatagaggaagcctcaaaagccgaaacttcttcctatgtggcaagcagctcaaccaccattgtggggttacacattgctgatgcactaagacgatcaaatacaaaaggctccatgagtgatgggtcctattccccagactactcccttgcagcagtggacctgaagagtttcaagaacaacctggtggacatcattcagcagaacaaagagaggtggaaagagttagctgcacaaggtgaatctgatcttcataagaactcagaagacttagtaaatgctgaagaaaaacatgatgagacacattcataggcccgaaacaccttaaagacttctgtcattttaaacatgagag

SEQ ID NO: 22240 - DNA, 2000 bp, Homo sapiens
  source 1..2000: mol_type = unassigned DNA
gaattctgatgtgcttcagtgcacagaacagtaacagatgagctgcttttggggagagcttgagtactcagtcggagcatcatcatggggtctagtgccacagagattgaagaattggaaaacaccacttttaagtatcttacaggagaacagactgaaaaaatgtggcagcgcctgaaaggaatactaagatgcttggtgaagcagctggaaagaggtgatgttaacgtcgtcgacttaaagaagaatattgaatatgcggcatctgtgctggaagcagtttatatcgatgaaacaagaagacttctggatactgaagatgagctcagtgacattcagactgactcagtcccatctgaagtccgggactggttggcttctacctttacacggaaaatggggatgacaaaaaagaaacctgaggaaaaaccaaaatttcggagcattgtgcatgctgttcaagctggaatttttgtggaaagaatgtaccgaaaaacatatcatatggttggtttggcatatccagcagctgtcatcgtaacattaaaggatgttgataaatggtctttcgatgtatttgccctaaatgaagcaagtggagagcatagtctgaagtttatgatttatgaactgtttaccagatatgatcttatcaaccgtttcaagattcctgtttcttgcctaatcacctttgcagaagctttagaagttggttacagcaagtacaaaaatccatatcacaatttgattcatgcagctgatgtcactcaaactgtgcattacataatgcttcatacaggtatcatgcactggctcactgaactggaaattttagcaatggtctttgctgctgccattcatgattatgagcatacagggacaacaaacaactttcacattcagacaaggtcagatgttgccattttgtataatgatcgctctgtccttgagaatcaccacgtgagtgcagcttatcgacttatgcaagaagaagaaatgaatatcttgataaatttatccaaagatgactggagggatcttcggaacctagtgattgaaatggttttatctacagacatgtcaggtcacttccagcaaattaaaaatataagaaacagtttgcagcagcctgaagggattgacagagccaaaaccatgtccctgattctccacgcagcagacatcagccacccagccaaatcctggaagctgcattatcggtggaccatggccctaatggaggagtttttcctgcagggagataaagaagctgaattagggcttccattttccccactttgtgatcggaagtcaaccatggtggcccagtcacaaataggtttcatcgatttcatagtagagccaacattttctcttctgacagactcaacagagaaaattgttattcctcttatagaggaagcctcaaaagccgaaacttcttcctatgtggcaagcagctcaaccaccattgtggggttacacattgctgatgcactaagacgatcaaatacaaaaggctccatgagtgatgggtcctattccccagactactcccttgcagcagtggacctgaagagtttcaagaacaacctggtggacatcattcagcagaacaaagagaggtggaaagagttagctgcacaagaagcaagaaccagttcacagaagtgtgagtttattcatcagtaaacacctttaagtaaaacctcgtgcatggtggcagctctaatttgaccaaaagacttggagattttgattatgcttgctggaaatctaccctgtcctgtgtgagacaggaaatctatttttgcagattgctcaataagcatcatgagccacataaataacagctgtaaactccttaattcaccgggctcaactgctaccgaacagattcatctagtggctacatcagcaccttgtgctttcagatatctgtttcaatggcattttgtggcatttgtctttaccgagtgccaataaattttctttgagca

SEQ ID NO: 22241 - DNA, 4885 bp, Homo sapiens
  source 1..4885: mol_type = unassigned DNA
ggtgaggtggtgagcagtggatatatgcctgtcaaagtcaatagcaaatctgtcagagtcttccctcagctttgtacatcagcactgttttgatagataagagaggctactgtataagtgtgtaagatttgtaatggactgaggaatgcttgttctagctgctgaaactgactgtaactgtattgtcttaggagcatcatcatggggtctagtgccacagagattgaagaattggaaaacaccacttttaagtatcttacaggagaacagactgaaaaaatgtggcagcgcctgaaaggaatactaagatgcttggtgaagcagctggaaagaggtgatgttaacgtcgtcgacttaaagaagaatattgaatatgcggcatctgtgctggaagcagtttatatcgatgaaacaagaagacttctggatactgaagatgagctcagtgacattcagactgactcagtcccatctgaagtccgggactggttggcttctacctttacacggaaaatggggatgacaaaaaagaaacctgaggaaaaaccaaaatttcggagcattgtgcatgctgttcaagctggaatttttgtggaaagaatgtaccgaaaaacatatcatatggttggtttggcatatccagcagctgtcatcgtaacattaaaggatgttgataaatggtctttcgatgtatttgccctaaatgaagcaagtggagagcatagtctgaagtttatgatttatgaactgtttaccagatatgatcttatcaaccgtttcaagattcctgtttcttgcctaatcacctttgcagaagctttagaagttggttacagcaagtacaaaaatccatatcacaatttgattcatgcagctgatgtcactcaaactgtgcattacataatgcttcatacaggtatcatgcactggctcactgaactggaaattttagcaatggtctttgctgctgccattcatgattatgagcatacagggacaacaaacaactttcacattcagacaaggtcagatgttgccattttgtataatgatcgctctgtccttgagaatcaccacgtgagtgcagcttatcgacttatgcaagaagaagaaatgaatatcttgataaatttatccaaagatgactggagggatcttcggaacctagtgattgaaatggttttatctacagacatgtcaggtcacttccagcaaattaaaaatataagaaacagtttgcagcagcctgaagggattgacagagccaaaaccatgtccctgattctccacgcagcagacatcagccacccagccaaatcctggaagctgcattatcggtggaccatggccctaatggaggagtttttcctgcagggagataaagaagctgaattagggcttccattttccccactttgtgatcggaagtcaaccatggtggcccagtcacaaataggtttcatcgatttcatagtagagccaacattttctcttctgacagactcaacagagaaaattgttattcctcttatagaggaagcctcaaaagccgaaacttcttcctatgtggcaagcagctcaaccaccattgtggggttacacattgctgatgcactaagacgatcaaatacaaaaggctccatgagtgatgggtcctattccccagactactcccttgcagcagtggacctgaagagtttcaagaacaacctggtggacatcattcagcagaacaaagagaggtggaaagagttagctgcacaaggtgaatctgatcttcataagaactcagaagacttagtaaatgctgaagaaaaacatgatgagacacattcataggcccgaaacaccttaaagacttctgtcattttaaacatgagaggacaatgaaatcagcatgaaaacatcctaaattctcaactttccacaaagctatggctcttctttcaacatagaattggattgggccattttaattgactcctatacaaggaattaagaagaacataaattttgagctagtaactctggccaaataaatacactcaagtttttatcagagtttttggccagtgcttctgccatttttttccctccacaatttggccttcttcaatcaagccagataaatttttgagacaaaagtcagacagtttttaatttttcttgctttgaaccctgtcataatgactgtgcaatacatgtgcagaagatgaggtattttaaaatttacttccttgcactgtcttacacagagtgctataactataaatttttcaaggtcttaaataaaaggaagcaaaaacaaaattattgaaaaattttttttgttgtgctggggaatatactatttagattgtccttcttattttaaatgcatgggaacagaatgacaggtgggatgctgaggagctggttgaagcatcagagcaatgctacagtccaacaatggagcattagatccccagctaggtgacctgatgaacacctttgtaaactctcatactgggaaatggcagtgaaacctttttctgaacccgtggaccagcctgcgtccgtccccatggtttcaaagcacgaatgcattacctccatggttgtggttacaagcaagtcacatgctatctacagttcatgataacaagaccgtcaaccattgctggagacagacactagaatggaaaatgaaatttgccagcgggatgtttatcccatcagaatgtaacaaaatatattaccagccaagagataagagacaagaatgtgtgtgtgtgtgtgtgtgtgtgtgtgtgtgtgttcaaaaatgtctatgaaaatgaaaacccacacttttctgtacagataacattatttgatgtgacttttatattttactacacagaaacaaactgcagccctcagaggccctgcttccttgtcatgttttgcctgagcatgtgcaaagtctttcctttgcttaaagctgaaaaactacctttatgcattgttagctgacaagaaagatcaagcacaattagatgttgtaacttttcactgtacaagcattgcaatgattgtgagcttcagtgaatttatctttgtgaaaggtaaaaattggctggaaagaatcaggagtagccataaattaaatcatgcaaaggaggatccatgcatcctaacaagttttctgctgcatctgcttccttcctgggctccacaatgttaagcaatattttagaaaagggtacaattggaagcttttaagcctgagtggtgagattttataactcacaacttagatctcttttaatgtgtaagccatattctatatgcatatttattatgcatcattgtaatttaagatatatttggatgtaggctgtataaatgcttttaattgttctgtgaatagatccttagctttagtttcacctgaatcttgtgcaaaacacagctaaataattgaattgtattatagacattatgaggtaattgatcttttaaatgtaaggagtaagattgatctataataatgtgctggggaaaacatttatagatatgtacatcatggttactttttgtcctttcaaatggactttttatttctatttatggagagactgtaactactgcttttaatgtctttttaaagcaagctatttaccagcttgaaaatatcatgcatttaaaatagaatctatctggggagtctaattactattgttcctatttgagccagttgtctttcagtaaagctatagaatctctcaaagaagtaaatagaaatactacttcttaaatgtcataggaagcatatccactttgtttctattagtactttaagatctataagaccttattactaaaaagtagaggaatataaagaattcatcaatttctgtatatgggctttaacctaattttccaggttatgcgacttataaagcactgtgaccaaacttccagagacagtaaaaaaaaaaaaaagaaaaaaaagttttactccttcagaagtattgtcatgctactgctgtacttattttcctaatctctctctatctgctatactccctccttttctttctttttcttttaagcttttatatttattccttcctttgttttcctctctgtaagacagctactactgagcactaattagtagaaagtcagagtggaggttatctgtgcatgtctttctgcaaacattactgttgaggccatctgaagagagggattgataggttaggctgttgcaccgtgaatgtcctgctttgcatttttaacctcagctccccaacatatatatcttgcagtttatatgccttttcatttaaccgaaacctcttttatttaatttttaacataacaacctacaattcttgtgtttttattatgctgtatttttctgtgtttcttattacatgtgattgctaaataaatcatatttgagggaaaacattgtgaaacatttggtgttttatgcaattcaatttagtgaggcattgaaaagttggagaaattgggggaaacccaaaggagaccaacttaaaaattgatatgagtttggtaagaaagtgctttttgttccattaaataaatactgattgaattacttattattatacctattattcataagctcctggctggaagcatggtgcatatatgcatatggcaatatttcctctagaaatttcaagtcttataaaggagataatctacacagactgtaatttatacctaataactagaatgccacataaaaaagtaaccagttgcaaataaaatgcacctatgtatatttgaggaggtaaaaaactgcttctgtcttcagagctttcaggactaagtggtgcatcagttggcatttagtaaataaaaacaagtttataaacattgccta

SEQ ID NO: 22242 - DNA, 1659 bp, Homo sapiens
  source 1..1659: mol_type = unassigned DNA
atggggtctagtgccacagagattgaagaattggaaaacaccacttttaagtatcttacaggagaacagactgaaaaaatgtggcagcgcctgaaaggaatactaagatgcttggtgaagcagctggaaagaggtgatgttaacgtcgtcgacttaaagaagaatattgaatatgcggcatctgtgctggaagcagtttatatcgatgaaacaagaagacttctggatactgaagatgagctcagtgacattcagactgactcagtcccatctgaagtccgggactggttggcttctacctttacacggaaaatggggatgacaaaaaagaaacctgaggaaaaaccaaaatttcggagcattgtgcatgctgttcaagctggaatttttgtggaaagaatgtaccgaaaaacatatcatatggttggtttggcatatccagcagctgtcatcgtaacattaaaggatgttgataaatggtctttcgatgtatttgccctaaatgaagcaagtggagagcatagtctgaagtttatgatttatgaactgtttaccagatatgatcttatcaaccgtttcaagattcctgtttcttgcctaatcacctttgcagaagctttagaagttggttacagcaagtacaaaaatccatatcacaatttgattcatgcagctgatgtcactcaaactgtgcattacataatgcttcatacaggtatcatgcactggctcactgaactggaaattttagcaatggtctttgctgctgccattcatgattatgagcatacagggacaacaaacaactttcacattcagacaaggtcagatgttgccattttgtataatgatcgctctgtccttgagaatcaccacgtgagtgcagcttatcgacttatgcaagaagaagaaatgaatatcttgataaatttatccaaagatgactggagggatcttcggaacctagtgattgaaatggttttatctacagacatgtcaggtcacttccagcaaattaaaaatataagaaacagtttgcagcagcctgaagggattgacagagccaaaaccatgtccctgattctccacgcagcagacatcagccacccagccaaatcctggaagctgcattatcggtggaccatggccctaatggaggagtttttcctgcagggagataaagaagctgaattagggcttccattttccccactttgtgatcggaagtcaaccatggtggcccagtcacaaataggtttcatcgatttcatagtagagccaacattttctcttctgacagactcaacagagaaaattgttattcctcttatagaggaagcctcaaaagccgaaacttcttcctatgtggcaagcagctcaaccaccattgtggggttacacattgctgatgcactaagacgatcaaatacaaaaggctccatgagtgatgggtcctattccccagactactcccttgcagcagtggacctgaagagtttcaagaacaacctggtggacatcattcagcagaacaaagagaggtggaaagagttagctgcacaaggtagtgttgtttatgaggccttactgccatctctctctgtcttcacttctcctctaagagtttggattacttcttctagatttcttcttctatag

SEQ ID NO: 22243 - DNA, 2116 bp, Homo sapiens
  source 1..2116: mol_type = unassigned DNA
accacttttaagtatcttacaggagaacagactgaaaaaatgtggcagcgcctgaaaggaatagccatatgtgagtggaaagatcttgaattgttcctgctcttcttgacagaagaaaataaaaactaagatgcttggtgaagcagctggaaagaggtgatgttaacgtcgtcgacttaaagaagaatattgaatatgcggcatctgtgctggaagcagtttatatcgatgaaacaagaagacttctggatactgaagatgagctcagtgacattcagactgactcagtcccatctgaagtccgggactggttggcttctacctttacacggaaaatggggatgacaaaaaagaaacctgaggaaaaaccaaaatttcggagcattgtgcatgctgttcaagctggaatttttgtggaaagaatgtaccgaaaaacatatcatatggttggtttggcatatccagcagctgtcatcgtaacattaaaggatgttgataaatggtctttcgatgtatttgccctaaatgaagcaagtggagagcatagtctgaagtttatgatttatgaactgtttaccagatatgatcttatcaaccgtttcaagattcctgtttcttgcctaatcacctttgcagaagctttagaagttggttacagcaagtacaaaaatccatatcacaatttgattcatgcagctgatgtcactcaaactgtgcattacataatgcttcatacaggtatcatgcactggctcactgaactggaaattttagcaatggtctttgctgctgccattcatgattatgagcatacagggacaacaaacaactttcacattcagacaaggtcagatgttgccattttgtataatgatcgctctgtccttgagaatcaccacgtgagtgcagcttatcgacttatgcaagaagaagaaatgaatatcttgataaatttatccaaagatgactggagggatcttcggaacctagtgattgaaatggttttatctacagacatgtcaggtcacttccagcaaattaaaaatataagaaacagtttgcagcagcctgaagggattgacagagccaaaaccatgtccctgattctccacgcagcagacatcagccacccagccaaatcctggaagctgcattatcggtggaccatggccctaatggaggagtttttcctgcagggagataaagaagctgaattagggcttccattttccccactttgtgatcggaagtcaaccatggtggcccagtcacaaataggtttcatcgatttcatagtagagccaacattttctcttctgacagactcaacagagaaaattgttattcctcttatagaggaagcctcaaaagccgaaacttcttcctatgtggcaagcagctcaaccaccattgtggggttacacattgctgatgcactaagacgatcaaatacaaaaggctccatgagtgatgggtcctattccccagactactcccttgcagcagtggacctgaagagtttcaagaacaacctggtggacatcattcagcagaacaaagagaggtggaaagagttagctgcacaaggtgaatctgatcttcataagaactcagaagacttagtaaatgctgaagaaaaacatgatgagacacattcataggcccgaaacaccttaaagacttctgtcattttaaacatgagaggacaatgaaatcagcatgaaaacatcctaaattctcaactttccacaaagctatggctcttctttcaacatagaattggattgggccattttaattgactcctatacaaggaattaagaagaacataaattttgagctagtaactctggccaaataaatacactcaagtttttatcagagtttttggccagtgcttctgccatttttttccctccacaatttggccttcttcaatcaagccagataaatttttgagacaaaagtcagacagtttttaatttttcttgctttgaaccctgtcataatgactgtgcaatacatgtgcagaagatgaggtattttaaaatttacttccttgcactgtcttacacagagtgctataactataaatttttcaaggtcttaaataaaa

SEQ ID NO: 22244 - DNA, 3444 bp, Homo sapiens
  source 1..3444: mol_type = unassigned DNA
gtaaacacgcactcacatccgccagtacagggcacacgcagccactcgtccccggcgcctgtgtgcgtgcgctcgcccttgggcgcttctgtctgtgtgtgcccccggcttccaatcgttcctttgggagggggaggagtggctgtgaggagtgagagactggcgggcaggctgaggagaagggagggagagcagagggaggggggaacccggccgggggaggaggagagaggcgaggaggcggctctggcagcgcgcggcggcggcggcggtagcggcagcagcagcggcggtgcggagagcttggactgggagcccaaagctcggctgggcagcgggagaggaggagccgcaggagctgcagctctgccagcttgggccgagcctagagacaccggcctggctggtccacgccagccgcagaccgtggctgagcatggagctgtccccccgcagtcctccggagatgctggaggagtcggattgcccgtcacccctggagctgaagtcagcccccagcaagaagatgtggattaagcttcggtctctgctgcgctacatggtgaagcagttggagaatggggagataaacattgaggagctgaagaaaaatctggagtacacagcttctctgctggaagccgtctacatagatgagacacggcaaatcttggacacggaggacgagctgcaggagctgcggtcagatgccgtgccttcggaggtgcgggactggctggcctccaccttcacccagcaggcccgggccaaaggccgccgagcagaggagaagcccaagttccgaagcattgtgcacgctgtgcaggctgggatcttcgtggaacggatgttccggagaacatacacctctgtgggccccacttactctactgcggttctcaactgtctcaagaacctggatctctggtgctttgatgtcttttccttgaaccaggcagcagatgaccatgccctgaggaccattgtttttgagttgctgactcggcataacctcatcagccgcttcaagattcccactgtgtttttgatgagtttcctggatgccttggagacaggctatgggaagtacaagaatccttaccacaaccagatccacgcagccgatgttacccagacagtccattgcttcttgctccgcacagggatggtgcactgcctgtcggagattgagctcctggccatcatctttgctgcagctatccatgattatgagcacacgggcactaccaacagcttccacatccagaccaagtcagaatgtgccatcgtgtacaatgatcgttcagtgctggagaatcaccacatcagctctgttttccgattgatgcaggatgatgagatgaacattttcatcaacctcaccaaggatgagtttgtagaactccgagccctggtcattgagatggtgttggccacagacatgtcctgccatttccagcaagtgaagaccatgaagacagccttgcaacagctggagaggattgacaagcccaaggccctgtctctactgctccatgctgctgacatcagccacccaaccaagcagtggttggtccacagccgttggaccaaggccctcatggaggaattcttccgtcagggtgacaaggaggcagagttgggcctgcccttttctccactctgtgaccgcacttccactctagtggcacagtctcagatagggttcatcgacttcattgtggagcccacattctctgtgctgactgacgtggcagagaagagtgttcagcccctggcggatgaggactccaagtctaaaaaccagcccagctttcagtggcgccagccctctctggatgtggaagtgggagaccccaaccctgatgtggtcagctttcgttccacctgggtcaagcgcattcaggagaataagcagaaatggaaggaacgggcagcaagtggcatcaccaaccagatgtccattgacgagctgtccccctgtgaagaagaggcccccccatcccctgccgaagatgaacacaaccagaatgggaatctggattagccctggggctggcccaggtcttcattgagtccaaagtgtttgatgtcatcagcaccatccatcaggactggctcccccatctgctccaagggagcgtggtcgtggaagaaacaacccacctgaaggccaaatgccagagatttggggttggggaaagggcccctccccacctgacacccactggggtgcactttaatgttccggcagcaagactggggaacttcaggctcccagtggtcactgtgcccatccctcagcctctggattctcttcatggccaggtggctgccagggagcggggagcttcctggaggcttcccagggccttggggaagggtcagagatgccagccccctgggacctcccccatcctttttgcctccaagtttctaagcaatacattttgggggttccctcagccccccaccccagatcttagctggcaggtctgggtgccccttttcctcccctgggaagggctggaataggatagaaagctgggggttttcagagccctatgtgtggggaggggagtggattccttcagggcatggtacctttctaggacctgggaatggggtggagaggacatcctcttcaccccagaattgcgctgcttcagccccatctccagcctgatcctctgaatcttccttccctccctttctgatacagtgactggggcaaaaggagccattgtgaccaggggctgcgggaggcctttcctgggaccttccttgggactggtctgggcccctggggcttgtcgcctgccctgagtccggagccctttgcctccttcctctcccctggggctgggaggctccatccgaccaatgtctgtaaagtgctttgaggatctccccagcaaagcaccttcagaatgtatcgacaccagctgggttagggtcaagggtgcctggggagggtgagtaatcctgcattgctaaaagagagggtctgtcccctcctctccacgtcccagaactggcccagctgcaggcactaagaagctcctcccctgagacaagtgaggggtagtcggtgaaaggcagatggacaaggggctcagggctgctgccttcctgtcctctggagagaacccagccaggcgcggtgccccttcctctcctcaggctcctccttgcccccaccttgccccaggaaaggccaaagtccaggtgactgccctccttctttcttgtaaataccaaccatgcatttgtacagtgggccctgttcatgcgaaatccacatccatggtctcctagacctgctaccctggtacttccaccctaccccaccccgagaagggcagagacgcatgtgactcacccctgcccttggtttcccagacccctgctatagccagagaacaataaagaagggagaccagg

SEQ ID NO: 22245 - DNA, 1711 bp, Homo sapiens
  source 1..1711: mol_type = unassigned DNA
gattctctttggcacagatgttggcaggtgcgaggaagcacggccctgacacgcgtggccaggccacatgtgcaaggcatgtgcggagcaagctggccagttggagcgggcttaggagttgcaaaggctgcgctacatggtgaagcagttggagaatggggagataaacattgaggagctgaagaaaaatctggagtacacagcttctctgctggaagccgtctacatagatgagacacggcaaatcttggacacggaggacgagctgcaggagctgcggtcagatgccgtgccttcggaggtgcgggactggctggcctccaccttcacccagcaggcccgggccaaaggccgccgagcagaggagaagcccaagttccgaagcattgtgcacgctgtgcaggctgggatcttcgtggaacggatgttccggagaacatacacctctgtgggccccacttactctactgcggttctcaactgtctcaagaacctggatctctggtgctttgatgtcttttccttgaaccaggcagcagatgaccatgccctgaggaccattgtttttgagttgctgactcggcataacctcatcagccgcttcaagattcccactgtgtttttgatgagtttcctggatgccttggagacaggctatgggaagtacaagaatccttaccacaaccagatccacgcagccgatgttacccagacagtccattgcttcttgctccgcacagggatggtgcactgcctgtcggagattgagctcctggccatcatctttgctgcagctatccatgattatgagcacacgggcactaccaacagcttccacatccagaccaagtcagaatgtgccatcgtgtacaatgatcgttcagtgctggagaatcaccacatcagctctgttttccgattgatgcaggatgatgagatgaacattttcatcaacctcaccaaggatgagtttgtagaactccgagccctggtcattgagatggtgttggccacagacatgtcctgccatttccagcaagtgaagaccatgaagacagccttgcaacagctggagaggattgacaagcccaaggccctgtctctactgctccatgctgctgacatcagccacccaaccaagcagtggttggtccacagccgttggaccaaggccctcatggaggaattcttccgtcagggtgacaaggaggcagagttgggcctgcccttttctccactctgtgaccgcacttccactctagtggcacagtctcagatagggttcatcgacttcattgtggagcccacattctctgtgctgactgacgtggcagagaagagtgttcagcccctggcggatgaggactccaagtctaaaaaccagcccagctttcagtggcgccagccctctctggatgtggaagtgggagaccccaaccctgatgtggtcagctttcgttccacctgggtcaagcgcattcaggagaataagcagaaatggaaggaacgggcagcaagtggcatcaccaaccagatgtccattgacgagctgtccccctgtgaagaagaggcccccccatcccctgccgaagatgaacacaaccagaatgggaatctggattagccctggggctggcccaggtcttcattgagtccaaagtgtttgatgtcatcagcaccatccatcaggactggctcccccatctgctcc

SEQ ID NO: 22246 - DNA, 2150 bp, Homo sapiens
  source 1..2150: mol_type = unassigned DNA
agttgctcagttctactgggacctggaggaggaaggcaggggccaaagaggaagttgtcccctcttgggggccctggggctcctggggtcaggattttgatactctgaagcaggaaactttgattcccatggcaaaccctgttcctgttcagaggagccacctccagggccccattctcaggctgcgctacatggtgaagcagttggagaatggggagataaacattgaggagctgaagaaaaatctggagtacacagcttctctgctggaagccgtctacatagatgagacacggcaaatcttggacacggaggacgagctgcaggagctgcggtcagatgccgtgccttcggaggtgcgggactggctggcctccaccttcacccagcaggcccgggccaaaggccgccgagcagaggagaagcccaagttccgaagcattgtgcacgctgtgcaggctgggatcttcgtggaacggatgttccggagaacatacacctctgtgggccccacttactctactgcggttctcaactgtctcaagaacctggatctctggtgctttgatgtcttttccttgaaccaggcagcagatgaccatgccctgaggaccattgtttttgagttgctgactcggcataacctcatcagccgcttcaagattcccactgtgtttttgatgagtttcctggatgccttggagacaggctatgggaagtacaagaatccttaccacaaccagatccacgcagccgatgttacccagacagtccattgcttcttgctccgcacagggatggtgcactgcctgtcggagattgagctcctggccatcatctttgctgcagctatccatgattatgagcacacgggcactaccaacagcttccacatccagaccaagtcagaatgtgccatcgtgtacaatgatcgttcagtgctggagaatcaccacatcagctctgttttccgattgatgcaggatgatgagatgaacattttcatcaacctcaccaaggatgagtttgtagaactccgagccctggtcattgagatggtgttggccacagacatgtcctgccatttccagcaagtgaagaccatgaagacagccttgcaacagctggagaggattgacaagcccaaggccctgtctctactgctccatgctgctgacatcagccacccaaccaagcagtggttggtccacagccgttggaccaaggccctcatggaggaattcttccgtcagggtgacaaggaggcagagttgggcctgcccttttctccactctgtgaccgcacttccactctagtggcacagtctcagatagggttcatcgacttcattgtggagcccacattctctgtgctgactgacgtggcagagaagagtgttcagcccctggcggatgaggactccaagtctaaaaaccagcccagctttcagtggcgccagccctctctggatgtggaagtgggagaccccaaccctgatgtggtcagctttcgttccacctgggtcaagcgcattcaggagaataagcagaaatggaaggaacgggcagcaagtggcatcaccaaccagatgtccattgacgagctgtccccctgtgaagaagaggcccccccatcccctgccgaagatgaacacaaccagaatgggaatctggattagccctggggctggcccaggtcttcattgagtccaaagtgtttgatgtcatcagcaccatccatcaggactggctcccccatctgctccaagggagcgtggtcgtggaagaaacaacccacctgaaggccaaatgccagagatttggggttggggaaagggcccctccccacctgacacccactggggtgcactttaatgttccggcagcaagactggggaacttcaggctcccagtggtcactgtgcccatccctcagcctctggattctcttcatggccaggtggctgccagggagcggggagcttcctggaggcttcccagggccttggggaagggtcagagatgccagccccctgggacctcccccatcctttttgcctccaagtttctaagcaatacattttgggggttccctcagccccccaccccagatcttagctggcaggtctgggtgccccttttcctcccct

SEQ ID NO: 22247 - DNA, 5109 bp, Homo sapiens
  source 1..5109: mol_type = unassigned DNA
gacttccttgtttggagtaaacttcggcaacatctcatggctgaggggtttgcctttccatctgttgatgtgctttctggaagctccccggtctgccagagaaaacatatctagaagacgcacgacgccaattcagccattcccttgggtccccaaatccccccagccaccagagacggaaggagaaggtgaagtagaaaacagactttcctgtggcgcgcgggatccgcggctgacagagagtagcgtggccaggcagggatctccgcgcccaccggtcagccccgtccacgcgctcgggcgcgcgtcctcccttcctgacactcctctcgccgcctctggaactcggcttggagatggggcagtcgcgacggctcctgcctccgccgagctcctagcgctttagctgttgacattgggtccccgctgttgtctccaggcgctcagctgccagcgcgcggcggggctgagagtgacagcgcggcgcggccgggggaggattcgccgccgagccccgggctgctcactccgccgtgggggggaccgcagacgccgctggtctcgctgcgaggcccctgcccggccggccgagccatgacggacgccggcaacaggaaggagggcttcaaaaaatgccggagcgccactttcagcatcgatggctacagcttcaccatagttgcaaatgaagctggagacaagaatgccagaccactggcccgcttctctcggtctaagtcacagaactgtctgtggaactccctcatcgatgggctcacagggaatgtcaaggagaagccaaggccaacaattgtccatgaccctcgacccccagaggagatcctagctgatgaattgccacagctggatagctcagaagtcttggtgaagacatccttcagattacggtctttggtcaaacaattagagagaggggaagcttcagtggtagatcttaagaagaatttggaatatgcagccacagtgcttgaatctgtgtatattgatgaaacaaggagactcctggatacagaggatgagctcagtgacattcagtcagatgctgtgccttctgaggtccgagactggctggcctccaccttcacgcggcagatggggatgatgctcaggaggagcgacgagaagccccggttcaagagcatcgttcacgcagtgcaggctgggatatttgtggagagaatgtatagacggacatcaaacatggttggactgagctatccaccagctgttattgaggcattaaaggatgtggacaagtggtcctttgacgtcttttccctcaatgaggccagtggggatcatgcactgaaatttattttctatgaactactcacacgttatgatctgatcagccgtttcaagatccccatttctgcacttgtctcatttgtggaggccctggaagtgggatacagcaagcacaaaaatccttaccataacttaatgcacgctgccgatgttacacagacagtgcattacctcctctataagacaggagtggcgaactggctgacggagctggagatctttgctataatcttctcagctgccatccatgactacgagcataccggaaccaccaacaatttccacattcagactcggtctgatccagctattctgtataatgacagatctgtactggagaatcaccatttaagtgcagcttatcgccttctgcaagatgacgaggaaatgaatattttgattaacctctcaaaggatgactggagggagtttcgaaccttggtaattgaaatggtgatggccacagatatgtcttgtcacttccaacaaatcaaagcaatgaagactgctctgcagcagccagaagccattgaaaagccaaaagccttatcccttatgctgcatacagcagatattagccatccagcaaaagcatgggacctccatcatcgctggacaatgtcactcctggaggagttcttcagacagggtgacagagaagcagagctggggctgcctttttctcctctgtgtgaccgaaagtccactatggttgctcagtcacaagtaggtttcattgatttcatcgtggaacccaccttcactgtgcttacggacatgaccgagaagattgtgagtccattaatcgatgaaacctctcaaactggtgggacaggacagaggcgttcgagtttgaatagcatcagctcgtcagatgccaagcgatcaggtgtcaagacctctggttcagagggaagtgccccgatcaacaattctgtcatctccgttgactataagagctttaaagctacttggacggaagtggtgcacatcaatcgggagagatggagggccaaggtacccaaagaggagaaggccaagaaggaagcagaggaaaaggctcgcctggccgcagaggagcagcaaaaggaaatggaagccaaaagccaggctgaagaaggcgcatctggcaaagctgagaaaaagacgtctggagaaactaagaatcaagtcaatggaacacgggcaaacaaaagtgacaaccctcgtgggaaaaactccaaagccgagaagtcatcaggagaacagcaacagaatggtgacttcaaagatggtaaaaataagacagacaagaaggatcactctaacatcggaaatgattcaaagaaaacagatggcacaaaacagcgttctcacggctcaccagccccaagcaccagctccacgtgtcgccttacgttgccagtcatcaagcctcctttgcgtcattttaaacgccctgcttacgcatctagctcctatgcaccttcagtctcaaagaaaactgatgagcatcctgcaaggtacaagatgctggatcagaggatcaaaatgaaaaagattcagaacatctcacataactggaacagaaaataggccgaggggaagaagagagggagtgaaggagggtctacctatctgcttctcagcacccactggccacagcaggacacacctccaagacccttggaggctgttggagcaggtactatcctggttgactccaccaaggtgaaatgaaagttgtatgtgattttcctctttgttgttcttgtatagacttttcaattgctgtatgtgggatcagcccagacgccagcaacaaactagcaagaggggtgtttttatggtataagtctctaaaagtctaaattggaccaaaattaaaatgacacaaacttaaaaaaaaataaaattcctctcattgccacttttttcaatctctaaaagttagttgcccccaaaagaatattggtttaataatcatcatatttaagaaatgcactgataaaaacatattttccaattttaaatacacctatttaaaatgtaaatacacttatttaaaattcaagtaaatatgtaactatcaaagtaaatgtattcaaaacagaagttgtgcttctgaatgtaaaaatattaaaaggaagagaagacggatgaattgttgtattcatggacatttcagaattcacgcttataaagcaaatccaagttaaaaaacaaaaaaagatttttgtgcctcatgaagattgtgcctcatgcccaataacctcatgtactttgaaggatgtgaaggtttgcaagagatgcatttggcttcattttcctctaatcttttacttctacccacagtagatgatacaaaaaatcttgccttaaagactgcaggtttaagagtcattgcaaaagatgtcagtttgattttgtggtcctaggccaagagggtgtaaaattctgagcctagtttaaattctttattttcagattgttctggactgaaaataaagaatttaaactaggctagagatgcctttaagttacatttcagatcctcttcacagcacgctacatatctaaagcccttgagatcctgattgttctcacagttgttggtggaatccatagttttataactcacctctttttatggtggcattgttagcccttctgtgtctctccctaggatttttaattcaggactaaaatcacagaagtagcaaggaaaggctcaagactagagatagctttcaatctcttcagaaatagcctggtgcagtgagaaaactaggtttgttttcaggccagtctgatcttcatcctattctgtctataactagttgcaggtccttgctcggatggcataattttttgatgcctccatttgcttaactagaaactaggattcatatacacactctgcactttgtattgaagattaatgataatgtaggttttggttgctgtggctgagcctggccagtaataggtgcataacagaagtagctaagagcatttcataatcaggatgaactctccaggacagccctacaaagaaggagctgtttgttcccggatggcctcgaccttccaggcttgattgtaaagagtttagtgtcctctccttctctcattccctgcagttcatttccaataaactgcagttattcaagttgagcaagttccggaatttagtgcctaccatgctattgggcagtttatttataatgtgctttatgatgatacttcagagaaatttaattgctatacaaaaagacgaatcattgtgacttttcgttaaggaggcgattgcaattctttgctccctgcctggtgtctgggttagaaggcccttctgcaggctggtagtgtctgttccacctggattaggttaactcaacaggtaattcctatctgtttatacacagatgctttagcgcttgctgtacaaagtcatttggctacacactgaggaggcccatgggagtagtagcctcctcaaataatgttccctacctatctgtcaataccttccatcttaggtattgagaatttaatgaggctgtgttttcttggctgtgcttcttgatgttggaagccatgttcctggggaacaaatctgtattcttttctcctaagatgtgagtttttttcaacctttgctaatattttaatggagcaaatgtacagatgttgagattttgcactgcttataaaatgcctaccatgttttttgcataatggattgtatagaaatgcagattatattcttacagcaaataaaaagatgcttttaacaga

SEQ ID NO: 22248 - DNA, 2898 bp, Homo sapiens
  source 1..2898: mol_type = unassigned DNA
agcaagaaaacatcaagagtttttgagtgtggtgtgtggttcccttcgtccccatcagtcgcttcaatatttcaaaatggatccggttctgtggcgggtgcgagagtgaggctgtgggggacctccaggcccaacctccgcgaagcctcgcggcttctgcgtgccctggccccgggaggataaggatttcccttccctcctacttgcgcgcggagccgagctcttgttgaggtgagggttccggaagcccacgcagctccgcaggtcggtggtggccgcggctgccctgcgggggtgagtgtgcccggccggggtcggagcccagcgtgtgcccggcagacggcggtgcccgcgcgcccctccctccgcgcccgcggtgacagcccagacaccagcccgggcgctgacagacgacttttctcacttgtcagttttctcgcttgtcagcagagctgctgctatggagtcgccaaccaaggagattgaagaatttgagagcaactctctgaaatacctgcaaccggaacagatcgagaaaatctggcttcggctccgcgggctgaggaaatataagaaaacgtcccagagattacggtctttggtcaaacaattagagagaggggaagcttcagtggtagatcttaagaagaatttggaatatgcagccacagtgcttgaatctgtgtatattgatgaaacaaggagactcctggatacagaggatgagctcagtgacattcagtcagatgctgtgccttctgaggtccgagactggctggcctccaccttcacgcggcagatggggatgatgctcaggaggagcgacgagaagccccggttcaagagcatcgttcacgcagtgcaggctgggatatttgtggagagaatgtatagacggacatcaaacatggttggactgagctatccaccagctgttattgaggcattaaaggatgtggacaagtggtcctttgacgtcttttccctcaatgaggccagtggggatcatgcactgaaatttattttctatgaactactcacacgttatgatctgatcagccgtttcaagatccccatttctgcacttgtctcatttgtggaggccctggaagtgggatacagcaagcacaaaaatccttaccataacttaatgcacgctgccgatgttacacagacagtgcattacctcctctataagacaggagtggcgaactggctgacggagctggagatctttgctataatcttctcagctgccatccatgactacgagcataccggaaccaccaacaatttccacattcagactcggtctgatccagctattctgtataatgacagatctgtactggagaatcaccatttaagtgcagcttatcgccttctgcaagatgacgaggaaatgaatattttgattaacctctcaaaggatgactggagggagtttcgaaccttggtaattgaaatggtgatggccacagatatgtcttgtcacttccaacaaatcaaagcaatgaagactgctctgcagcagccagaagccattgaaaagccaaaagccttatcccttatgctgcatacagcagatattagccatccagcaaaagcatgggacctccatcatcgctggacaatgtcactcctggaggagttcttcagacagggtgacagagaagcagagctggggctgcctttttctcctctgtgtgaccgaaagtccactatggttgctcagtcacaagtaggtttcattgatttcatcgtggaacccaccttcactgtgcttacggacatgaccgagaagattgtgagtccattaatcgatgaaacctctcaaactggtgggacaggacagaggcgttcgagtttgaatagcatcagctcgtcagatgccaagcgatcaggtgtcaagacctctggttcagagggaagtgccccgatcaacaattctgtcatctccgttgactataagagctttaaagctacttggacggaagtggtgcacatcaatcgggagagatggagggccaaggtacccaaagaggagaaggccaagaaggaagcagaggaaaaggctcgcctggccgcagaggagcagcaaaaggaaatggaagccaaaagccaggctgaagaaggcgcatctggcaaagctgagaaaaagacgtctggagaaactaagaatcaagtcaatggaacacgggcaaacaaaagtgacaaccctcgtgggaaaaactccaaagccgagaagtcatcaggagaacagcaacagaatggtgacttcaaagatggtaaaaataagacagacaagaaggatcactctaacatcggaaatgattcaaagaaaacagatggcacaaaacagcgttctcacggctcaccagccccaagcaccagctccacgtgtcgccttacgttgccagtcatcaagcctcctttgcgtcattttaaacgccctgcttacgcatctagctcctatgcaccttcagtctcaaagaaaactgatgagcatcctgcaaggtacaagatgctggatcagaggatcaaaatgaaaaagattcagaacatctcacataactggaacagaaaataggccgaggggaagaagagagggagtgaaggagggtctacctatctgcttctcagcacccactggccacagcaggacacacctccaagacccttggaggctgttggagcaggtactatcctggttgactccaccaaggtgaaatgaaagttgtatgtgattttcctctttgttgttcttgtatagacttttcaattgctgtatgtgggatcagcccagacgccagcaacaaactagcaagaggggtgtttttatggtataagtctctaaaagtctaaattggaccaaaattaaaatgacacaaacttaaa

SEQ ID NO: 22249 - DNA, 2420 bp, Homo sapiens
  source 1..2420: mol_type = unassigned DNA
cggctcccgctttgctcagccgccgcttttctctcccttctcactttctctcctccccacccagccctccttttcacctccaaaccctttagctgcgcgctgatcgcttctgtggctttgtttgggggtagggggagaatacgaatagacccgaggtgctttctcttggagctggagtccaatcccaatccctatctctatccctatccctgtgcttatccctgggcattagcccgggaccatggctggttcccgcagctgcctccggagcgcacctggggccatggtttgccgcgatcggagtccgctctaagtcggagtctgggggcgcagaagggggagcgcgccgagaaagtgccgggcaaacgcgcgccgcgcctggctgggcatcgcgagctgggcgaggagacggggaggggacagcccaaactatctcagcttcaccgccagtggtcacctacctgcagctatggagtcgccaaccaaggagattgaagaatttgagagcaactctctgaaatacctgcaaccggaacagatcgagaaaatctggcttcggctccgcgggctgaggaaatataagaaaacgtcccagagattacggtctttggtcaaacaattagagagaggggaagcttcagtggtagatcttaagaagaatttggaatatgcagccacagtgcttgaatctgtgtatattgatgaaacaaggagactcctggatacagaggatgagctcagtgacattcagtcagatgctgtgccttctgaggtccgagactggctggcctccaccttcacgcggcagatggggatgatgctcaggaggagcgacgagaagccccggttcaagagcatcgttcacgcagtgcaggctgggatatttgtggagagaatgtatagacggacatcaaacatggttggactgagctatccaccagctgttattgaggcattaaaggatgtggacaagtggtcctttgacgtcttttccctcaatgaggccagtggggatcatgcactgaaatttattttctatgaactactcacacgttatgatctgatcagccgtttcaagatccccatttctgcacttgtctcatttgtggaggccctggaagtgggatacagcaagcacaaaaatccttaccataacttaatgcacgctgccgatgttacacagacagtgcattacctcctctataagacaggagtggcgaactggctgacggagctggagatctttgctataatcttctcagctgccatccatgactacgagcataccggaaccaccaacaatttccacattcagactcggtctgatccagctattctgtataatgacagatctgtactggagaatcaccatttaagtgcagcttatcgccttctgcaagatgacgaggaaatgaatattttgattaacctctcaaaggatgactggagggagtttcgaaccttggtaattgaaatggtgatggccacagatatgtcttgtcacttccaacaaatcaaagcaatgaagactgctctgcagcagccagaagccattgaaaagccaaaagccttatcccttatgctgcatacagcagatattagccatccagcaaaagcatgggacctccatcatcgctggacaatgtcactcctggaggagttcttcagacagggtgacagagaagcagagctggggctgcctttttctcctctgtgtgaccgaaagtccactatggttgctcagtcacaagtaggtttcattgatttcatcgtggaacccaccttcactgtgcttacggacatgaccgagaagattgtgagtccattaatcgatgaaacctctcaaactggtgggacaggacagaggcgttcgagtttgaatagcatcagctcgtcagatgccaagcgatcaggtgtcaagacctctggttcagagggaagtgccccgatcaacaattctgtcatctccgttgactataagagctttaaagctacttggacggaagtggtgcacatcaatcgggagagatggagggccaaggtacccaaagaggagaaggccaagaaggaagcagaggaaaaggctcgcctggccgcagaggagcagcaaaaggaaatggaagccaaaagccaggctgaagaaggcgcatctggcaaagctgagaaaaagacgtctggagaaactaagaatcaagtcaatggaacacgggcaaacaaaagtgacaaccctcgtgggaaaaactccaaagccgagaagtcatcaggagaacagcaacagaatggtgacttcaaagatggtaaaaataagacagacaagaaggatcactctaacatcggaaatgattcaaagaaaacagatgattcacaagagtaaaaaagacctcatagacaataaaagaggctgccagtgtcttgcatca

SEQ ID NO: 22250 - DNA, 8852 bp, Homo sapiens
  source 1..8852: mol_type = unassigned DNA
gtggtgtgtggttcccttcgtccccatcagtcgcttcaatatttcaaaatggatccggttctgtggcgggtgcgagagtgaggctgtgggggacctccaggcccaacctccgcgaagcctcgcggcttctgcgtgccctggccccgggaggataaggatttcccttccctcctacttgcgcgcggagccgagctcttgttgagctatggagtcgccaaccaaggagattgaagaatttgagagcaactctctgaaatacctgcaaccggaacagatcgagaaaatctggcttcggctccgcgggctgaggaaatataagaaaacgtcccagagattacggtctttggtcaaacaattagagagaggggaagcttcagtggtagatcttaagaagaatttggaatatgcagccacagtgcttgaatctgtgtatattgatgaaacaaggagactcctggatacagaggatgagctcagtgacattcagtcagatgctgtgccttctgaggtccgagactggctggcctccaccttcacgcggcagatggggatgatgctcaggaggagcgacgagaagccccggttcaagagcatcgttcacgcagtgcaggctgggatatttgtggagagaatgtatagacggacatcaaacatggttggactgagctatccaccagctgttattgaggcattaaaggatgtggacaagtggtcctttgacgtcttttccctcaatgaggccagtggggatcatgcactgaaatttattttctatgaactactcacacgttatgatctgatcagccgtttcaagatccccatttctgcacttgtctcatttgtggaggccctggaagtgggatacagcaagcacaaaaatccttaccataacttaatgcacgctgccgatgttacacagacagtgcattacctcctctataagacaggagtggcgaactggctgacggagctggagatctttgctataatcttctcagctgccatccatgactacgagcataccggaaccaccaacaatttccacattcagactcggtctgatccagctattctgtataatgacagatctgtactggagaatcaccatttaagtgcagcttatcgccttctgcaagatgacgaggaaatgaatattttgattaacctctcaaaggatgactggagggagtttcgaaccttggtaattgaaatggtgatggccacagatatgtcttgtcacttccaacaaatcaaagcaatgaagactgctctgcagcagccagaagccattgaaaagccaaaagccttatcccttatgctgcatacagcagatattagccatccagcaaaagcatgggacctccatcatcgctggacaatgtcactcctggaggagttcttcagacagggtgacagagaagcagagctggggctgcctttttctcctctgtgtgaccgaaagtccactatggttgctcagtcacaagtaggtttcattgatttcatcgtggaacccaccttcactgtgcttacggacatgaccgagaagattgtgagtccattaatcgatgaaacctctcaaactggtgggacaggacagaggcgttcgagtttgaatagcatcagctcgtcagatgccaagcgatcaggtgtcaagacctctggttcagagggaagtgccccgatcaacaattctgtcatctccgttgactataagagctttaaagctacttggacggaagtggtgcacatcaatcgggagagatggagggccaaggtacccaaagaggagaaggccaagaaggaagcagaggaaaaggctcgcctggccgcagaggagcagcaaaaggaaatggaagccaaaagccaggctgaagaaggcgcatctggcaaagctgagaaaaagacgtctggagaaactaagaatcaagtcaatggaacacgggcaaacaaaagtgacaaccctcgtgggaaaaactccaaagccgagaagtcatcaggagaacagcaacagaatggtgacttcaaagatggtaaaaataagacagacaagaaggatcactctaacatcggaaatgattcaaagaaaacagatgattcacaagagtaaaaaagacctcatagacaataaaagaggctgccagtgtcttgcatcattctagctgagcttcttcattctccttcttctccttcttccacaaagacccatatctggagaaggtgtacaactttcaaacacaagccccccaccccctgacccttggccttccctcacaccatctccttccaggggatgaatctttgggggttggtttgaggtcttagaactctgggggatattcccctgagcaaaacaaacaacgtgagatttttactcaaacagaaacaaaacatgaaggggcatcctcaaaatcctttgctaatgacctggctttcaaggcatctgtctggcctgatgagaatggacatcctggatatgctgggagaggcctgaaaaaagccacacacacagtaattgccattttatgactgtcaatgccgttactttaaatgttgtcatttttgcactggctactgatgatacagccatgctgacattcatcaccgcaaagatgatgattccagtctctggttcctttcctgagtcaggaacatttgttttctccaatttcctttcagacttaaaattgttcttatgctttttttcccacttctgtaatacagaattctgtttgttttctaaaaaagattattctataggaatctttatttgatggctaatttattttctctgtgcattcattagtataaacctgaatgttcagctggtgactgtactgttgagtgggaacccattgtttccactggtagcattgataactaagtggttactgaaatttttaccactggctggacatcttcttttggatatctgtggttttatttcatcactcttctttttattcagtaaagtgctaagggaattagtatcagggagatatggcagataattctttgcattttagtgagtttttaaaaatacaagatagaagtggattaatagcacgaataaaaaataagaatagtagatgtagcatggaaagagaataacattgcagcccccttgagaccaaattacaggtgggatctaagggagtgcaagtaaagtgggattttatgagtctaaatgatgtgatttagataaaagtgattcttaaaatgtggttattggtcacacaggaatctctgagtccttcccaagagtgaagcacatgaatatgctgatgatgaagtggggattagtaatagaaagagagctaggcaataggtttaagtgtattccccactacagatttaatttctacatgaaaaagcacgagaacagatatttaaacgtccttttattactaaggtgaaatattggcattttttcaggcagaaagaaagagactgtatgtggtcttcctggacctttgccttgccaaaatgttccccaacagaaagatctgaagaactttgtagtatcgaatgcacaacagcatgctgatatttgaacagatttcttctgtcagctttacattttgccttggagaaacacttagatttttctgttgtgctccctgtgttcataacaatgacctcaccacataatgtggccagaaattcaaatgacttcaggggcctagcaggtcaagtaaatgaataaagcaagccatgtaatatcacagtcattgtggtaaatggcaattcatagtgggcctttgtatcagcaagacaggaaggagcaatggggactgtgagaaattggagagggtgggtgctgtcaaaacagggtagttggtaggcagcaactgaatttgagctgtgtggggatgggggtcctagatacctaggatttgatataagctctctccaaatttttacatattgacaactaactcaaaaacttacaaacactgtgctaatcaaatgaaacatgcctgtgagctgcattcaatccatggggcattggtttgcaagctatgttcttagaggtggtatgattttgtattgaaattaaatataaccaagagtatgtcaatttttgaccttggaacctggaccttttacctcatttatattctgtatttttgtatgtggggctttttggccagtcaaaatagaaagtctacagcttccattttataatctaacaagcaacaagaaacaacatttgaaaaagaaacaggaatatagccattttttctagcaccaataaaaatggaaatgtttttcatttgctttaagtcattaatcagctgaaaaagaatagaaagagaatttcattccataaagaacttcacctaaaactctcagtgaagcaaaacaaaactccatgtaactcactcttagctttaaatctttaaaaagtgtttcgaagggatattgagtaaaaatgcagttatctattaaaaatacaaaatgctatattatatgatgctatgaattgatactggagctgataaaacattaaagtaattattccaaatcagtgctgactgcaaaagcaatatttccaaagctctagcttattttctgcggtcttttaattcccttgaaatagctttcttcaagttgagcagcaatttgggacaaacattattctattgcacagattatggcatcttactctggtttacacacacagagcaagggcttacacacctgaattaagaattaactagcatgtggggacagcaatagggatagtcctaccacagacgaaaccatgcgctctacacgtccctggataaaatgtgacaagttagcccttgaatttgggtccccatgtcaccaaatagctctatatttaagttgtgttaatgtggtacgtttcagtggcataatgacccattcttatcgaggcctttgttccatattttatttgtgccaatctttcttaggttatgagccctaatagtttatggcagcagacaagagactcatttctaacccattaaattcaaatggactttcttccactgtccatttcatttttggagctgttataaactaccgaaaacatttgacaggatcccattgtggatctgatacacttaaacagtaaaatgatatctaaacatctgaaagccaaagaataacctagtgcacgtgttcattcatttgtagaatttaagccattgtattatattttccacttggaaccatgcctttagatacaaaagtgtaaagtaaaaagcaacattatcatgggatgtgagacggtaatccaaaagttgaagaccaatttttgttatccatattttggaagtatggatactgtttattttaatatcacttctctcatgggtcacttttccttagataggtaggtaggtagatagatagatagatagatgatagatagatagatagatagatagatagatagatagatagatagatagatagatagatagataatataatatattttcttctttcttaacctatgagcagagactttgatgatggaaattactttgtaacattccccatggagcctaggaaaaacaatagaaaaaaagcatgaaatctttttctcatagtgaaatagagaagattctaagattggaaatctgtgtatgtggtgttctatcccaaataaagagaatttagggaattcaggcaacaatttttttcctaattggaaactttgttctgatcctgagatgcccacacaccccacaggagacgcagtgctggcccaccacagtgtttggaacacggtcagcattcaggaaacacattcaaaatcgtctaactgaattccactatccacttgtgaatgcaaacaaaattcaaatttccctgaaaatttattcaacttctatatgccaagcacactgctaaaggcttatcttctaagtatatgcaggcataccctactcacacaaatagcttattaccagagataggaaattgcaggtaatttgggagaaattgtcatagccaaatttatggaaaaaataaaataaaaacttctctatggcctcttgatttaagaaaaaaacagaacaatacaaaaaaaaaaaagcactaaaacaggatttatctgagaatgtctttccaaaagggaagatgacaccaatctatataaaacgtcagtggatttactgagaatccgagtggaaacttttaaaaccttaaacagactctcctacagcaaatagattctctatgtgcagcatgaggaatcactgcatagttctgctccaccaataatatgattggtacagcaccaaaccatggcaaagttagatgttaaagaacataatgttgcaataatgatgttatattggatcttatgcatgaacaaatggaaagtaataatttatcaactgtgatccatgattaaaggcctcattatcactaagaaaatgaacttaatgaaaaaaattataatgagcaatgacaatattcctataaaacctccctctgggtatcaagagacatattacctgccaaggccagattttactttttaaggtttcctctctctcaccaaagacactagtgggcacagaggtgacactagagttagaatgttaccagagtcatttgcattagacagtttatctgatcatgaacatgttcccagggagattagaaaaatgggaagcaggcctctaaagatcctccttggacatttgtaaaaaggctggctgcttctccaggaatgtctgaattaagcaagaattgtgccactgaaatagcttcttgtttttatattaaacaaggaacgattgtgcagtggatgacctggactgaaagatgtatgatggtcaagtttaaacatattaattcctgattgttttcttaaatacccaccctagtcattttttggaaaatattgccagacatatttgacatgaattcatgtttattctggcttctgttcccaagcagaagtggattaaccctggcaatggctggcttcactaactgtacttgcacccagcctgggctgccatctgctcagccaggagaagcagggagtggggtgtgggccctttaagttcgctcagggcacactcattcagtctcccctgaggagaccttgtccccctttgtggggtgaatgctggctgttgcaggccagaggcagtgccaactggagactcatcctctcagctttggtcagcttcagccacgtattcttcatgagtgctggcttctgaacctgcaggatcatttctcagtcagtttatggtgcagggtaattcatttaaaataaagcccattaaaaccccatggctatagaatgggttttaaatagattgtcctggagacacatcattgtatagtctttgcttccctctcatgacctatcttggagtagaatttgtgtactactgtccttgtctttgagtgggtatatgtgtgatggtacagaaatacagtcacatattatattaatatatatagatggataggaaaaacctacagccataggtattgtccaataactgattctagaggtagaactatagagtatacatttccttttttcttgctttgatgatatttttatacaattttatatgctataaaattttcaaaaatatatttgctattttcatttgtagagcttggttaggtttttatcagctcttgtgcccactgtacaaccagattcccctcatctaatttaaatgtcttccctttttcaaactctcctttatgttttcctttttttttcctcccatttttctacccttcacaaattccttcttttgcttctgtccaggtaacccattctgcttgcagtatcattttagcacgtacaaacacaaaataatgggaaaaataaaagcaccttgttccatgcaattcgtatgggaaagttttgggtgtcaaaggtcgctggggatagatggggaggcagaaatagcttgggaaaaggaagcaggaaaaaaggaaatctttatgggaaatcaattacccaaagcaaggtgagtcacctagaggtgaatatgatgttgttattgtcctcccttagtgtacagcacagtttttgctctcacagggtttttctctttaggatgcgtagcaccctatgcattaaatacatagcatcctaaagacaccctactcaccttgagtctgtaggctctttcctgatgagggcactggccatatatgaatggaaaactcaactcatctcctcagctttagatgttgctgctgttcagctggatttgtgagaaatatctggattactatcaagaacatttagcaagactcaaaagagagaggcaagcagaaccaaaacccaaacctcaaccaatgactagctgaataaacaattctttggaggaataaggaaggtatttctggatgtattctgagaatgctcttccaaaagggaagatggtaataatggacttgttttgatttcatggttgtgatagaatgtacttccatgatgtgaaatacacttctggcagataaaatgcaggttgtaatttgcatttgtacatcacagggtaaaagaatggccatccattctgaggaagagtgttctgttctctaagatgctgcttaaccaatgttatccaaatgccatagcatcatatctccaaatacaagattaaatcataaggattcatgtaaaacagagtatactgagctgttctcagaaaaattaatgatgtgtttattgtaaatctttattgcacagatgagcctgacagtccttcaatgtataattttcccccagcatctagtaatgcataagtacttgtatgttcttctgattaccaaataaaaacaatgagttaacctcttaattggaattggaaaaatgaaaa

SEQ ID NO: 22251 - DNA, 605 bp, Homo sapiens
  source 1..605: mol_type = unassigned DNA
aagaaaacatcaagagtttttgagtgtggtgtgtggttcccttcgtccccatcagtcgcttcaatatttcaaaatggatccggttctgtggcgggtgcgagagtgaggctgtgggggacctccaggcccaacctccgcgaagcctcgcggcttctgcgtgccctggccccgggaggataaggatttcccttccctcctacttgcgcgcggagccgagctcttgttgagcccgggaccatggctggttcccgcagctgcctccggagcgcacctggggccatggtttgccgcgatcggagtccgctctaagtcggagtctgggggcgcagaagggggagcgcgccgagaaagtgccgggcaaacgcgcgccgcgcctggctgggcatcgcgagctgggcgaggagacggggaggggacagcccaaactatctcagcttcaccgccagtggtcacctacctgcagctatggagtcgccaaccaaggagattgaagaatttgagagcaactctctgaaatacctgcaaccggaacagatcgagaaaatctggcttcggctccgcgggctgaggaaatataagaaaacgtcccagagattacggtcttt

SEQ ID NO: 22252 - DNA, 2952 bp, Homo sapiens
  source 1..2952: mol_type = unassigned DNA
gctcagccgccgcttttctctcccttctcactttctctcctccccacccagccctccttttcacctccaaaccctttagctgcgcgctgatcgcttctgtggctttgtttgggggtagggggagaatacgaatagacccgaggtgctttctcttggagctggagtccaatcccaatccctatctctatccctatccctgtgcttatccctgggcattagcccgggaccatggctggttcccgcagctgcctccggagcgcacctggggccatggtttgccgcgatcggagtccgctctaagtcggagtctgggggcgcagaagggggagcgcgccgagaaagtgccgggcaaacgcgcgccgcgcctggctgggcatcgcgagctgggcgaggagacggggaggggacagcccaaactatctcagcttcaccgccagtggtcacctacctgcagctatggagtcgccaaccaaggagattgaagaatttgagagcaactctctgaaatacctgcaaccggaacagatcgagaaaatctggcttcggctccgcgggctgaggaaatataagaaaacgtcccagagattacggtctttggtcaaacaattagagagaggggaagcttcagtggtagatcttaagaagaatttggaatatgcagccacagtgcttgaatctgtgtatattgatgaaacaaggagactcctggatacagaggatgagctcagtgacattcagtcagatgctgtgccttctgaggtccgagactggctggcctccaccttcacgcggcagatggggatgatgctcaggaggagcgacgagaagccccggttcaagagcatcgttcacgcagtgcaggctgggatatttgtggagagaatgtatagacggacatcaaacatggttggactgagctatccaccagctgttattgaggcattaaaggatgtggacaagtggtcctttgacgtcttttccctcaatgaggccagtggggatcatgcactgaaatttattttctatgaactactcacacgttatgatctgatcagccgtttcaagatccccatttctgcacttgtctcatttgtggaggccctggaagtgggatacagcaagcacaaaaatccttaccataacttaatgcacgctgccgatgttacacagacagtgcattacctcctctataagacaggagtggcgaactggctgacggagctggagatctttgctataatcttctcagctgccatccatgactacgagcataccggaaccaccaacaatttccacattcagactcggtctgatccagctattctgtataatgacagatctgtactggagaatcaccatttaagtgcagcttatcgccttctgcaagatgacgaggaaatgaatattttgattaacctctcaaaggatgactggagggagtttcgaaccttggtaattgaaatggtgatggccacagatatgtcttgtcacttccaacaaatcaaagcaatgaagactgctctgcagcagccagaagccattgaaaagccaaaagccttatcccttatgctgcatacagcagatattagccatccagcaaaagcatgggacctccatcatcgctggacaatgtcactcctggaggagttcttcagacagggtgacagagaagcagagctggggctgcctttttctcctctgtgtgaccgaaagtccactatggttgctcagtcacaagtaggtttcattgatttcatcgtggaacccaccttcactgtgcttacggacatgaccgagaagattgtgagtccattaatcgatgaaacctctcaaactggtgggacaggacagaggcgttcgagtttgaatagcatcagctcgtcagatgccaagcgatcaggtgtcaagacctctggttcagagggaagtgccccgatcaacaattctgtcatctccgttgactataagagctttaaagctacttggacggaagtggtgcacatcaatcgggagagatggagggccaaggtacccaaagaggagaaggccaagaaggaagcagaggaaaaggctcgcctggccgcagaggagcagcaaaaggaaatggaagccaaaagccaggctgaagaaggcgcatctggcaaagctgagaaaaagacgtctggagaaactaagaatcaagtcaatggaacacgggcaaacaaaagtgacaaccctcgtgggaaaaactccaaagccgagaagtcatcaggagaacagcaacagaatggtgacttcaaagatggtaaaaataagacagacaagaaggatcactctaacatcggaaatgattcaaagaaaacagatggcacaaaacagcgttctcacggctcaccagccccaagcaccagctccacgtgtcgccttacgttgccagtcatcaagcctcctttgcgtcattttaaacgccctgcttacgcatctagctcctatgcaccttcagtctcaaagaaaactgatgagcatcctgcaaggtacaagatgctggatcagaggatcaaaatgaaaaagattcagaacatctcacataactggaacagaaaataggccgaggggaagaagagagggagtgaaggagggtctacctatctgcttctcagcacccactggccacagcaggacacacctccaagacccttggaggctgttggagcaggtactatcctggttgactccaccaaggtgaaatgaaagttgtatgtgattttcctctttgttgttcttgtatagacttttcaattgctgtatgtgggatcagcccagacgccagcaacaaactagcaagaggggtgtttttatggtataagtctctaaaagtctaaattggaccaaaattaaaatgacacaaacttaaaaaaaaataaaattcctctcattgccacttttttcaatctctaaaagttagttgccccc

SEQ ID NO: 22253 - DNA, 4836 bp, Homo sapiens
  source 1..4836: mol_type = unassigned DNA
gctcgcgcgcccaacggaccaggctggggccgtgaggtaactgttgcagccagcggaggtgggaggcgacactgagtctccagtcccgagaggtgcccgagggaaaaggaggcggcagctaaactggtcctggagagaagccccttccgcccctctcctcagccagcatgtcccggactccgccgctcctcagtccgcgcggtggggaccccgggccgtggcggccggcgcagccctgacgggttgcgaaccagggggcgccccgaacgcgggggttggggtctgggagcgcgagcggccgctacggtacgagcggggtgtgctgagtcccgtggccacccccggccccagccatgaggagggacgagcgagacgccaaagccatgcggtccctgcagccgccggatggggccggctcgccccccgagagtctgaggaacggctacgtgaagagctgcgtgagccccttgcggcaggaccctccgcgcggcttcttcttccacctctgccgcttctgcaacgtggagctgcggccgccgccggcctctccccagcagccgcggcgctgctcccccttctgccgggcgcgcctctcgctgggcgccctggctgcctttgtcctcgccctgctgctgggcgcggaacccgagagctgggctgccggggccgcctggctgcggacgctgctgagcgtgtgttcgcacagcttgagccccctcttcagcatcgcctgtgccttcttcttcctcacctgcttcctcacccggaccaagcggggacccggcccgggccggagctgcggctcctggtggctgctggcgctgcccgcctgctgttacctgggggacttcttggtgtggcagtggtggtcttggccttggggggatggcgacgcagggtccgcggccccgcacacgcccccggaggcggcagcgggcaggttgctgctggtgctgagctgcgtagggctgctgctgacgctcgcgcacccgctgcggctccggcactgcgttctggtgctgctcctggccagcttcgtctggtgggtctccttcaccagcctcgggtcgctgccctccgccctcaggccgctgctctccggcctggtggggggcgctggctgcctgctggccctggggttggatcacttctttcaaatcagggaagcgcctcttcatcctcgactgtccagtgccgccgaagaaaaagtgcctgtgatccgaccccggaggaggtccagctgcgtgtcgttaggagaaactgcagccagttactatggcagttgcaaaatattcaggagaccgtcgttgccttgtatttccagagaacagatgattctttgggattgggacttaaaacaatggtataagcctcattatcaaaattctggaggtggaaatggagttgatctttcagtgctaaatgaggctcgcaatatggtgtcagatcttctgactgatccaagccttccaccacaagtcatttcctctctacggagtattagtagcttaatgggtgctttctcaggttcctgtaggccaaagattaatcctctcacaccatttcctggattttacccctgttctgaaatagaggacccagctgagaaaggggatagaaaacttaacaagggactaaataggaatagtttgccaactccacagctgaggagaagctcaggaacttcaggattgctacctgttgaacagtcttcaaggtgggatcgtaataatggcaaaagacctcaccaagaatttggcatttcaagtcaaggatgctatctaaatgggccttttaattcaaatctactgactatcccgaagcaaaggtcatcttctgtatcactgactcaccatgtaggtctcagaagagctggtgttttgtccagtctgagtcctgtgaattcttccaaccatggaccagtgtctactggctctctaactaatcgatcacccatagaatttcctgatactgctgattttcttaataagccaagcgttatcttgcagagatctctgggcaatgcacctaatactccagatttttatcagcaacttagaaattctgatagcaatctgtgtaacagctgtggacatcaaatgctgaaatatgtttcaacatctgaatcagatggtacagattgctgcagtggaaaatcaggtgaagaagaaaacattttctcgaaagaatcattcaaacttatggaaactcaacaagaagaggaaacagagaagaaagacagcagaaaattatttcaggaaggtgataagtggctaacagaagaggcacagagtgaacagcaaacaaatattgaacaggaagtatcactggacctgattttagtagaagagtatgactcattaatagaaaagatgagcaactggaattttccaatttttgaacttgtagaaaagatgggagagaaatcaggaaggattctcagtcaggttatgtataccttatttcaagacactggtttattggaaatatttaaaattcccactcaacaatttatgaactattttcgtgcattagaaaatggctatcgagacattccttatcacaatcgtatacatgccacagatgtgctacatgcagtttggtatctgacaacacggccagttcctggcttacagcagatccacaatggttgtggaacaggaaatgaaacagattctgatggtagaattaaccatgggcgaattgcttatatttcttcgaagagctgctctaatcctgatgagagttatggctgcctgtcttcaaacattcctgcattagaattgatggctctatacgtggcagctgccatgcatgattatgatcacccagggaggacaaatgcatttctagtggctacaaatgcccctcaggcagttttatacaatgacagatctgttctggaaaatcatcatgctgcgtcagcttggaatctatatctttctcgcccagaatacaacttccttcttcatcttgatcatgtggaattcaagcgctttcgttttttagtcattgaagcaatccttgctacggatcttaaaaagcattttgattttctcgcagaattcaatgccaaggcaaatgatgtaaatagtaatggcatagaatggagtaatgaaaatgatcgcctcttggtatgccaggtgtgcatcaaactggcagatataaatggcccagcaaaagttcgagacttgcatttgaaatggacagaaggcattgtcaatgaattttatgagcagggagatgaagaagcaaatcttggtctgcccatcagtccattcatggatcgttcttctcctcaactagcaaaactccaagaatcttttatcacccacatagtgggtcccctgtgtaactcctatgatgctgctggtttgctaccaggtcagtggttagaagcagaagaggataatgatactgaaagtggtgatgatgaagacggtgaagaattagatacagaagatgaagaaatggaaaacaatctaaatccaaaaccaccaagaaggaaaagcagacggcgaatattttgtcagctaatgcaccacctcactgaaaaccacaagatatggaaggaaatcgtagaggaagaagaaaaatgtaaagctgatgggaataaactgcaggtggagaattcctccttacctcaagcagatgagattcaggtaattgaagaggcagatgaagaggaatagcgacagtttgagtaaaagaaaagtcatattgaagaagcccagagggttgtgcccaggggcagaaatcattgcctagtgttcaccggctgactctcaactgaccattcccatgtggacaggccttaatactgtgagaggatccttgctctgctggcagtttcccactcctatgcactttcacaggaactagaaaactattcttaaaccaaaaataccatccgtgttgacccatgttgcagagcccttacttaaatccttcactggtgtatgaatactttgtcataatgctgctttgctgggtagtgagctcttatttttcactgggggtcagctataactaaaaactcaagtgacatatttcagttaccaaagtggccaggaactttttgcttttatgaaaatagattcatattgtatttcccagtgtgtcttttatgtctttgaatgttttggagaaaagtctatgcctgtctaaaaatgaatccagtgttgcctttctgagggatttctgctcaatgcaatacactgttcagtgctattctcccagctaggtttatccatgaaggactgagtgacctttgttgtatttaacaaaatccaggtgcatcaatttctgatgctttttactattgtgtattatctactatgtgtgttttatttctgctgagagtattcaggtttgccatggacatcagaagtttgaattccagtcttatcttatgttccatggctgaattttaaagctgtttaggtttaacaatgaagggatttattctttagtcaaaattgttgtttttactctagctcaggattcgtatttttaaagatttagttaatatgaacacagcacagatttgttagaagaaaaaaaatttgctgtaataccaaaactaacctcatcaaagatacagaaaaaaagaaatatagtgagccctaaaggacacatacattgaataaataattggaacatgtggttatctttagatccacatcttagctgtcatttgttcactctaaaactgatgttcatctttctgttaatttccctctgcctaaagactacatgacagaaatgacctatcactacttattatttctgaagcctaactgcaagactgatttctgagaacaagtaaagaactgg

SEQ ID NO: 22254 - DNA, 3665 bp, Homo sapiens
  source 1..3665: mol_type = unassigned DNA
gaggcggcagctaaactggtcctggagagaagccccttccgcccctctcctcagccagcatgtcccggactccgccgctcctcagtccgcgcggtggggaccccgggccgtggcggccggcgcagccctgacgggttgcgaaccagggggcgccccgaacgcgggggttggggtctgggagcgcgagcggccgctacggtacgagcggggtgtgctgagtcccgtggccacccccggccccagccatgaggagggacgagcgagacgccaaagccatgcggtccctgcagccgccggatggggccggctcgccccccgagagtctgaggaacggctacgtgaagagctgcgtgagccccttgcggcaggaccctccgcgcggcttcttcttccacctctgccgcttctgcaacgtggagctgcggccgccgccggcctctccccagcagccgcggcgctgctcccccttctgccgggcgcgcctctcgctgggcgccctggctgcctttgtcctcgccctgctgctgggcgcggaacccgagagctgggctgccggggccgcctggctgcggacgctgctgagcgtgtgttcgcacagcttgagccccctcttcagcatcgcctgtgccttcttcttcctcacctgcttcctcacccggaccaagcggggacccggcccgggccggagctgcggctcctggtggctgctggcgctgcccgcctgctgttacctgggggacttcttggtgtggcagtggtggtcttggccttggggggatggcgacgcagggtccgcggccccgcacacgcccccggaggcggcagcgggcaggttgctgctggtgctgagctgcgtagggctgctgctgacgctcgcgcacccgctgcggctccggcactgcgttctggtgctgctcctggccagcttcgtctggtgggtctccttcaccagcctcgggtcgctgccctccgccctcaggccgctgctctccggcctggtggggggcgctggctgcctgctggccctggggttggatcacttctttcaaatcagggaagcgcctcttcatcctcgactgtccagtgccgccgaagaaaaagtgcctgtgatccgaccccggaggaggtccagctgcgtgtcgttaggagaaactgcagccagttactatggcagttgcaaaatattcaggagaccgtcgttgccttgtatttccagagaacagatgattctttgggattgggacttaaaacaatggtataagcctcattatcaaaattctggaggtggaaatggagttgatctttcagtgctaaatgaggctcgcaatatggtgtcagatcttctgactgatccaagccttccaccacaaggactaaataggaatagtttgccaactccacagctgaggagaagctcaggaacttcaggattgctacctgttgaacagtcttcaaggtgggatcgtaataatggcaaaagacctcaccaagaatttggcatttcaagtcaaggatgctatctaaatgggccttttaattcaaatctactgactatcccgaagcaaaggtcatcttctgtatcactgactcaccatgtaggtctcagaagagctggtgttttgtccagtctgagtcctgtgaattcttccaaccatggaccagtgtctactggctctctaactaatcgatcacccatagaatttcctgatactgctgattttcttaataagccaagcgttatcttgcagagatctctgggcaatgcacctaatactccagatttttatcagcaacttagaaattctgatagcaatctgtgtaacagctgtggacatcaaatgctgaaatatgtttcaacatctgaatcagatggtacagattgctgcagtggaaaatcaggtgaagaagaaaacattttctcgaaagaatcattcaaacttatggaaactcaacaagaagaggaaacagagaagaaagacagcagaaaattatttcaggaaggtgataagtggctaacagaagaggcacagagtgaacagcaaacaaatattgaacaggaagtatcactggacctgattttagtagaagagtatgactcattaatagaaaagatgagcaactggaattttccaatttttgaacttgtagaaaagatgggagagaaatcaggaaggattctcagtcaggttatgtataccttatttcaagacactggtttattggaaatatttaaaattcccactcaacaatttatgaactattttcgtgcattagaaaatggctatcgagacattccttatcacaatcgtatacatgccacagatgtgctacatgcagtttggtatctgacaacacggccagttcctggcttacagcagatccacaatggttgtggaacaggaaatgaaacagattctgatggtagaattaaccatgggcgaattgcttatatttcttcgaagagctgctctaatcctgatgagagttatggctgcctgtcttcaaacattcctgcattagaattgatggctctatacgtggcagctgccatgcatgattatgatcacccagggaggacaaatgcatttctagtggctacaaatgcccctcaggcagttttatacaatgacagatctgttctggaaaatcatcatgctgcgtcagcttggaatctatatctttctcgcccagaatacaacttccttcttcatcttgatcatgtggaattcaagcgctttcgttttttagtcattgaagcaatccttgctacggatcttaaaaagcattttgattttctcgcagaattcaatgccaaggcaaatgatgtaaatagtaatggcatagaatggagtaatgaaaatgatcgcctcttggtatgccaggtgtgcatcaaactggcagatataaatggcccagcaaaagttcgagacttgcatttgaaatggacagaaggcattgtcaatgaattttatgagcagggagatgaagaagcaaatcttggtctgcccatcagtccattcatggatcgttcttctcctcaactagcaaaactccaagaatcttttatcacccacatagtgggtcccctgtgtaactcctatgatgctgctggtttgctaccaggtcagtggttagaagcagaagaggataatgatactgaaagtggtgatgatgaagacggtgaagaattagatacagaagatgaagaaatggaaaacaatctaaatccaaaaccaccaagaaggaaaagcagacggcgaatattttgtcagctaatgcaccacctcactgaaaaccacaagatatggaaggaaatcgtagaggaagaagaaaaatgtaaagctgatgggaataaactgcaggtggagaattcctccttacctcaagcagatgagattcaggtaattgaagaggcagatgaagaggaatagcgacagtttgagtaaaagaaaagtcatattgaagaagcccagagggttgtgcccaggggcagaaatcattgcctagtgttcaccggctgactctcaactgaccattcccatgtggacaggccttaatactgtgagaggatccttgctctgctggcagtttcccactcctatgcactttcacaggaactagaaaactattcttaaaccaaaaataccatccgtgttgacccatgt

SEQ ID NO: 22255 - DNA, 4591 bp, Homo sapiens
  source 1..4591: mol_type = unassigned DNA
atggcgcggccgcgcggcctaggccgcatcccggagctgcaactggtggccttcccggtggcggtggcggctgaggacgaggcgttcctgcccgagcccctggccccgcgcgcgccccgccgcccgcgttcgccgccctcctcgcccgtcttcttcgccagcccgtccccaactttccgcagacgccttcggcttctccgcagctgccaggatttgggccgccaggcttgggctggggctggcttcgaggcagagaatgggccgacaccatctcctggccgcagccccctggactcgcaggcgagcccaggactcgtgctgcacgccggggcggccaccagccagcgccgggagtccttcctgtaccgctcagacagcgactatgacatgtcacccaagaccatgtcccggaactcatcggtcaccagcgaggcgcacgctgaagacctcatcgtaacaccatttgctcaggtgctggccagcctccggagcgtccgtagcaacttctcactcctgaccaatgtgcccgttcccagtaacaagcggtccccgctgggcggccccacccctgtctgcaaggccacgctgtcagaagaaacgtgtcagcagttggcccgggagactctggaggagctggactggtgtctggagcagctggagaccatgcagacctatcgctctgtcagcgagatggcctcgcacaagttcaaaaggatgttgaaccgtgagctcacacacctgtcagaaatgagcaggtccggaaaccaggtctcagagtacatttccacaacattcctggacaaacagaatgaagtggagatcccatcacccacgatgaaggaacgagaaaaacagcaagcgccgcgaccaagaccctcccagccgcccccgccccctgtaccacacttacagcccatgtcccaaatcacagggttgaaaaagttgatgcatagtaacagcctgaacaactctaacattccccgatttggggtgaagaccgatcaagaagagctcctggcccaagaactggagaacctgaacaagtggggcctgaacatcttttgcgtgtcggattacgctggaggccgctcactcacctgcatcatgtacatgatattccaggagcgggacctgctgaagaaattccgcatccctgtggacacgatggtgacatacatgctgacgctggaggatcactaccacgctgacgtggcctaccataacagcctgcacgcagctgacgtgctgcagtccacccacgtactgctggccacgcctgcactagatgcagtgttcacggacctggagattctcgccgccctcttcgcggctgccatccacgatgtggatcaccctggggtctccaaccagttcctcatcaacaccaattcggagctggcgctcatgtacaacgatgagtcggtgctcgagaatcaccacctggccgtgggcttcaagctgctgcaggaggacaactgcgacatcttccagaacctcagcaagcgccagcggcagagcctacgcaagatggtcatcgacatggtgctggccacggacatgtccaagcacatgaccctcctggctgacctgaagaccatggtggagaccaagaaagtgaccagctcaggggtcctcctgctagataactactccgaccgcatccaggtcctccggaacatggtgcactgtgccgacctcagcaaccccaccaagccgctggagctgtaccgccagtggacagaccgcatcatggccgagttcttccagcagggtgaccgagagcgcgagcgtggcatggaaatcagccccatgtgtgacaagcacactgcctccgtggagaagtctcaggtgggttttattgactacattgtgcacccattgtgggagacctgggcggaccttgtccacccagatgcccaggagatcttggacactttggaggacaaccgggactggtactacagcgccatccggcagagcccatctccgccacccgaggaggagtcaagggggccaggccacccacccctgcctgacaagttccagtttgagctgacgctggaggaggaagaggaggaagaaatatcaatggcccagataccgtgcacagcccaagaggcattgactgcgcagggattgtcaggagtcgaggaagctctggatgcaaccatagcctgggaggcatccccggcccaggagtcgttggaagttatggcacaggaagcatccctggaggccgagctggaggcagtgtatttgacacagcaggcacagtccacaggcagtgcacctgtggctccggatgagttctcgtcccgggaggaattcgtggttgctgtaagccacagcagcccctctgccctggctcttcaaagcccccttctccctgcttggaggaccctgtctgtttcagagcatgccccgggcctcccgggcctcccctccacggcggccgaggtggaggcccaacgagagcaccaggctgccaagagggcttgcagtgcctgcgcagggacatttggggaggacacatccgcactcccagctcctggtggcggggggtcaggtggagaccctacctgatccccagacctctgtccctgttcccctccactcctcccctcactcccctgctcccccgaccacctcctcctctgcctcaaagactcttgtcctcttgtccctcctgagaaaaaagaaaacgaaaagtggggtttttttctgttttctttttttcccctttccccctgcccccacccacggggcctttttttggaggtgggggctggggaatgaggggctgaggtcccggaagggattttatttttttgaattttaattgtaacatttttagaaaaagaacaaaaaaagaaaaaaaaaagaaagaaacacagcaactgtagatgctcctgttcctggttcccgctttccacttccaaatccctcccctcaccttcccccactgccccccaagttccaggctcagtcttccagccgcctggggagtctctacctgggcccaagcaggtgtggggcctccttctgggcttttcttctgaatttagaggatttctagaacgtggtcaggaatagccattctaggcggggctggggccagggtggggggcagtcactgtgggaggtcccagctccagcccccctctggtttgctgcctcctctcccctctaaaaaagtcttccgcttgattttgcacaatcccggcgatactcctggcgatactgactagaaagtcagggagctgggggagctgttcactttaggatacgggggtggtatggaagggagcgttcacaccgccagcctcgggcctgggatttgaggagggccctagacctcctccactctccatcccctttcccttccactttgggttcactttgaattttctccgttttttggggcagtggctctgatccactcacccccccgccccccgccccacttctagctgcttctcctcttgtttctgccttaataattcccacggccacaggcaagggggttgcagtggccgcctgcaccttggatgaggcagggccaggcgcccagaacccccatcctggccgcacccccctttccagggtcctccggaccccaccttccacactctgatcacagcccccctaccttttgccctaggaggaagcaataatggtgtataccctcattctcattcctgggcagcccttccttccaccctggcaccaaaataatttctcctccatccgtaccttgcctagcctctccctctcccccagctagtccctgagcaatacggcagacagatgcaagaccatttttctccaagccatgggggactgtttggaaggaaagccccctctctccctcctcccctcgccctcggcctggttctgcagctggaccgacctcattcatcgcctgccccctacccaattctgagcacacggtactgtagcccccagttcctccctagccttccatccctctgtccaccccagggggaggtaaccccgcactcacactcccttgatgctgtctgtacagggttcatattttgtagcgaaagtcgtttttgtcccagccggcgatcggagtgggccttttctttctttttgttcattctttacctttttttcttttctttctttcttttttgtacatactgtaaggttggtttgtaaattattctacggaggcaaaaagggaaaataaaaacttgcccttccctggctgacccagtcgggaaggtagggaaggaggtctcccgttgggagagtctctgttcctgctgtattatacaaactgtaccatagtcctgggaaaagggtggactcaccgctgttgttttatgggaagtcgtgtcatcctaggggttggggctgggcagagcctgtcccctccccccttctccaggagccagggggtgactggagagacagacccacccccaagcagggctcctctccccagggtgagcacaggacctctgtaagctgcttgtgtattgtccactttgacgatcagtcattcggtccgttgatcaataatccttcgatcttgtctccaattaaaccgaggctttcaccg

SEQ ID NO: 22256 - DNA, 4259 bp, Homo sapiens
  source 1..4259: mol_type = unassigned DNA
tccgcagcctcctcctgggacccttgccctgcccccctcccatgggcacggaccccccaccgcctccacccactgccgcgggggggcccgttggggcccagggctggcgggccatgtaaccagggctgctgctgggagcgcggaggggaagggagcccccagccctgctgggccggcccaggcccctccgcggctcccccttccactacccacctgcccggcaccccctccccagtggttgttaaccccgggactccccaagcccagcctctgtgtgcagcagccccaggcgggctaagtctccaagatgcccttggtggatttcttctgcgagacctgctctaagccttggctggtgggctggtgggaccagttcaaaaggatgttgaaccgtgagctcacacacctgtcagaaatgagcaggtccggaaaccaggtctcagagtacatttccacaacattcctggacaaacagaatgaagtggagatcccatcacccacgatgaaggaacgagaaaaacagcaagcgccgcgaccaagaccctcccagccgcccccgccccctgtaccacacttacagcccatgtcccaaatcacagggttgaaaaagttgatgcatagtaacagcctgaacaactctaacattccccgatttggggtgaagaccgatcaagaagagctcctggcccaagaactggagaacctgaacaagtggggcctgaacatcttttgcgtgtcggattacgctggaggccgctcactcacctgcatcatgtacatgatattccaggagcgggacctgctgaagaaattccgcatccctgtggacacgatggtgacatacatgctgacgctggaggatcactaccacgctgacgtggcctaccataacagcctgcacgcagctgacgtgctgcagtccacccacgtactgctggccacgcctgcactagatgcagtgttcacggacctggagattctcgccgccctcttcgcggctgccatccacgatgtggatcaccctggggtctccaaccagttcctcatcaacaccaattcggagctggcgctcatgtacaacgatgagtcggtgctcgagaatcaccacctggccgtgggcttcaagctgctgcaggaggacaactgcgacatcttccagaacctcagcaagcgccagcggcagagcctacgcaagatggtcatcgacatggtgctggccacggacatgtccaagcacatgaccctcctggctgacctgaagaccatggtggagaccaagaaagtgaccagctcaggggtcctcctgctagataactactccgaccgcatccaggtcctccggaacatggtgcactgtgccgacctcagcaaccccaccaagccgctggagctgtaccgccagtggacagaccgcatcatggccgagttcttccagcagggtgaccgagagcgcgagcgtggcatggaaatcagccccatgtgtgacaagcacactgcctccgtggagaagtctcaggtgggttttattgactacattgtgcacccattgtgggagacctgggcggaccttgtccacccagatgcccaggagatcttggacactttggaggacaaccgggactggtactacagcgccatccggcagagcccatctccgccacccgaggaggagtcaagggggccaggccacccacccctgcctgacaagttccagtttgagctgacgctggaggaggaagaggaggaagaaatatcaatggcccagataccgtgcacagcccaagaggcattgactgcgcagggattgtcaggagtcgaggaagctctggatgcaaccatagcctgggaggcatccccggcccaggagtcgttggaagttatggcacaggaagcatccctggaggccgagctggaggcagtgtatttgacacagcaggcacagtccacaggcagtgcacctgtggctccggatgagttctcgtcccgggaggaattcgtggttgctgtaagccacagcagcccctctgccctggctcttcaaagcccccttctccctgcttggaggaccctgtctgtttcagagcatgccccgggcctcccgggcctcccctccacggcggccgaggtggaggcccaacgagagcaccaggctgccaagagggcttgcagtgcctgcgcagggacatttggggaggacacatccgcactcccagctcctggtggcggggggtcaggtggagaccctacctgatccccagacctctgtccctgttcccctccactcctcccctcactcccctgctcccccgaccacctcctcctctgcctcaaagactcttgtcctcttgtccctcctgagaaaaaagaaaacgaaaagtggggtttttttctgttttctttttttcccctttccccctgcccccacccacggggcctttttttggaggtgggggctggggaatgaggggctgaggtcccggaagggattttatttttttgaattttaattgtaacatttttagaaaaagaacaaaaaaagaaaaaaaaaagaaagaaacacagcaactgtagatgctcctgttcctggttcccgctttccacttccaaatccctcccctcaccttcccccactgccccccaagttccaggctcagtcttccagccgcctggggagtctctacctgggcccaagcaggtgtggggcctccttctgggcttttcttctgaatttagaggatttctagaacgtggtcaggaatagccattctaggcggggctggggccagggtggggggcagtcactgtgggaggtcccagctccagcccccctctggtttgctgcctcctctcccctctaaaaaagtcttccgcttgattttgcacaatcccggcgatactcctggcgatactgactagaaagtcagggagctgggggagctgttcactttaggatacgggggtggtatggaagggagcgttcacaccgccagcctcgggcctgggatttgaggagggccctagacctcctccactctccatcccctttcccttccactttgggttcactttgaattttctccgttttttggggcagtggctctgatccactcacccccccgccccccgccccacttctagctgcttctcctcttgtttctgccttaataattcccacggccacaggcaagggggttgcagtggccgcctgcaccttggatgaggcagggccaggcgcccagaacccccatcctggccgcacccccctttccagggtcctccggaccccaccttccacactctgatcacagcccccctaccttttgccctaggaggaagcaataatggtgtataccctcattctcattcctgggcagcccttccttccaccctggcaccaaaataatttctcctccatccgtaccttgcctagcctctccctctcccccagctagtccctgagcaatacggcagacagatgcaagaccatttttctccaagccatgggggactgtttggaaggaaagccccctctctccctcctcccctcgccctcggcctggttctgcagctggaccgacctcattcatcgcctgccccctacccaattctgagcacacggtactgtagcccccagttcctccctagccttccatccctctgtccaccccagggggaggtaaccccgcactcacactcccttgatgctgtctgtacagggttcatattttgtagcgaaagtcgtttttgtcccagccggcgatcggagtgggccttttctttctttttgttcattctttacctttttttcttttctttctttcttttttgtacatactgtaaggttggtttgtaaattattctacggaggcaaaaagggaaaataaaaacttgcccttccctggctgacccagtcgggaaggtagggaaggaggtctcccgttgggagagtctctgttcctgctgtattatacaaactgtaccatagtcctgggaaaagggtggactcaccgctgttgttttatgggaagtcgtgtcatcctaggggttggggctgggcagagcctgtcccctccccccttctccaggagccagggggtgactggagagacagacccacccccaagcagggctcctctccccagggtgagcacaggacctctgtaagctgcttgtgtattgtccactttgacgatcagtcattcggtccgttgatcaataatccttcgatcttgtctccaattaaaccgaggctttcaccg

SEQ ID NO: 22257 - DNA, 4777 bp, Homo sapiens
  source 1..4777: mol_type = unassigned DNA
cggccgggcgcacccgcggggccctgggctcgctggcttgcgcgcagctgagcggggtgtaggttggaagggccagggccccctggggcgcaagtgggggccggcgccatggaacccccgaccgtcccctcggaaaggagcctgtctctgtcactgcccgggccccgggagggccaggccaccctgaagcctcccccgcagcacctgtggcggcagcctcggacccccatccgtatccagcagcgcggctactccgacagcgcggagcgcgccgagcgggagcggcagccgcaccggcccatagagcgcgccgatgccatggacaccagcgaccggcccggcctgcgcacgacccgcatgtcctggccctcgtccttccatggcactggcaccggcagcggcggcgcgggcggaggcagcagcaggcgcttcgaggcagagaatgggccgacaccatctcctggccgcagccccctggactcgcaggcgagcccaggactcgtgctgcacgccggggcggccaccagccagcgccgggagtccttcctgtaccgctcagacagcgactatgacatgtcacccaagaccatgtcccggaactcatcggtcaccagcgaggcgcacgctgaagacctcatcgtaacaccatttgctcaggtgctggccagcctccggagcgtccgtagcaacttctcactcctgaccaatgtgcccgttcccagtaacaagcggtccccgctgggcggccccacccctgtctgcaaggccacgctgtcagaagaaacgtgtcagcagttggcccgggagactctggaggagctggactggtgtctggagcagctggagaccatgcagacctatcgctctgtcagcgagatggcctcgcacaagttcaaaaggatgttgaaccgtgagctcacacacctgtcagaaatgagcaggtccggaaaccaggtctcagagtacatttccacaacattcctggacaaacagaatgaagtggagatcccatcacccacgatgaaggaacgagaaaaacagcaagcgccgcgaccaagaccctcccagccgcccccgccccctgtaccacacttacagcccatgtcccaaatcacagggttgaaaaagttgatgcatagtaacagcctgaacaactctaacattccccgatttggggtgaagaccgatcaagaagagctcctggcccaagaactggagaacctgaacaagtggggcctgaacatcttttgcgtgtcggattacgctggaggccgctcactcacctgcatcatgtacatgatattccaggagcgggacctgctgaagaaattccgcatccctgtggacacgatggtgacatacatgctgacgctggaggatcactaccacgctgacgtggcctaccataacagcctgcacgcagctgacgtgctgcagtccacccacgtactgctggccacgcctgcactagatgcagtgttcacggacctggagattctcgccgccctcttcgcggctgccatccacgatgtggatcaccctggggtctccaaccagttcctcatcaacaccaattcggagctggcgctcatgtacaacgatgagtcggtgctcgagaatcaccacctggccgtgggcttcaagctgctgcaggaggacaactgcgacatcttccagaacctcagcaagcgccagcggcagagcctacgcaagatggtcatcgacatggtgctggccacggacatgtccaagcacatgaccctcctggctgacctgaagaccatggtggagaccaagaaagtgaccagctcaggggtcctcctgctagataactactccgaccgcatccaggtcctccggaacatggtgcactgtgccgacctcagcaaccccaccaagccgctggagctgtaccgccagtggacagaccgcatcatggccgagttcttccagcagggtgaccgagagcgcgagcgtggcatggaaatcagccccatgtgtgacaagcacactgcctccgtggagaagtctcaggtgggttttattgactacattgtgcacccattgtgggagacctgggcggaccttgtccacccagatgcccaggagatcttggacactttggaggacaaccgggactggtactacagcgccatccggcagagcccatctccgccacccgaggaggagtcaagggggccaggccacccacccctgcctgacaagttccagtttgagctgacgctggaggaggaagaggaggaagaaatatcaatggcccagataccgtgcacagcccaagaggcattgactgcgcagggattgtcaggagtcgaggaagctctggatgcaaccatagcctgggaggcatccccggcccaggagtcgttggaagttatggcacaggaagcatccctggaggccgagctggaggcagtgtatttgacacagcaggcacagtccacaggcagtgcacctgtggctccggatgagttctcgtcccgggaggaattcgtggttgctgtaagccacagcagcccctctgccctggctcttcaaagcccccttctccctgcttggaggaccctgtctgtttcagagcatgccccgggcctcccgggcctcccctccacggcggccgaggtggaggcccaacgagagcaccaggctgccaagagggcttgcagtgcctgcgcagggacatttggggaggacacatccgcactcccagctcctggtggcggggggtcaggtggagaccctacctgatccccagacctctgtccctgttcccctccactcctcccctcactcccctgctcccccgaccacctcctcctctgcctcaaagactcttgtcctcttgtccctcctgagaaaaaagaaaacgaaaagtggggtttttttctgttttctttttttcccctttccccctgcccccacccacggggcctttttttggaggtgggggctggggaatgaggggctgaggtcccggaagggattttatttttttgaattttaattgtaacatttttagaaaaagaacaaaaaaagaaaaaaaaaagaaagaaacacagcaactgtagatgctcctgttcctggttcccgctttccacttccaaatccctcccctcaccttcccccactgccccccaagttccaggctcagtcttccagccgcctggggagtctctacctgggcccaagcaggtgtggggcctccttctgggcttttcttctgaatttagaggatttctagaacgtggtcaggaatagccattctaggcggggctggggccagggtggggggcagtcactgtgggaggtcccagctccagcccccctctggtttgctgcctcctctcccctctaaaaaagtcttccgcttgattttgcacaatcccggcgatactcctggcgatactgactagaaagtcagggagctgggggagctgttcactttaggatacgggggtggtatggaagggagcgttcacaccgccagcctcgggcctgggatttgaggagggccctagacctcctccactctccatcccctttcccttccactttgggttcactttgaattttctccgttttttggggcagtggctctgatccactcacccccccgccccccgccccacttctagctgcttctcctcttgtttctgccttaataattcccacggccacaggcaagggggttgcagtggccgcctgcaccttggatgaggcagggccaggcgcccagaacccccatcctggccgcacccccctttccagggtcctccggaccccaccttccacactctgatcacagcccccctaccttttgccctaggaggaagcaataatggtgtataccctcattctcattcctgggcagcccttccttccaccctggcaccaaaataatttctcctccatccgtaccttgcctagcctctccctctcccccagctagtccctgagcaatacggcagacagatgcaagaccatttttctccaagccatgggggactgtttggaaggaaagccccctctctccctcctcccctcgccctcggcctggttctgcagctggaccgacctcattcatcgcctgccccctacccaattctgagcacacggtactgtagcccccagttcctccctagccttccatccctctgtccaccccagggggaggtaaccccgcactcacactcccttgatgctgtctgtacagggttcatattttgtagcgaaagtcgtttttgtcccagccggcgatcggagtgggccttttctttctttttgttcattctttacctttttttcttttctttctttcttttttgtacatactgtaaggttggtttgtaaattattctacggaggcaaaaagggaaaataaaaacttgcccttccctggctgacccagtcgggaaggtagggaaggaggtctcccgttgggagagtctctgttcctgctgtattatacaaactgtaccatagtcctgggaaaagggtggactcaccgctgttgttttatgggaagtcgtgtcatcctaggggttggggctgggcagagcctgtcccctccccccttctccaggagccagggggtgactggagagacagacccacccccaagcagggctcctctccccagggtgagcacaggacctctgtaagctgcttgtgtattgtccactttgacgatcagtcattcggtccgttgatcaataatccttcgatcttgtctccaattaaaccgaggctttcaccg

SEQ ID NO: 22258 - DNA, 969 bp, Homo sapiens
  source 1..969: mol_type = unassigned DNA
atggtgcttccttcagaccaaggcttcaaactcctaggaaatgttctccagggccctgagccttacaggcttctgacctctggcctccgtctccaccaggaactggagaacctgaacaagtggggcctgaacatcttttgcgtgtcggattacgctggaggccgctcactcacctgcatcatgtacatgatattccaggagcgggacctgctgaagaaattccgcatccctgtggacacgatggtgacatacatgctgacgctggaggatcactaccacgctgacgtggcctaccataacagcctgcacgcagctgacgtgctgcagtccacccacgtactgctggccacgcctgcactagatgcagtgttcacggacctggagattctcgccgccctcttcgcggctgccatccacgatgtggatcaccctggggtctccaaccagttcctcatcaacaccaattcggagctggcgctcatgtacaacgatgagtcggtgctcgagaatcaccacctggccgtgggcttcaagctgctgcaggaggacaactgcgacatcttccagaacctcagcaagcgccagcggcagagcctacgcaagatggtcatcgacatggtgctggccacggacatgtccaagcacatgaccctcctggctgacctgaagaccatggtggagaccaagaaagtgaccagctcaggggtcctcctgctagataactactccgaccgcatccaggtcctccggaacatggtgcactgtgccgacctcagcaaccccaccaagccgctggagctgtaccgccagtggacagaccgcatcatggccgagttcttccagcagggtgaccgagagcgcgagcgtggcatggaaatcagccccatgtgtgacaagcacactgcctccgtggagaagtctcaggtacaggctcggggcattgatggacgggcacagggtgagttttat

SEQ ID NO: 22259 - DNA, 4603 bp, Homo sapiens
  source 1..4603: mol_type = unassigned DNA
atgaagaggagtcgcagtgccctgtccgtggcagggaccggggacgagaggtcgagggagacccccgaatccgaccgtgccaacatgctgggggccgacctgcgtcgccctcgccgccgcctctcgtccggtcctggcctgggctgggcccagcctgagccctcggaccctggggtccctctgccgccacggcccaccaccctgccgctgctgatcccaccgcggatttccatcaccagggccgagaacgacagcttcgaggcagagaatgggccgacaccatctcctggccgcagccccctggactcgcaggcgagcccaggactcgtgctgcacgccggggcggccaccagccagcgccgggagtccttcctgtaccgctcagacagcgactatgacatgtcacccaagaccatgtcccggaactcatcggtcaccagcgaggcgcacgctgaagacctcatcgtaacaccatttgctcaggtgctggccagcctccggagcgtccgtagcaacttctcactcctgaccaatgtgcccgttcccagtaacaagcggtccccgctgggcggccccacccctgtctgcaaggccacgctgtcagaagaaacgtgtcagcagttggcccgggagactctggaggagctggactggtgtctggagcagctggagaccatgcagacctatcgctctgtcagcgagatggcctcgcacaagttcaaaaggatgttgaaccgtgagctcacacacctgtcagaaatgagcaggtccggaaaccaggtctcagagtacatttccacaacattcctggacaaacagaatgaagtggagatcccatcacccacgatgaaggaacgagaaaaacagcaagcgccgcgaccaagaccctcccagccgcccccgccccctgtaccacacttacagcccatgtcccaaatcacagggttgaaaaagttgatgcatagtaacagcctgaacaactctaacattccccgatttggggtgaagaccgatcaagaagagctcctggcccaagaactggagaacctgaacaagtggggcctgaacatcttttgcgtgtcggattacgctggaggccgctcactcacctgcatcatgtacatgatattccaggagcgggacctgctgaagaaattccgcatccctgtggacacgatggtgacatacatgctgacgctggaggatcactaccacgctgacgtggcctaccataacagcctgcacgcagctgacgtgctgcagtccacccacgtactgctggccacgcctgcactagatgcagtgttcacggacctggagattctcgccgccctcttcgcggctgccatccacgatgtggatcaccctggggtctccaaccagttcctcatcaacaccaattcggagctggcgctcatgtacaacgatgagtcggtgctcgagaatcaccacctggccgtgggcttcaagctgctgcaggaggacaactgcgacatcttccagaacctcagcaagcgccagcggcagagcctacgcaagatggtcatcgacatggtgctggccacggacatgtccaagcacatgaccctcctggctgacctgaagaccatggtggagaccaagaaagtgaccagctcaggggtcctcctgctagataactactccgaccgcatccaggtcctccggaacatggtgcactgtgccgacctcagcaaccccaccaagccgctggagctgtaccgccagtggacagaccgcatcatggccgagttcttccagcagggtgaccgagagcgcgagcgtggcatggaaatcagccccatgtgtgacaagcacactgcctccgtggagaagtctcaggtgggttttattgactacattgtgcacccattgtgggagacctgggcggaccttgtccacccagatgcccaggagatcttggacactttggaggacaaccgggactggtactacagcgccatccggcagagcccatctccgccacccgaggaggagtcaagggggccaggccacccacccctgcctgacaagttccagtttgagctgacgctggaggaggaagaggaggaagaaatatcaatggcccagataccgtgcacagcccaagaggcattgactgcgcagggattgtcaggagtcgaggaagctctggatgcaaccatagcctgggaggcatccccggcccaggagtcgttggaagttatggcacaggaagcatccctggaggccgagctggaggcagtgtatttgacacagcaggcacagtccacaggcagtgcacctgtggctccggatgagttctcgtcccgggaggaattcgtggttgctgtaagccacagcagcccctctgccctggctcttcaaagcccccttctccctgcttggaggaccctgtctgtttcagagcatgccccgggcctcccgggcctcccctccacggcggccgaggtggaggcccaacgagagcaccaggctgccaagagggcttgcagtgcctgcgcagggacatttggggaggacacatccgcactcccagctcctggtggcggggggtcaggtggagaccctacctgatccccagacctctgtccctgttcccctccactcctcccctcactcccctgctcccccgaccacctcctcctctgcctcaaagactcttgtcctcttgtccctcctgagaaaaaagaaaacgaaaagtggggtttttttctgttttctttttttcccctttccccctgcccccacccacggggcctttttttggaggtgggggctggggaatgaggggctgaggtcccggaagggattttatttttttgaattttaattgtaacatttttagaaaaagaacaaaaaaagaaaaaaaaaagaaagaaacacagcaactgtagatgctcctgttcctggttcccgctttccacttccaaatccctcccctcaccttcccccactgccccccaagttccaggctcagtcttccagccgcctggggagtctctacctgggcccaagcaggtgtggggcctccttctgggcttttcttctgaatttagaggatttctagaacgtggtcaggaatagccattctaggcggggctggggccagggtggggggcagtcactgtgggaggtcccagctccagcccccctctggtttgctgcctcctctcccctctaaaaaagtcttccgcttgattttgcacaatcccggcgatactcctggcgatactgactagaaagtcagggagctgggggagctgttcactttaggatacgggggtggtatggaagggagcgttcacaccgccagcctcgggcctgggatttgaggagggccctagacctcctccactctccatcccctttcccttccactttgggttcactttgaattttctccgttttttggggcagtggctctgatccactcacccccccgccccccgccccacttctagctgcttctcctcttgtttctgccttaataattcccacggccacaggcaagggggttgcagtggccgcctgcaccttggatgaggcagggccaggcgcccagaacccccatcctggccgcacccccctttccagggtcctccggaccccaccttccacactctgatcacagcccccctaccttttgccctaggaggaagcaataatggtgtataccctcattctcattcctgggcagcccttccttccaccctggcaccaaaataatttctcctccatccgtaccttgcctagcctctccctctcccccagctagtccctgagcaatacggcagacagatgcaagaccatttttctccaagccatgggggactgtttggaaggaaagccccctctctccctcctcccctcgccctcggcctggttctgcagctggaccgacctcattcatcgcctgccccctacccaattctgagcacacggtactgtagcccccagttcctccctagccttccatccctctgtccaccccagggggaggtaaccccgcactcacactcccttgatgctgtctgtacagggttcatattttgtagcgaaagtcgtttttgtcccagccggcgatcggagtgggccttttctttctttttgttcattctttacctttttttcttttctttctttcttttttgtacatactgtaaggttggtttgtaaattattctacggaggcaaaaagggaaaataaaaacttgcccttccctggctgacccagtcgggaaggtagggaaggaggtctcccgttgggagagtctctgttcctgctgtattatacaaactgtaccatagtcctgggaaaagggtggactcaccgctgttgttttatgggaagtcgtgtcatcctaggggttggggctgggcagagcctgtcccctccccccttctccaggagccagggggtgactggagagacagacccacccccaagcagggctcctctccccagggtgagcacaggacctctgtaagctgcttgtgtattgtccactttgacgatcagtcattcggtccgttgatcaataatccttcgatcttgtctccaattaaaccgaggctttcaccg

SEQ ID NO: 22260 - DNA, 2707 bp, Homo sapiens
  source 1..2707: mol_type = unassigned DNA
cgtcacgccccaggagaggcaataggaggccctggccctgccgacatggccaccgcagtcccaacggcgcgctaggttggcgagatgaagaggagtcgcagtgccctgtccgtggcagggaccggggacgagaggtcgagggagacccccgaatccgaccgtgccaacatgctgggggccgacctgcgtcgccctcgccgccgcctctcgtccggtcctggcctgggctgggcccagcctgagccctcggaccctggggtccctctgccgccacggcccaccaccctgccgctgctgatcccaccgcggatttccatcaccagggccgagaacgacagcttcgaggcagagaatgggccgacaccatctcctggccgcagccccctggactcgcaggcgagcccaggactcgtgctgcacgccggggcggccaccagccagcgccgggagtccttcctgtaccgctcagacagcgactatgacatgtcacccaagaccatgtcccggaactcatcggtcaccagcgaggcgcacgctgaagacctcatcgtaacaccatttgctcaggtgctggccagcctccggagcgtccgtagcaacttctcactcctgaccaatgtgcccgttcccagtaacaagcggtccccgctgggcggccccacccctgtctgcaaggccacgctgtcagaagaaacgtgtcagcagttggcccgggagactctggaggagctggactggtgtctggagcagctggagaccatgcagacctatcgctctgtcagcgagatggcctcgcacaagttcaaaaggatgttgaaccgtgagctcacacacctgtcagaaatgagcaggtccggaaaccaggtctcagagtacatttccacaacattcctggacaaacagaatgaagtggagatcccatcacccacgatgaaggaacgagaaaaacagcaagcgccgcgaccaagaccctcccagccgcccccgccccctgtaccacacttacagcccatgtcccaaatcacagggttgaaaaagttgatgcatagtaacagcctgaacaactctaacattccccgatttggggtgaagaccgatcaagaagagctcctggcccaagaactggagaacctgaacaagtggggcctgaacatcttttgcgtgtcggattacgctggaggccgctcactcacctgcatcatgtacatgatattccaggagcgggacctgctgaagaaattccgcatccctgtggacacgatggtgacatacatgctgacgctggaggatcactaccacgctgacgtggcctaccataacagcctgcacgcagctgacgtgctgcagtccacccacgtactgctggccacgcctgcactagatgcagtgttcacggacctggagattctcgccgccctcttcgcggctgccatccacgatgtggatcaccctggggtctccaaccagttcctcatcaacaccaattcggagctggcgctcatgtacaacgatgagtcggtgctcgagaatcaccacctggccgtgggcttcaagctgctgcaggaggacaactgcgacatcttccagaacctcagcaagcgccagcggcagagcctacgcaagatggtcatcgacatggtgctggccacggacatgtccaagcacatgaccctcctggctgacctgaagaccatggtggagaccaagaaagtgaccagctcaggggtcctcctgctagataactactccgaccgcatccaggtcctccggaacatggtgcactgtgccgacctcagcaaccccaccaagccgctggagctgtaccgccagtggacagaccgcatcatggccgagttcttccagcagggtgaccgagagcgcgagcgtggcatggaaatcagccccatgtgtgacaagcacactgcctccgtggagaagtctcaggtgggttttattgactacattgtgcacccattgtgggagacctgggcggaccttgtccacccagatgcccaggagatcttggacactttggaggacaaccgggactggtactacagcgccatccggcagagcccatctccgccacccgaggaggagtcaagggggccaggccacccacccctgcctgacaagttccagtttgagctgacgctggaggaggaagaggaggaagaaatatcaatggcccagataccgtgcacagcccaagaggcattgactgcgcagggattgtcaggagtcgaggaagctctggatgcaaccatagcctgggaggcatccccggcccaggagtcgttggaagttatggcacaggaagcatccctggaggccgagctggaggcagtgtatttgacacagcaggcacagtccacaggcagtgcacctgtggctccggatgagttctcgtcccgggaggaattcgtggttgctgtaagccacagcagcccctctgccctggctcttcaaagcccccttctccctgcttggaggaccctgtctgtttcagagcatgccccgggcctcccgggcctcccctccacggcggccgaggtggaggcccaacgagagcaccaggctgccaagagggcttgcagtgcctgcgcagggacatttggggaggacacatccgcactcccagctcctggtggcggggggtcaggtggagaccctacctgatccccagacctctgtccctgttcccctc

SEQ ID NO: 22261 - DNA, 4486 bp, Homo sapiens
  source 1..4486: mol_type = unassigned DNA
atgcgctccggtgcagcgccccgggcccggccccggccccctgccctggcactgccccccacgggccccgagtccctgacccacttccccttcagcgatgaggacacccgtcggcaccctccgggcagatctgtcagcttcgaggcagagaatgggccgacaccatctcctggccgcagccccctggactcgcaggcgagcccaggactcgtgctgcacgccggggcggccaccagccagcgccgggagtccttcctgtaccgctcagacagcgactatgacatgtcacccaagaccatgtcccggaactcatcggtcaccagcgaggcgcacgctgaagacctcatcgtaacaccatttgctcaggtgctggccagcctccggagcgtccgtagcaacttctcactcctgaccaatgtgcccgttcccagtaacaagcggtccccgctgggcggccccacccctgtctgcaaggccacgctgtcagaagaaacgtgtcagcagttggcccgggagactctggaggagctggactggtgtctggagcagctggagaccatgcagacctatcgctctgtcagcgagatggcctcgcacaagttcaaaaggatgttgaaccgtgagctcacacacctgtcagaaatgagcaggtccggaaaccaggtctcagagtacatttccacaacattcctggacaaacagaatgaagtggagatcccatcacccacgatgaaggaacgagaaaaacagcaagcgccgcgaccaagaccctcccagccgcccccgccccctgtaccacacttacagcccatgtcccaaatcacagggttgaaaaagttgatgcatagtaacagcctgaacaactctaacattccccgatttggggtgaagaccgatcaagaagagctcctggcccaagaactggagaacctgaacaagtggggcctgaacatcttttgcgtgtcggattacgctggaggccgctcactcacctgcatcatgtacatgatattccaggagcgggacctgctgaagaaattccgcatccctgtggacacgatggtgacatacatgctgacgctggaggatcactaccacgctgacgtggcctaccataacagcctgcacgcagctgacgtgctgcagtccacccacgtactgctggccacgcctgcactagatgcagtgttcacggacctggagattctcgccgccctcttcgcggctgccatccacgatgtggatcaccctggggtctccaaccagttcctcatcaacaccaattcggagctggcgctcatgtacaacgatgagtcggtgctcgagaatcaccacctggccgtgggcttcaagctgctgcaggaggacaactgcgacatcttccagaacctcagcaagcgccagcggcagagcctacgcaagatggtcatcgacatggtgctggccacggacatgtccaagcacatgaccctcctggctgacctgaagaccatggtggagaccaagaaagtgaccagctcaggggtcctcctgctagataactactccgaccgcatccaggtcctccggaacatggtgcactgtgccgacctcagcaaccccaccaagccgctggagctgtaccgccagtggacagaccgcatcatggccgagttcttccagcagggtgaccgagagcgcgagcgtggcatggaaatcagccccatgtgtgacaagcacactgcctccgtggagaagtctcaggtgggttttattgactacattgtgcacccattgtgggagacctgggcggaccttgtccacccagatgcccaggagatcttggacactttggaggacaaccgggactggtactacagcgccatccggcagagcccatctccgccacccgaggaggagtcaagggggccaggccacccacccctgcctgacaagttccagtttgagctgacgctggaggaggaagaggaggaagaaatatcaatggcccagataccgtgcacagcccaagaggcattgactgcgcagggattgtcaggagtcgaggaagctctggatgcaaccatagcctgggaggcatccccggcccaggagtcgttggaagttatggcacaggaagcatccctggaggccgagctggaggcagtgtatttgacacagcaggcacagtccacaggcagtgcacctgtggctccggatgagttctcgtcccgggaggaattcgtggttgctgtaagccacagcagcccctctgccctggctcttcaaagcccccttctccctgcttggaggaccctgtctgtttcagagcatgccccgggcctcccgggcctcccctccacggcggccgaggtggaggcccaacgagagcaccaggctgccaagagggcttgcagtgcctgcgcagggacatttggggaggacacatccgcactcccagctcctggtggcggggggtcaggtggagaccctacctgatccccagacctctgtccctgttcccctccactcctcccctcactcccctgctcccccgaccacctcctcctctgcctcaaagactcttgtcctcttgtccctcctgagaaaaaagaaaacgaaaagtggggtttttttctgttttctttttttcccctttccccctgcccccacccacggggcctttttttggaggtgggggctggggaatgaggggctgaggtcccggaagggattttatttttttgaattttaattgtaacatttttagaaaaagaacaaaaaaagaaaaaaaaaagaaagaaacacagcaactgtagatgctcctgttcctggttcccgctttccacttccaaatccctcccctcaccttcccccactgccccccaagttccaggctcagtcttccagccgcctggggagtctctacctgggcccaagcaggtgtggggcctccttctgggcttttcttctgaatttagaggatttctagaacgtggtcaggaatagccattctaggcggggctggggccagggtggggggcagtcactgtgggaggtcccagctccagcccccctctggtttgctgcctcctctcccctctaaaaaagtcttccgcttgattttgcacaatcccggcgatactcctggcgatactgactagaaagtcagggagctgggggagctgttcactttaggatacgggggtggtatggaagggagcgttcacaccgccagcctcgggcctgggatttgaggagggccctagacctcctccactctccatcccctttcccttccactttgggttcactttgaattttctccgttttttggggcagtggctctgatccactcacccccccgccccccgccccacttctagctgcttctcctcttgtttctgccttaataattcccacggccacaggcaagggggttgcagtggccgcctgcaccttggatgaggcagggccaggcgcccagaacccccatcctggccgcacccccctttccagggtcctccggaccccaccttccacactctgatcacagcccccctaccttttgccctaggaggaagcaataatggtgtataccctcattctcattcctgggcagcccttccttccaccctggcaccaaaataatttctcctccatccgtaccttgcctagcctctccctctcccccagctagtccctgagcaatacggcagacagatgcaagaccatttttctccaagccatgggggactgtttggaaggaaagccccctctctccctcctcccctcgccctcggcctggttctgcagctggaccgacctcattcatcgcctgccccctacccaattctgagcacacggtactgtagcccccagttcctccctagccttccatccctctgtccaccccagggggaggtaaccccgcactcacactcccttgatgctgtctgtacagggttcatattttgtagcgaaagtcgtttttgtcccagccggcgatcggagtgggccttttctttctttttgttcattctttacctttttttcttttctttctttcttttttgtacatactgtaaggttggtttgtaaattattctacggaggcaaaaagggaaaataaaaacttgcccttccctggctgacccagtcgggaaggtagggaaggaggtctcccgttgggagagtctctgttcctgctgtattatacaaactgtaccatagtcctgggaaaagggtggactcaccgctgttgttttatgggaagtcgtgtcatcctaggggttggggctgggcagagcctgtcccctccccccttctccaggagccagggggtgactggagagacagacccacccccaagcagggctcctctccccagggtgagcacaggacctctgtaagctgcttgtgtattgtccactttgacgatcagtcattcggtccgttgatcaataatccttcgatcttgtctccaattaaaccgaggctttcaccg

SEQ ID NO: 22262 - DNA, 3998 bp, Homo sapiens
  source 1..3998: mol_type = unassigned DNA
gtaatccttcagctctggtggtaagggagatgcagtgagctcccggctgggagagagggttattttgcaaaactcccctggtaccgtgcccgcggaatattgcaggaggtctgtgaggtattaaaaagtgtcagcaaactgcattgaataacagacatcctaagaggggatattttccacctctataatgaagaaaagcaggagtgtgatgacggtgatggctgatgataatgttaaagattattttgaatgtagcttgagtaaatcctacagttcttccagtaacacacttgggatcgacctctggagagggagaaggtgttgctcaggaaacttacagttaccaccactgtctcaaagacagagtgaaagggcaaggactcctgagggagatggtatttccaggccgaccacactgcctttgacaacgcttccaagcattgctattacaactgtaagccaggagtgctttgatgtggaaaatggcccttccccaggtcggagtccactggatccccaggccagctcttccgctgggctggtacttcacgccacctttcctgggcacagccagcgcagagagtcatttctctacagatcagacagcgactatgacttgtcaccaaaggcgatgtcgagaaactcttctcttccaagcgagcaacacggcgatgacttgattgtaactccttttgcccaggtccttgccagcttgcgaagtgtgagaaacaacttcactatactgacaaaccttcatggtacatctaacaagaggtccccagctgctagtcagcctcctgtctccagagtcaacccacaagaagaatcttatcaaaaattagcaatggaaacgctggaggaattagactggtgtttagaccagctagagaccatacagacctaccggtctgtcagtgagatggcttctaacaagttcaaaagaatgctgaaccgggagctgacacacctctcagagatgagccgatcagggaaccaggtgtctgaatacatttcaaatactttcttagacaagcagaatgatgtggagatcccatctcctacccagaaagacagggagaaaaagaaaaagcagcagctcatgacccagataagtggagtgaagaaattaatgcatagttcaagcctaaacaatacaagcatctcacgctttggagtcaacactgaaaatgaagatcacctggccaaggagctggaagacctgaacaaatggggtcttaacatctttaatgtggctggatattctcacaatagacccctaacatgcatcatgtatgctatattccaggaaagagacctcctaaagacattcagaatctcatctgacacatttataacctacatgatgactttagaagaccattaccattctgacgtggcatatcacaacagcctgcacgctgctgatgtagcccagtcgacccatgttctcctttctacaccagcattagacgctgtcttcacagatttggagatcctggctgccatttttgcagctgccatccatgacgttgatcatcctggagtctccaatcagtttctcatcaacacaaattcagaacttgctttgatgtataatgatgaatctgtgttggaaaatcatcaccttgctgtgggtttcaaactgctgcaagaagaacactgtgacatcttcatgaatctcaccaagaagcagcgtcagacactcaggaagatggttattgacatggtgttagcaactgatatgtctaaacatatgagcctgctggcagacctgaagacaatggtagaaacgaagaaagttacaagttcaggcgttcttctcctagacaactataccgatcgcattcaggtccttcgcaacatggtacactgtgcagacctgagcaaccccaccaagtccttggaattgtatcggcaatggacagaccgcatcatggaggaatttttccagcagggagacaaagagcgggagaggggaatggaaattagcccaatgtgtgataaacacacagcttctgtggaaaaatcccaggttggtttcatcgactacattgtccatccattgtgggagacatgggcagatttggtacagcctgatgctcaggacattctcgataccttagaagataacaggaactggtatcagagcatgatacctcaaagtccctcaccaccactggacgagcagaacagggactgccagggtctgatggagaagtttcagtttgaactgactctcgatgaggaagattctgaaggacctgagaaggagggagagggacacagctatttcagcagcacaaagacgctttgtgtgattgatccagaaaacagagattccctgggagagactgacatagacattgcaacagaagacaagtcccccgtggatacataatccccctctccctgtggagatgaacattctatccttgatgagcatgccagctatgtggtagggccagcccaccatgggggccaagacctgcacaggacaagggccacctggcctttcagttacttgagtttggagtcagaaagcaagaccaggaagcaaatagcagctcaggaaatcccacggttgacttgccttgatggcaagcttggtggagagggctgaagctgttgctgggggccgattctgatcaagacacatggcttgaaaatggaagacacaaaactgagagatcattctgcactaagtttcgggaacttatccccgacagtgactgaactcactgactaataacttcatttatgaatcttctcacttgtccctttgtctgccaacctgtgtgccttttttgtaaaacattttcatgtctttaaaatgcctgttgaatacctggagtttagtatcaacttctacacagataagctttcaaagttgacaaacttttttgactctttctggaaaagggaaagaaaatagtcttccttctttcttgggcaatatccttcactttactacagttacttttgcaaacagacagaaaggatacacttctaaccacattttacttccttcccctgttgtccagtccaactccacagtcactcttaaaacttctctctgtttgcctgcctccaacagtacttttaactttttgctgtaaacagaataaaattgaacaaattagggggtagaaaggagcagtggtgtcgttcaccgtgagagtctgcatagaactcagcagtgtgccctgctgtgtcttggaccctgccccccacaggagttgtacagtccctggccctgttccctacctcctctcttcaccccgttaggctgttttcaatgtaatgctgccgtccttctcttgcactgccttctgcgctaacacctccattcctgtttataaccgtgtatttattacttaatgtatataatgtaatgttttgtaagttattaatttatatatctaacattgcctgccaatggtggtgttaaatttgtgtagaaaactctgcctaagagttacgactttttcttgtaatgttttgtattgtgtattatataacccaaacgtcacttagtagagacatatggcccccttggcagagaggacaggggtgggcttttgttcaaagggtctgccctttccctgcctgagttgctacttctgcacaacccctttatgaaccagttttggaaacaatattctcacattagatactaaatggtttatactgagcttttacttttgtatagcttgataggggcagggggcaatgggatgtagtttttacccaggttctatccaaatctatgtgggcatgagttgggttataactggatcctactatcattgtggctttggttcaaaaggaaacactacatttgctcacagatgattcttctgaatgctcccgaactactgactttgaagaggtagcctcctgcctgccattaagcaggaatgtcatgttccagttcattacaaaagaaaacaataaaacaatgtgaatttttataataaaatgtgaactgatgtagcaaa

SEQ ID NO: 22263 - DNA, 3175 bp, Homo sapiens
  source 1..3175: mol_type = unassigned DNA
gcggccgcggcggtgcagcagaggcgcctcgggcaggaggagggcggcttctgcgagggcagcctgaggtattaaaaagtgtcagcaaactgcattgaataacagacatcctaagaggggatattttccacctctataatgaagaaaagcaggagtgtgatgacggtgatggctgatgataatgttaaagattattttgaatgtagcttgagtaaatcctacagttcttccagtaacacacttgggatcgacctctggagagggagaaggtgttgctcaggaaacttacagttaccaccactgtctcaaagacagagtgaaagggcaaggactcctgagggagatggtatttccaggccgaccacactgcctttgacaacgcttccaagcattgctattacaactgtaagccaggagtgctttgatgtggaaaatggcccttccccaggtcggagtccactggatccccaggccagctcttccgctgggctggtacttcacgccacctttcctgggcacagccagcgcagagagtcatttctctacagatcagacagcgactatgacttgtcaccaaaggcgatgtcgagaaactcttctcttccaagcgagcaacacggcgatgacttgattgtaactccttttgcccaggtccttgccagcttgcgaagtgtgagaaacaacttcactatactgacaaaccttcatggtacatctaacaagaggtccccagctgctagtcagcctcctgtctccagagtcaacccacaagaagaatcttatcaaaaattagcaatggaaacgctggaggaattagactggtgtttagaccagctagagaccatacagacctaccggtctgtcagtgagatggcttctaacaagttcaaaagaatgctgaaccgggagctgacacacctctcagagatgagccgatcagggaaccaggtgtctgaatacatttcaaatactttcttagacaagcagaatgatgtggagatcccatctcctacccagaaagacagggagaaaaagaaaaagcagcagctcatgacccagataagtggagtgaagaaattaatgcatagttcaagcctaaacaatacaagcatctcacgctttggagtcaacactgaaaatgaagatcacctggccaaggagctggaagacctgaacaaatggggtcttaacatctttaatgtggctggatattctcacaatagacccctaacatgcatcatgtatgctatattccaggaaagagacctcctaaagacattcagaatctcatctgacacatttataacctacatgatgactttagaagaccattaccattctgacgtggcatatcacaacagcctgcacgctgctgatgtagcccagtcgacccatgttctcctttctacaccagcattagacgctgtcttcacagatttggagatcctggctgccatttttgcagctgccatccatgacgttgatcatcctggagtctccaatcagtttctcatcaacacaaattcagaacttgctttgatgtataatgatgaatctgtgttggaaaatcatcaccttgctgtgggtttcaaactgctgcaagaagaacactgtgacatcttcatgaatctcaccaagaagcagcgtcagacactcaggaagatggttattgacatggtgttagcaactgatatgtctaaacatatgagcctgctggcagacctgaagacaatggtagaaacgaagaaagttacaagttcaggcgttcttctcctagacaactataccgatcgcattcaggtccttcgcaacatggtacactgtgcagacctgagcaaccccaccaagtccttggaattgtatcggcaatggacagaccgcatcatggaggaatttttccagcagggagacaaagagcgggagaggggaatggaaattagcccaatgtgtgataaacacacagcttctgtggaaaaatcccaggttggtttcatcgactacattgtccatccattgtgggagacatgggcagatttggtacagcctgatgctcaggacattctcgataccttagaagataacaggaactggtatcagagcatgatacctcaaagtccctcaccaccactggacgagcagaacagggactgccagggtctgatggagaagtttcagtttgaactgactctcgatgaggaagattctgaaggacctgagaaggagggagagggacacagctatttcagcagcacaaagacgctttgtgtgattgatccagaaaacagagattccctgggagagactgacatagacattgcaacagaagacaagtcccccgtggatacataatccccctctccctgtggagatgaacattctatccttgatgagcatgccagctatgtggtagggccagcccaccatgggggccaagacctgcacaggacaagggccacctggcctttcagttacttgagtttggagtcagaaagcaagaccaggaagcaaatagcagctcaggaaatcccacggttgacttgccttgatggcaagcttggtggagagggctgaagctgttgctgggggccgattctgatcaagacacatggcttgaaaatggaagacacaaaactgagagatcattctgcactaagtttcgggaacttatccccgacagtgactgaactcactgactaataacttcatttatgaatcttctcacttgtccctttgtctgccaacctgtgtgccttttttgtaaaacattttcatgtctttaaaatgcctgttgaatacctggagtttagtatcaacttctacacagataagctttcaaagttgacaaacttttttgactctttctggaaaagggaaagaaaatagtcttccttctttcttgggcaatatccttcactttactacagttacttttgcaaacagacagaaaggatacacttctaaccacattttacttccttcccctgttgtccagtccaactccacagtcactcttaaaacttctctctgtttgcctgcctccaacagtacttttaactttttgctgtaaacagaataaaattgaacaaattagggggtagaaaggagcagtggtgtcgttcaccgtgagagtctgcatagaactcagcagtgtgccctgctgtgtcttggaccctgc

SEQ ID NO: 22264 - DNA, 3979 bp, Homo sapiens
  source 1..3979: mol_type = unassigned DNA
aaccagttttcacccgaattttgactgtttcatttagaagaaaagcaaaatgagaaaaagctttcctcatttctccttgagatggcaaagcactcagaaatgacatcacataccctaaagaaccctgggatgactaaggcagagagagtctgagaaaactctttggtgcttctgcctttagttttaggacacatttatgcagatgagcttataagagaccgttccctccgccttcttcctcagaggaagtttcttggtagatcaccgacacctcatccaggcggggggttggggggaaacttggcaccagccatcccaggcagagcaccactgtgatttgttctcctggtggagagagctggaaggaaggagccagcgtgcaaataatgaaggagcacgggggcaccttcagtagcaccggaatcagcggtggtagcggtgactctgctatggacagcctgcagccgctccagcctaactacatgcctgtgtgtttgtttgcagaagaatcttatcaaaaattagcaatggaaacgctggaggaattagactggtgtttagaccagctagagaccatacagacctaccggtctgtcagtgagatggcttctaacaagttcaaaagaatgctgaaccgggagctgacacacctctcagagatgagccgatcagggaaccaggtgtctgaatacatttcaaatactttcttagacaagcagaatgatgtggagatcccatctcctacccagaaagacagggagaaaaagaaaaagcagcagctcatgacccagataagtggagtgaagaaattaatgcatagttcaagcctaaacaatacaagcatctcacgctttggagtcaacactgaaaatgaagatcacctggccaaggagctggaagacctgaacaaatggggtcttaacatctttaatgtggctggatattctcacaatagacccctaacatgcatcatgtatgctatattccaggaaagagacctcctaaagacattcagaatctcatctgacacatttataacctacatgatgactttagaagaccattaccattctgacgtggcatatcacaacagcctgcacgctgctgatgtagcccagtcgacccatgttctcctttctacaccagcattagacgctgtcttcacagatttggagatcctggctgccatttttgcagctgccatccatgacgttgatcatcctggagtctccaatcagtttctcatcaacacaaattcagaacttgctttgatgtataatgatgaatctgtgttggaaaatcatcaccttgctgtgggtttcaaactgctgcaagaagaacactgtgacatcttcatgaatctcaccaagaagcagcgtcagacactcaggaagatggttattgacatggtgttagcaactgatatgtctaaacatatgagcctgctggcagacctgaagacaatggtagaaacgaagaaagttacaagttcaggcgttcttctcctagacaactataccgatcgcattcaggtccttcgcaacatggtacactgtgcagacctgagcaaccccaccaagtccttggaattgtatcggcaatggacagaccgcatcatggaggaatttttccagcagggagacaaagagcgggagaggggaatggaaattagcccaatgtgtgataaacacacagcttctgtggaaaaatcccaggttggtttcatcgactacattgtccatccattgtgggagacatgggcagatttggtacagcctgatgctcaggacattctcgataccttagaagataacaggaactggtatcagagcatgatacctcaaagtccctcaccaccactggacgagcagaacagggactgccagggtctgatggagaagtttcagtttgaactgactctcgatgaggaagattctgaaggacctgagaaggagggagagggacacagctatttcagcagcacaaagacgctttgtgtgattgatccagaaaacagagattccctgggagagactgacatagacattgcaacagaagacaagtcccccgtggatacataatccccctctccctgtggagatgaacattctatccttgatgagcatgccagctatgtggtagggccagcccaccatgggggccaagacctgcacaggacaagggccacctggcctttcagttacttgagtttggagtcagaaagcaagaccaggaagcaaatagcagctcaggaaatcccacggttgacttgccttgatggcaagcttggtggagagggctgaagctgttgctgggggccgattctgatcaagacacatggcttgaaaatggaagacacaaaactgagagatcattctgcactaagtttcgggaacttatccccgacagtgactgaactcactgactaataacttcatttatgaatcttctcacttgtccctttgtctgccaacctgtgtgccttttttgtaaaacattttcatgtctttaaaatgcctgttgaatacctggagtttagtatcaacttctacacagataagctttcaaagttgacaaacttttttgactctttctggaaaagggaaagaaaatagtcttccttctttcttgggcaatatccttcactttactacagttacttttgcaaacagacagaaaggatacacttctaaccacattttacttccttcccctgttgtccagtccaactccacagtcactcttaaaacttctctctgtttgcctgcctccaacagtacttttaactttttgctgtaaacagaataaaattgaacaaattagggggtagaaaggagcagtggtgtcgttcaccgtgagagtctgcatagaactcagcagtgtgccctgctgtgtcttggaccctgccccccacaggagttgtacagtccctggccctgttccctacctcctctcttcaccccgttaggctgttttcaatgtaatgctgccgtccttctcttgcactgccttctgcgctaacacctccattcctgtttataaccgtgtatttattacttaatgtatataatgtaatgttttgtaagttattaatttatatatctaacattgcctgccaatggtggtgttaaatttgtgtagaaaactctgcctaagagttacgactttttcttgtaatgttttgtattgtgtattatataacccaaacgtcacttagtagagacatatggcccccttggcagagaggacaggggtgggcttttgttcaaagggtctgccctttccctgcctgagttgctacttctgcacaacccctttatgaaccagttttggaaacaatattctcacattagatactaaatggtttatactgagcttttacttttgtatagcttgataggggcagggggcaatgggatgtagtttttacccaggttctatccaaatctatgtgggcatgagttgggttataactggatcctactatcattgtggctttggttcaaaaggaaacactacatttgctcacagatgattcttctgaatgctcccgaactactgactttgaagaggtagcctcctgcctgccattaagcaggaatgtcatgttccagttcattacaaaagaaaacaataaaacaatgtgaatttttataataaaatgtgaactgatgtagcaaattacgcaaatgtgaagcctcttctgataacacttgttaggcctcttactgatgtcagtttcagtttgtaaaatatgtttcatgctttcagttcagcattgtgactcagtaattacagaaaatggcacaaatgtgcatgaccaatgtatgtctatgaacactgcattgtttcaggtggacattttatcattttcaaatgtttctcacaatgtatgttatagtattattattatatattgtgttcaaatgcattctaaagagacttttatatgaggtgaataaagaaaagcatgattaga

SEQ ID NO: 22265 - DNA, 2211 bp, Homo sapiens
  source 1..2211: mol_type = unassigned DNA
atgaagaaaagcaggagtgtgatgacggtgatggctgatgataatgttaaagattattttgaatgtagcttgagtaaatcctacagttcttccagtaacacacttgggatcgacctctggagagggagaaggtgttgctcaggaaacttacagttaccaccactgtctcaaagacagagtgaaagggcaaggactcctgagggagatggtatttccaggccgaccacactgcctttgacaacgcttccaagcattgctattacaactgtaagccaggagtgctttgatgtggaaaatggcccttccccaggtcggagtccactggatccccaggccagctcttccgctgggctggtacttcacgccacctttcctgggcacagccagcgcagagagtcatttctctacagatcagacagcgactatgacttgtcaccaaaggcgatgtcgagaaactcttctcttccaagcgagcaacacggcgatgacttgattgtaactccttttgcccaggtccttgccagcttgcgaagtgtgagaaacaacttcactatactgacaaaccttcatggtacatctaacaagaggtccccagctgctagtcagcctcctgtctccagagtcaacccacaagaagaatcttatcaaaaattagcaatggaaacgctggaggaattagactggtgtttagaccagctagagaccatacagacctaccggtctgtcagtgagatggcttctaacaagttcaaaagaatgctgaaccgggagctgacacacctctcagagatgagccgatcagggaaccaggtgtctgaatacatttcaaatactttcttagacaagcagaatgatgtggagatcccatctcctacccagaaagacagggagaaaaagaaaaagcagcagctcatgacccagataagtggagtgaagaaattaatgcatagttcaagcctaaacaatacaagcatctcacgctttggagtcaacactgaaaatgaagatcacctggccaaggagctggaagacctgaacaaatggggtcttaacatctttaatgtggctggatattctcacaatagacccctaacatgcatcatgtatgctatattccaggaaagagacctcctaaagacattcagaatctcatctgacacatttataacctacatgatgactttagaagaccattaccattctgacgtggcatatcacaacagcctgcacgctgctgatgtagcccagtcgacccatgttctcctttctacaccagcattagacgctgtcttcacagatttggagatcctggctgccatttttgcagctgccatccatgacgttgatcatcctggagtctccaatcagtttctcatcaacacaaattcagaacttgctttgatgtataatgatgaatctgtgttggaaaatcatcaccttgctgtgggtttcaaactgctgcaagaagaacactgtgacatcttcatgaatctcaccaagaagcagcgtcagacactcaggaagatggttattgacatggtgttagcaactgatatgtctaaacatatgagcctgctggcagacctgaagacaatggtagaaacgaagaaagttacaagttcaggcgttcttctcctagacaactataccgatcgcattcaggtccttcgcaacatggtacactgtgcagacctgagcaaccccaccaagtccttggaattgtatcggcaatggacagaccgcatcatggaggaatttttccagcagggagacaaagagcgggagaggggaatggaaattagcccaatgtgtgataaacacacagcttctgtggaaaaatcccaggttggtttcatcgactacattgtccatccattgtgggagacatgggcagatttggtacagcctgatgctcaggacattctcgataccttagaagataacaggaactggtatcagagcatgatacctcaaagtccctcaccaccactggacgagcagaacagggactgccagggtctgatggagaagtttcagtttgaactgactctcgatgaggaagattctgaaggacctgagaaggagggagagggacacagctatttcagcagcacaaagacgctttgtgtgattgatccagaaaacagagattccctgggagagactgacatagacattgcaacagaagacaagtcccccgtggatacataa

SEQ ID NO: 22266 - DNA, 4546 bp, Homo sapiens
  source 1..4546: mol_type = unassigned DNA
cacatgctggacggattctgggtctgctctttgtgcaaacaaaacaagtgactaggttttgcttactatccattagtgaatgcagcttgtttaataagattttttttaaaaaaatgcatgtaaaggatttatcaaaagcctttatgaatatttcatgagttgatatattcagctgaatgaattcagtgagtgtcagtgtgtagcttgcagacaaacctcatccacaaggaggctactgacattggaagcactttggcgcattttcagaggcaaagccagcctgataaagctccttgtgacagcctgacttgctattcttcgagtatgctgctcttgctctaagacgctcatacattggagtcacagcttcgtaaattaaactggaaatagtttgcagacttatcagtcttctgacctgcagcagtgtctctgctatgtttgagatttttgttttggatggtgaaagctagcactccttacaagacatgacagcaaaagattcttcaaaggaacttactgcttctgaacctgaggtttgcataaagactttcaaggagcaaatgcatttagaacttgagcttccgagattaccaggaaacagacctacatctcctaaaatttctccacgcagttcaccaaggaactcaccatgctttttcagaaagttgctggtgaataaaagcattcggcagcgtcgtcgcttcactgtggctcatacatgctttgatgtggaaaatggcccttccccaggtcggagtccactggatccccaggccagctcttccgctgggctggtacttcacgccacctttcctgggcacagccagcgcagagagtcatttctctacagatcagacagcgactatgacttgtcaccaaaggcgatgtcgagaaactcttctcttccaagcgagcaacacggcgatgacttgattgtaactccttttgcccaggtccttgccagcttgcgaagtgtgagaaacaacttcactatactgacaaaccttcatggtacatctaacaagaggtccccagctgctagtcagcctcctgtctccagagtcaacccacaagaagaatcttatcaaaaattagcaatggaaacgctggaggaattagactggtgtttagaccagctagagaccatacagacctaccggtctgtcagtgagatggcttctaacaagttcaaaagaatgctgaaccgggagctgacacacctctcagagatgagccgatcagggaaccaggtgtctgaatacatttcaaatactttcttagacaagcagaatgatgtggagatcccatctcctacccagaaagacagggagaaaaagaaaaagcagcagctcatgacccagataagtggagtgaagaaattaatgcatagttcaagcctaaacaatacaagcatctcacgctttggagtcaacactgaaaatgaagatcacctggccaaggagctggaagacctgaacaaatggggtcttaacatctttaatgtggctggatattctcacaatagacccctaacatgcatcatgtatgctatattccaggaaagagacctcctaaagacattcagaatctcatctgacacatttataacctacatgatgactttagaagaccattaccattctgacgtggcatatcacaacagcctgcacgctgctgatgtagcccagtcgacccatgttctcctttctacaccagcattagacgctgtcttcacagatttggagatcctggctgccatttttgcagctgccatccatgacgttgatcatcctggagtctccaatcagtttctcatcaacacaaattcagaacttgctttgatgtataatgatgaatctgtgttggaaaatcatcaccttgctgtgggtttcaaactgctgcaagaagaacactgtgacatcttcatgaatctcaccaagaagcagcgtcagacactcaggaagatggttattgacatggtgttagcaactgatatgtctaaacatatgagcctgctggcagacctgaagacaatggtagaaacgaagaaagttacaagttcaggcgttcttctcctagacaactataccgatcgcattcaggtccttcgcaacatggtacactgtgcagacctgagcaaccccaccaagtccttggaattgtatcggcaatggacagaccgcatcatggaggaatttttccagcagggagacaaagagcgggagaggggaatggaaattagcccaatgtgtgataaacacacagcttctgtggaaaaatcccaggttggtttcatcgactacattgtccatccattgtgggagacatgggcagatttggtacagcctgatgctcaggacattctcgataccttagaagataacaggaactggtatcagagcatgatacctcaaagtccctcaccaccactggacgagcagaacagggactgccagggtctgatggagaagtttcagtttgaactgactctcgatgaggaagattctgaaggacctgagaaggagggagagggacacagctatttcagcagcacaaagacgctttgtgtgattgatccagaaaacagagattccctgggagagactgacatagacattgcaacagaagacaagtcccccgtggatacataatccccctctccctgtggagatgaacattctatccttgatgagcatgccagctatgtggtagggccagcccaccatgggggccaagacctgcacaggacaagggccacctggcctttcagttacttgagtttggagtcagaaagcaagaccaggaagcaaatagcagctcaggaaatcccacggttgacttgccttgatggcaagcttggtggagagggctgaagctgttgctgggggccgattctgatcaagacacatggcttgaaaatggaagacacaaaactgagagatcattctgcactaagtttcgggaacttatccccgacagtgactgaactcactgactaataacttcatttatgaatcttctcacttgtccctttgtctgccaacctgtgtgccttttttgtaaaacattttcatgtctttaaaatgcctgttgaatacctggagtttagtatcaacttctacacagataagctttcaaagttgacaaacttttttgactctttctggaaaagggaaagaaaatagtcttccttctttcttgggcaatatccttcactttactacagttacttttgcaaacagacagaaaggatacacttctaaccacattttacttccttcccctgttgtccagtccaactccacagtcactcttaaaacttctctctgtttgcctgcctccaacagtacttttaactttttgctgtaaacagaataaaattgaacaaattagggggtagaaaggagcagtggtgtcgttcaccgtgagagtctgcatagaactcagcagtgtgccctgctgtgtcttggaccctgccccccacaggagttgtacagtccctggccctgttccctacctcctctcttcaccccgttaggctgttttcaatgtaatgctgccgtccttctcttgcactgccttctgcgctaacacctccattcctgtttataaccgtgtatttattacttaatgtatataatgtaatgttttgtaagttattaatttatatatctaacattgcctgccaatggtggtgttaaatttgtgtagaaaactctgcctaagagttacgactttttcttgtaatgttttgtattgtgtattatataacccaaacgtcacttagtagagacatatggcccccttggcagagaggacaggggtgggcttttgttcaaagggtctgccctttccctgcctgagttgctacttctgcacaacccctttatgaaccagttttggaaacaatattctcacattagatactaaatggtttatactgagcttttacttttgtatagcttgataggggcagggggcaatgggatgtagtttttacccaggttctatccaaatctatgtgggcatgagttgggttataactggatcctactatcattgtggctttggttcaaaaggaaacactacatttgctcacagatgattcttctgaatgctcccgaactactgactttgaagaggtagcctcctgcctgccattaagcaggaatgtcatgttccagttcattacaaaagaaaacaataaaacaatgtgaatttttataataaaatgtgaactgatgtagcaaattacgcaaatgtgaagcctcttctgataacacttgttaggcctcttactgatgtcagtttcagtttgtaaaatatgtttcatgctttcagttcagcattgtgactcagtaattacagaaaatggcacaaatgtgcatgaccaatgtatgtctatgaacactgcattgtttcaggtggacattttatcattttcaaatgtttctcacaatgtatgttatagtattattattatatattgtgttcaaatgcattctaaagagacttttatatgaggtgaataaagaaaagcatgatt

SEQ ID NO: 22267 - DNA, 5034 bp, Homo sapiens
  source 1..5034: mol_type = unassigned DNA
ccagcctccacgcagtcctggcgatgcagggcccccccgcgcccgccccggtccccgggcccggctcccctcggggatccccgcgcggctcccccgggctcttcaggaagcttttggtgaatcagagcatccgcctgcagcggcgcttcacggtggcccatccgctgtgctttgacctggaaaatgggctctcgtgtgggaggagggccctggaccctcagtccagccctggcctgggccggattatgcaggctccagtcccgcacagccagcggcgcgagtccttcctgtaccgctcagatagcgactatgaactctcgcccaaggccatgtctcggaactcctctgtggccagcgacctacatggagaggacatgattgtgacgccctttgcccaggtcctggccagtctgcggaccgttcggagcaacgtggcggcccttgcccgccagcaatgcctaggagcagccaagcagggacccgtcggaaacccttcatccagcaatcagctccctcctgcagaggacacggggcagaagctggcattggagacgctagacgagctggactggtgcctggatcagttggagacgctgcagacccggcactcggtgggggagatggcctccaacaagttcaagcggatcctgaaccgggagttgacccacctgtccgaaaccagccgctccgggaaccaggtgtccgagtacatctcccggaccttcctggaccagcagaccgaggtggagctgcccaaggtgaccgctgaggaggccccacagcccatgtcccggatcagtggcctacatgggctctgccacagtgccagcctctcctcagccactgtcccacgctttggggtccagactgaccaggaggagcaactggccaaggagctagaagacaccaacaagtggggacttgatgtgttcaaggtggcggagctaagtgggaaccggcccctcacagctatcatattcagcatttttcaggagcgggacctgctgaagacattccagatcccagcagacacactggccacctacctgctgatgctggaaggtcactaccacgccaatgtggcctaccacaacagcctacatgccgccgacgtggcccagtccacgcatgtgctgctggctacgcccgccctcgaggctgtgttcacagacttggaaatcctggctgccctctttgcaagcgccatccacgacgtggaccatcctggggtctccaaccagtttctgattaacaccaactcagagctggcgcttatgtacaacgacgcctcggtgctggagaaccatcacctggctgtgggcttcaagctgctgcaggcagagaactgcgatatcttccagaacctcagcgccaagcagcgactgagtctgcgcaggatggtcattgacatggtgctggccacagacatgtccaaacacatgaacctcctggccgacctcaagaccatggtggagaccaagaaggtgacaagcctcggtgtcctcctcctggacaactattccgaccgaatccaggtcttgcagaacctggtgcactgtgctgatctgagcaaccccaccaagccgctgcccctgtaccgccagtggacggaccgcatcatggccgagttcttccagcagggagaccgcgagcgtgagtcgggcctggacatcagtcccatgtgtgacaagcatacggcctcagtggagaagtcccaggtgggtttcattgactacattgctcacccactgtgggagacttgggctgacctggtccacccagatgcacaggacctgctggacacgctggaggacaatcgagagtggtaccagagcaagatcccccgaagtccctcagacctcaccaaccccgagcgggacgggcctgacagattccagtttgaactgactctggaggaggcagaggaagaggatgaggaggaagaagaggagggggaagagacagctttagccaaagaggccttggagttgcctgacactgaactcctgtcccctgaagccggcccagaccctggggacttacccctcgacaaccagaggacttagggccagccctgcgtgaactgcaggggcaatggatggtaaagccctttggctcttggcaggcagactttccaggaagaggctccatgtggctcctgcttcactttcccacccatttagggagacaatcaagctcttagttataggtggctcccagggtctaattggaggcacctggctggggtccactctgaccctagacttgcctaaaagagctctctaaggggcagcctcttacgatgccctggtgtctttctcctgggcttctatccctgtgaggagaggtgctgtctgctggagcctctagtccaccctctccagtggtcactcttgagtcacatctgtcacttaattatttccttctttatcaaatatttattgctcatctacttcgtgccagctttctgcctctgtagtagccctgcacaaagggtggggagtcaggagaccatcccaaaggcatctccctgtcttcctctaccaagcggctctctgcaagagcatggaaatgtgagtggggaaaattttcagcaccaaagcttcactcatacccagttttgtttctgaaactacggtagggggcaggaagaggagcagaaaagaagggctgggcaaggcatagtggcttatgcctgtaatcccggtactttgggaggctgaggtgggaggactgcttaagctcaggagtttgagaccagcctgggcaacatagcaagacccccaccatctctgaaaaaaaaaattagccaggcatggtggtgtgcacctgagaatcccagctactcagaaggttgagacaaaggggatcgcttgagcccaggagttggaggctgaagagagctatgactgcatcactgcactccagcctgggcaacacagcaagatcctgtctaaaaataaaaagaaaagagaaggaaaggaaagagacggggctctgaggccgagcacagtggcccatgcctataatcccagcactttgggaggctgaggcaggtggatcacctgaggttaggagttcgagaccagcctggccaacatggtgaaaccccatctctactaaaaatacaaaaattggctgggcatggtggcgggtgcctgtaatcccagctactggggaggctgaggcaggagaatcacttgaattcaggaggtggaggttgcagtgagccgacatcatgccactgcactccagcctgggcgacagagcaagacactgtctcaaaaaagaaaagaaaaaaaaaaaagccgggccaggtggctcacgcctgtaatcctagcactttgggaggctgagtgggggtggatcgcctgagatcaggagttcaaaatcagcctggccaacatagtgaaaccctgtctctactaaaaatacaaaaaattagaggctgggtgcggcggctcacacctgtaatcccagaactttgggaggccgaggcgggtggatcacgaggtcaggagttcaagaccagcctggccaacacggtgaaaccccatctctactaaaaatacacaaattagctgggcatggtgttgggtgcctgaatcccagctactcgggaggctgaggcaggagaatcgcttgaatccgggaggcggggcttgcagtgagccgagatcgtgccattgcactccagcctgggtgacagagcaagactccgtctcaaaaagaaaaaaaaaaaattagccaggcatggtggcaggtgcctgtaatcccagctacttgagaggctgaggcaggagaatcgcttgaacccgggaggtggaggttgtggtgagccgaggtcgcgccactgcactccagcctgggcaacgacaacaacaataaaaagagggggctctgtgcccggcatgtctctgaagactgattgaacctatgcaccagttgttgctttaagtcgctttattttctgtctttggtgtctctggatgtaggagccccctgctttctctgtccgcagaactccatactgggtcccctacgtgttcctccttccctaggacagcaacaaaaacacacaattttccctctctagcaggtctctaagtctcctgattcctgaaactgcctcagactccccctagagggagggaggcccctgaggctttcttgccatcatagcctcttctgggcctcagtttcccctctgtaacctgatcctagtacttggataaactccgacgaggtgtggggggttgttgtctgtgacctccctgaaatatcttagacatttggggtactgagcatttatctggggttaaataaaatctttacatcttaagacattcgattgaccaaattgagtgtcctggccatttcactgatgaggaaactgaggcgcagagaggtcctcttgccagctcaaagtcaagcatctgggcgcccaatgttagccagcggcaccccctggtggcgggcgtgggagacacggcggggcgcgcttgtcgggggttggggggtgggtcggaggggtggcatcctccagccctgatggtcccacttaccgcacctcgccgggaagagctcgtcctgctggtcgggcctccgagcggactgggcagcaccatgctcaagcctagggttcgatccccgcctccggaagcctcagtatccatccctcccctctgcctccctcttcgcgtgcctgaatatttatacaagatacaggcgtcatcacagccgccctcggcttccagagcagctggcttcgttcataaatattataaccactcagaattcatcatcatcacagttaatgataaaattccacagtgccagaactaaaagtcatccgggttcacgaacttggtgcatttccttccagacttttaaaaagaagatatttagggaatttttttttcaagatttttccccccagtccgcttacaaagtaataccatgttcgctgtaaaaaatttggaaataatggaaatgtataaagaaggaaataaaattctgctgtatctccaccca

SEQ ID NO: 22268 - DNA, 5181 bp, Homo sapiens
  source 1..5181: mol_type = unassigned DNA
atgggacccaggcaggactccgcagtggtgcaccatctgggcatcgacagctcctcggtgtcggccccaccttgagccccagttccaccttctaccgcttcagcacctccggcgcggacagctcctcgctgtcgcctccactcccggccctgggccggacccgggagcagacgctcctcggcgcccgctcacggggacgagtcctgctccctgctatcccagacccctttctctggcgcatggagaacctgggggtcggcgaaggggcagaggcttgcagcaggttgagtcgctctcgcggccgccacagcatgaccagagccccgaagcacctgtggcggcaaccccggcgccccatccgcatccaacagcgcttctattcggatccggacaagtccgcgggctgccgcgagagggacctgagcccgcggccggagctcaggaagtcgcggctctcctggcccgtttcctcctgcaggcgctttgacctggaaaatgggctctcgtgtgggaggagggccctggaccctcagtccagccctggcctgggccggattatgcaggctccagtcccgcacagccagcggcgcgagtccttcctgtaccgctcagatagcgactatgaactctcgcccaaggccatgtctcggaactcctctgtggccagcgacctacatggagaggacatgattgtgacgccctttgcccaggtcctggccagtctgcggaccgttcggagcaacgtggcggcccttgcccgccagcaatgcctaggagcagccaagcagggacccgtcggaaacccttcatccagcaatcagctccctcctgcagaggacacggggcagaagctggcattggagacgctagacgagctggactggtgcctggatcagttggagacgctgcagacccggcactcggtgggggagatggcctccaacaagttcaagcggatcctgaaccgggagttgacccacctgtccgaaaccagccgctccgggaaccaggtgtccgagtacatctcccggaccttcctggaccagcagaccgaggtggagctgcccaaggtgaccgctgaggaggccccacagcccatgtcccggatcagtggcctacatgggctctgccacagtgccagcctctcctcagccactgtcccacgctttggggtccagactgaccaggaggagcaactggccaaggagctagaagacaccaacaagtggggacttgatgtgttcaaggtggcggagctaagtgggaaccggcccctcacagctatcatattcagcatttttcaggctgtgttcacagacttggaaatcctggctgccctctttgcaagcgccatccacgacgtggaccatcctggggtctccaaccagtttctgattaacaccaactcagagctggcgcttatgtacaacgacgcctcggtgctggagaaccatcacctggctgtgggcttcaagctgctgcaggcagagaactgcgatatcttccagaacctcagcgccaagcagcgactgagtctgcgcaggatggtcattgacatggtgctggccacagacatgtccaaacacatgaacctcctggccgacctcaagaccatggtggagaccaagaaggtgacaagcctcggtgtcctcctcctggacaactattccgaccgaatccaggtcttgcagaacctggtgcactgtgctgatctgagcaaccccaccaagccgctgcccctgtaccgccagtggacggaccgcatcatggccgagttcttccagcagggagaccgcgagcgtgagtcgggcctggacatcagtcccatgtgtgacaagcatacggcctcagtggagaagtcccaggtgggtttcattgactacattgctcacccactgtgggagacttgggctgacctggtccacccagatgcacaggacctgctggacacgctggaggacaatcgagagtggtaccagagcaagatcccccgaagtccctcagacctcaccaaccccgagcgggacgggcctgacagattccagtttgaactgactctggaggaggcagaggaagaggatgaggaggaagaagaggagggggaagagacagctttagccaaagaggccttggagttgcctgacactgaactcctgtcccctgaagccggcccagaccctggggacttacccctcgacaaccagaggacttagggccagccctgcgtgaactgcaggggcaatggatggtaaagccctttggctcttggcaggcagactttccaggaagaggctccatgtggctcctgcttcactttcccacccatttagggagacaatcaagctcttagttataggtggctcccagggtctaattggaggcacctggctggggtccactctgaccctagacttgcctaaaagagctctctaaggggcagcctcttacgatgccctggtgtctttctcctgggcttctatccctgtgaggagaggtgctgtctgctggagcctctagtccaccctctccagtggtcactcttgagtcacatctgtcacttaattatttccttctttatcaaatatttattgctcatctacttcgtgccagctttctgcctctgtagtagccctgcacaaagggtggggagtcaggagaccatcccaaaggcatctccctgtcttcctctaccaagcggctctctgcaagagcatggaaatgtgagtggggaaaattttcagcaccaaagcttcactcatacccagttttgtttctgaaactacggtagggggcaggaagaggagcagaaaagaagggctgggcaaggcatagtggcttatgcctgtaatcccggtactttgggaggctgaggtgggaggactgcttaagctcaggagtttgagaccagcctgggcaacatagcaagacccccaccatctctgaaaaaaaaaattagccaggcatggtggtgtgcacctgagaatcccagctactcagaaggttgagacaaaggggatcgcttgagcccaggagttggaggctgaagagagctatgactgcatcactgcactccagcctgggcaacacagcaagatcctgtctaaaaataaaaagaaaagagaaggaaaggaaagagacggggctctgaggccgagcacagtggcccatgcctataatcccagcactttgggaggctgaggcaggtggatcacctgaggttaggagttcgagaccagcctggccaacatggtgaaaccccatctctactaaaaatacaaaaattggctgggcatggtggcgggtgcctgtaatcccagctactggggaggctgaggcaggagaatcacttgaattcaggaggtggaggttgcagtgagccgacatcatgccactgcactccagcctgggcgacagagcaagacactgtctcaaaaaagaaaagaaaaaaaaaaaagccgggccaggtggctcacgcctgtaatcctagcactttgggaggctgagtgggggtggatcgcctgagatcaggagttcaaaatcagcctggccaacatagtgaaaccctgtctctactaaaaatacaaaaaattagaggctgggtgcggcggctcacacctgtaatcccagaactttgggaggccgaggcgggtggatcacgaggtcaggagttcaagaccagcctggccaacacggtgaaaccccatctctactaaaaatacacaaattagctgggcatggtgttgggtgcctgaatcccagctactcgggaggctgaggcaggagaatcgcttgaatccgggaggcggggcttgcagtgagccgagatcgtgccattgcactccagcctgggtgacagagcaagactccgtctcaaaaagaaaaaaaaaaaattagccaggcatggtggcaggtgcctgtaatcccagctacttgagaggctgaggcaggagaatcgcttgaacccgggaggtggaggttgtggtgagccgaggtcgcgccactgcactccagcctgggcaacgacaacaacaataaaaagagggggctctgtgcccggcatgtctctgaagactgattgaacctatgcaccagttgttgctttaagtcgctttattttctgtctttggtgtctctggatgtaggagccccctgctttctctgtccgcagaactccatactgggtcccctacgtgttcctccttccctaggacagcaacaaaaacacacaattttccctctctagcaggtctctaagtctcctgattcctgaaactgcctcagactccccctagagggagggaggcccctgaggctttcttgccatcatagcctcttctgggcctcagtttcccctctgtaacctgatcctagtacttggataaactccgacgaggtgtggggggttgttgtctgtgacctccctgaaatatcttagacatttggggtactgagcatttatctggggttaaataaaatctttacatcttaagacattcgattgaccaaattgagtgtcctggccatttcactgatgaggaaactgaggcgcagagaggtcctcttgccagctcaaagtcaagcatctgggcgcccaatgttagccagcggcaccccctggtggcgggcgtgggagacacggcggggcgcgcttgtcgggggttggggggtgggtcggaggggtggcatcctccagccctgatggtcccacttaccgcacctcgccgggaagagctcgtcctgctggtcgggcctccgagcggactgggcagcaccatgctcaagcctagggttcgatccccgcctccggaagcctcagtatccatccctcccctctgcctccctcttcgcgtgcctgaatatttatacaagatacaggcgtcatcacagccgccctcggcttccagagcagctggcttcgttcataaatattataaccactcagaattcatcatcatcacagttaatgataaaattccacagtgccagaactaaaagtcatccgggttcacgaacttggtgcatttccttccagacttttaaaaagaagatatttagggaatttttttttcaagatttttccccccagtccgcttacaaagtaataccatgttcgctgtaaaaaatttggaaataatggaaatgtataaagaaggaaataaaattctgctgtatctccaccca

SEQ ID NO: 22269 - DNA, 5346 bp, Homo sapiens
  source 1..5346: mol_type = unassigned DNA
atgggacccaggcaggactccgcagtggtgcaccatctgggcatcgacagctcctcggtgtcggccccaccttgagccccagttccaccttctaccgcttcagcacctccggcgcggacagctcctcgctgtcgcctccactcccggccctgggccggacccgggagcagacgctcctcggcgcccgctcacggggacgagtcctgctccctgctatcccagacccctttctctggcgcatggagaacctgggggtcggcgaaggggcagaggcttgcagcaggttgagtcgctctcgcggccgccacagcatgaccagagccccgaagcacctgtggcggcaaccccggcgccccatccgcatccaacagcgcttctattcggatccggacaagtccgcgggctgccgcgagagggacctgagcccgcggccggagctcaggaagtcgcggctctcctggcccgtttcctcctgcaggcgctttgacctggaaaatgggctctcgtgtgggaggagggccctggaccctcagtccagccctggcctgggccggattatgcaggctccagtcccgcacagccagcggcgcgagtccttcctgtaccgctcagatagcgactatgaactctcgcccaaggccatgtctcggaactcctctgtggccagcgacctacatggagaggacatgattgtgacgccctttgcccaggtcctggccagtctgcggaccgttcggagcaacgtggcggcccttgcccgccagcaatgcctaggagcagccaagcagggacccgtcggaaacccttcatccagcaatcagctccctcctgcagaggacacggggcagaagctggcattggagacgctagacgagctggactggtgcctggatcagttggagacgctgcagacccggcactcggtgggggagatggcctccaacaagttcaagcggatcctgaaccgggagttgacccacctgtccgaaaccagccgctccgggaaccaggtgtccgagtacatctcccggaccttcctggaccagcagaccgaggtggagctgcccaaggtgaccgctgaggaggccccacagcccatgtcccggatcagtggcctacatgggctctgccacagtgccagcctctcctcagccactgtcccacgctttggggtccagactgaccaggaggagcaactggccaaggagctagaagacaccaacaagtggggacttgatgtgttcaaggtggcggagctaagtgggaaccggcccctcacagctatcatattcagcatttttcaggagcgggacctgctgaagacattccagatcccagcagacacactggccacctacctgctgatgctggaaggtcactaccacgccaatgtggcctaccacaacagcctacatgccgccgacgtggcccagtccacgcatgtgctgctggctacgcccgccctcgaggctgtgttcacagacttggaaatcctggctgccctctttgcaagcgccatccacgacgtggaccatcctggggtctccaaccagtttctgattaacaccaactcagagctggcgcttatgtacaacgacgcctcggtgctggagaaccatcacctggctgtgggcttcaagctgctgcaggcagagaactgcgatatcttccagaacctcagcgccaagcagcgactgagtctgcgcaggatggtcattgacatggtgctggccacagacatgtccaaacacatgaacctcctggccgacctcaagaccatggtggagaccaagaaggtgacaagcctcggtgtcctcctcctggacaactattccgaccgaatccaggtcttgcagaacctggtgcactgtgctgatctgagcaaccccaccaagccgctgcccctgtaccgccagtggacggaccgcatcatggccgagttcttccagcagggagaccgcgagcgtgagtcgggcctggacatcagtcccatgtgtgacaagcatacggcctcagtggagaagtcccaggtgggtttcattgactacattgctcacccactgtgggagacttgggctgacctggtccacccagatgcacaggacctgctggacacgctggaggacaatcgagagtggtaccagagcaagatcccccgaagtccctcagacctcaccaaccccgagcgggacgggcctgacagattccagtttgaactgactctggaggaggcagaggaagaggatgaggaggaagaagaggagggggaagagacagctttagccaaagaggccttggagttgcctgacactgaactcctgtcccctgaagccggcccagaccctggggacttacccctcgacaaccagaggacttagggccagccctgcgtgaactgcaggggcaatggatggtaaagccctttggctcttggcaggcagactttccaggaagaggctccatgtggctcctgcttcactttcccacccatttagggagacaatcaagctcttagttataggtggctcccagggtctaattggaggcacctggctggggtccactctgaccctagacttgcctaaaagagctctctaaggggcagcctcttacgatgccctggtgtctttctcctgggcttctatccctgtgaggagaggtgctgtctgctggagcctctagtccaccctctccagtggtcactcttgagtcacatctgtcacttaattatttccttctttatcaaatatttattgctcatctacttcgtgccagctttctgcctctgtagtagccctgcacaaagggtggggagtcaggagaccatcccaaaggcatctccctgtcttcctctaccaagcggctctctgcaagagcatggaaatgtgagtggggaaaattttcagcaccaaagcttcactcatacccagttttgtttctgaaactacggtagggggcaggaagaggagcagaaaagaagggctgggcaaggcatagtggcttatgcctgtaatcccggtactttgggaggctgaggtgggaggactgcttaagctcaggagtttgagaccagcctgggcaacatagcaagacccccaccatctctgaaaaaaaaaattagccaggcatggtggtgtgcacctgagaatcccagctactcagaaggttgagacaaaggggatcgcttgagcccaggagttggaggctgaagagagctatgactgcatcactgcactccagcctgggcaacacagcaagatcctgtctaaaaataaaaagaaaagagaaggaaaggaaagagacggggctctgaggccgagcacagtggcccatgcctataatcccagcactttgggaggctgaggcaggtggatcacctgaggttaggagttcgagaccagcctggccaacatggtgaaaccccatctctactaaaaatacaaaaattggctgggcatggtggcgggtgcctgtaatcccagctactggggaggctgaggcaggagaatcacttgaattcaggaggtggaggttgcagtgagccgacatcatgccactgcactccagcctgggcgacagagcaagacactgtctcaaaaaagaaaagaaaaaaaaaaaagccgggccaggtggctcacgcctgtaatcctagcactttgggaggctgagtgggggtggatcgcctgagatcaggagttcaaaatcagcctggccaacatagtgaaaccctgtctctactaaaaatacaaaaaattagaggctgggtgcggcggctcacacctgtaatcccagaactttgggaggccgaggcgggtggatcacgaggtcaggagttcaagaccagcctggccaacacggtgaaaccccatctctactaaaaatacacaaattagctgggcatggtgttgggtgcctgaatcccagctactcgggaggctgaggcaggagaatcgcttgaatccgggaggcggggcttgcagtgagccgagatcgtgccattgcactccagcctgggtgacagagcaagactccgtctcaaaaagaaaaaaaaaaaattagccaggcatggtggcaggtgcctgtaatcccagctacttgagaggctgaggcaggagaatcgcttgaacccgggaggtggaggttgtggtgagccgaggtcgcgccactgcactccagcctgggcaacgacaacaacaataaaaagagggggctctgtgcccggcatgtctctgaagactgattgaacctatgcaccagttgttgctttaagtcgctttattttctgtctttggtgtctctggatgtaggagccccctgctttctctgtccgcagaactccatactgggtcccctacgtgttcctccttccctaggacagcaacaaaaacacacaattttccctctctagcaggtctctaagtctcctgattcctgaaactgcctcagactccccctagagggagggaggcccctgaggctttcttgccatcatagcctcttctgggcctcagtttcccctctgtaacctgatcctagtacttggataaactccgacgaggtgtggggggttgttgtctgtgacctccctgaaatatcttagacatttggggtactgagcatttatctggggttaaataaaatctttacatcttaagacattcgattgaccaaattgagtgtcctggccatttcactgatgaggaaactgaggcgcagagaggtcctcttgccagctcaaagtcaagcatctgggcgcccaatgttagccagcggcaccccctggtggcgggcgtgggagacacggcggggcgcgcttgtcgggggttggggggtgggtcggaggggtggcatcctccagccctgatggtcccacttaccgcacctcgccgggaagagctcgtcctgctggtcgggcctccgagcggactgggcagcaccatgctcaagcctagggttcgatccccgcctccggaagcctcagtatccatccctcccctctgcctccctcttcgcgtgcctgaatatttatacaagatacaggcgtcatcacagccgccctcggcttccagagcagctggcttcgttcataaatattataaccactcagaattcatcatcatcacagttaatgataaaattccacagtgccagaactaaaagtcatccgggttcacgaacttggtgcatttccttccagacttttaaaaagaagatatttagggaatttttttttcaagatttttccccccagtccgcttacaaagtaataccatgttcgctgtaaaaaatttggaaataatggaaatgtataaagaaggaaataaaattctgctgtatctccaccca

SEQ ID NO: 22270 - DNA, 5124 bp, Homo sapiens
  source 1..5124: mol_type = unassigned DNA
ttcgacgtgatcagacccaactcagacccggtcatacttggaccgaatgctgccaaatcccccacctctacccagatctgagcctacgcggggtgccgacccagctcgtggacggggatacggtgacctttgacccaaaagtcttggccgggaccagccggacactggccctcggccgggagctccgagtctcaggcggtcccggttgtcttcctgtcggtgccgcttccgcctgcccttcttgaaaacccacccccagctttgacctggaaaatgggctctcgtgtgggaggagggccctggaccctcagtccagccctggcctgggccggattatgcaggctccagtcccgcacagccagcggcgcgagtccttcctgtaccgctcagatagcgactatgaactctcgcccaaggccatgtctcggaactcctctgtggccagcgacctacatggagaggacatgattgtgacgccctttgcccaggtcctggccagtctgcggaccgttcggagcaacgtggcggcccttgcccgccagcaatgcctaggagcagccaagcagggacccgtcggaaacccttcatccagcaatcagctccctcctgcagaggacacggggcagaagctggcattggagacgctagacgagctggactggtgcctggatcagttggagacgctgcagacccggcactcggtgggggagatggcctccaacaagttcaagcggatcctgaaccgggagttgacccacctgtccgaaaccagccgctccgggaaccaggtgtccgagtacatctcccggaccttcctggaccagcagaccgaggtggagctgcccaaggtgaccgctgaggaggccccacagcccatgtcccggatcagtggcctacatgggctctgccacagtgccagcctctcctcagccactgtcccacgctttggggtccagactgaccaggaggagcaactggccaaggagctagaagacaccaacaagtggggacttgatgtgttcaaggtggcggagctaagtgggaaccggcccctcacagctatcatattcagcatttttcaggagcgggacctgctgaagacattccagatcccagcagacacactggccacctacctgctgatgctggaaggtcactaccacgccaatgtggcctaccacaacagcctacatgccgccgacgtggcccagtccacgcatgtgctgctggctacgcccgccctcgaggctgtgttcacagacttggaaatcctggctgccctctttgcaagcgccatccacgacgtggaccatcctggggtctccaaccagtttctgattaacaccaactcagagctggcgcttatgtacaacgacgcctcggtgctggagaaccatcacctggctgtgggcttcaagctgctgcaggcagagaactgcgatatcttccagaacctcagcgccaagcagcgactgagtctgcgcaggatggtcattgacatggtgctggccacagacatgtccaaacacatgaacctcctggccgacctcaagaccatggtggagaccaagaaggtgacaagcctcggtgtcctcctcctggacaactattccgaccgaatccaggtcttgcagaacctggtgcactgtgctgatctgagcaaccccaccaagccgctgcccctgtaccgccagtggacggaccgcatcatggccgagttcttccagcagggagaccgcgagcgtgagtcgggcctggacatcagtcccatgtgtgacaagcatacggcctcagtggagaagtcccaggtgggtttcattgactacattgctcacccactgtgggagacttgggctgacctggtccacccagatgcacaggacctgctggacacgctggaggacaatcgagagtggtaccagagcaagatcccccgaagtccctcagacctcaccaaccccgagcgggacgggcctgacagattccagtttgaactgactctggaggaggcagaggaagaggatgaggaggaagaagaggagggggaagagacagctttagccaaagaggccttggagttgcctgacactgaactcctgtcccctgaagccggcccagaccctggggacttacccctcgacaaccagaggacttagggccagccctgcgtgaactgcaggggcaatggatggtaaagccctttggctcttggcaggcagactttccaggaagaggctccatgtggctcctgcttcactttcccacccatttagggagacaatcaagctcttagttataggtggctcccagggtctaattggaggcacctggctggggtccactctgaccctagacttgcctaaaagagctctctaaggggcagcctcttacgatgccctggtgtctttctcctgggcttctatccctgtgaggagaggtgctgtctgctggagcctctagtccaccctctccagtggtcactcttgagtcacatctgtcacttaattatttccttctttatcaaatatttattgctcatctacttcgtgccagctttctgcctctgtagtagccctgcacaaagggtggggagtcaggagaccatcccaaaggcatctccctgtcttcctctaccaagcggctctctgcaagagcatggaaatgtgagtggggaaaattttcagcaccaaagcttcactcatacccagttttgtttctgaaactacggtagggggcaggaagaggagcagaaaagaagggctgggcaaggcatagtggcttatgcctgtaatcccggtactttgggaggctgaggtgggaggactgcttaagctcaggagtttgagaccagcctgggcaacatagcaagacccccaccatctctgaaaaaaaaaattagccaggcatggtggtgtgcacctgagaatcccagctactcagaaggttgagacaaaggggatcgcttgagcccaggagttggaggctgaagagagctatgactgcatcactgcactccagcctgggcaacacagcaagatcctgtctaaaaataaaaagaaaagagaaggaaaggaaagagacggggctctgaggccgagcacagtggcccatgcctataatcccagcactttgggaggctgaggcaggtggatcacctgaggttaggagttcgagaccagcctggccaacatggtgaaaccccatctctactaaaaatacaaaaattggctgggcatggtggcgggtgcctgtaatcccagctactggggaggctgaggcaggagaatcacttgaattcaggaggtggaggttgcagtgagccgacatcatgccactgcactccagcctgggcgacagagcaagacactgtctcaaaaaagaaaagaaaaaaaaaaaagccgggccaggtggctcacgcctgtaatcctagcactttgggaggctgagtgggggtggatcgcctgagatcaggagttcaaaatcagcctggccaacatagtgaaaccctgtctctactaaaaatacaaaaaattagaggctgggtgcggcggctcacacctgtaatcccagaactttgggaggccgaggcgggtggatcacgaggtcaggagttcaagaccagcctggccaacacggtgaaaccccatctctactaaaaatacacaaattagctgggcatggtgttgggtgcctgaatcccagctactcgggaggctgaggcaggagaatcgcttgaatccgggaggcggggcttgcagtgagccgagatcgtgccattgcactccagcctgggtgacagagcaagactccgtctcaaaaagaaaaaaaaaaaattagccaggcatggtggcaggtgcctgtaatcccagctacttgagaggctgaggcaggagaatcgcttgaacccgggaggtggaggttgtggtgagccgaggtcgcgccactgcactccagcctgggcaacgacaacaacaataaaaagagggggctctgtgcccggcatgtctctgaagactgattgaacctatgcaccagttgttgctttaagtcgctttattttctgtctttggtgtctctggatgtaggagccccctgctttctctgtccgcagaactccatactgggtcccctacgtgttcctccttccctaggacagcaacaaaaacacacaattttccctctctagcaggtctctaagtctcctgattcctgaaactgcctcagactccccctagagggagggaggcccctgaggctttcttgccatcatagcctcttctgggcctcagtttcccctctgtaacctgatcctagtacttggataaactccgacgaggtgtggggggttgttgtctgtgacctccctgaaatatcttagacatttggggtactgagcatttatctggggttaaataaaatctttacatcttaagacattcgattgaccaaattgagtgtcctggccatttcactgatgaggaaactgaggcgcagagaggtcctcttgccagctcaaagtcaagcatctgggcgcccaatgttagccagcggcaccccctggtggcgggcgtgggagacacggcggggcgcgcttgtcgggggttggggggtgggtcggaggggtggcatcctccagccctgatggtcccacttaccgcacctcgccgggaagagctcgtcctgctggtcgggcctccgagcggactgggcagcaccatgctcaagcctagggttcgatccccgcctccggaagcctcagtatccatccctcccctctgcctccctcttcgcgtgcctgaatatttatacaagatacaggcgtcatcacagccgccctcggcttccagagcagctggcttcgttcataaatattataaccactcagaattcatcatcatcacagttaatgataaaattccacagtgccagaactaaaagtcatccgggttcacgaacttggtgcatttccttccagacttttaaaaagaagatatttagggaatttttttttcaagatttttccccccagtccgcttacaaagtaataccatgttcgctgtaaaaaatttggaaataatggaaatgtataaagaaggaaataaaattctgctgtatctccaccca

SEQ ID NO: 22271 - DNA, 5346 bp, Homo sapiens; identical to SEQ ID NO: 22269
  source 1..5346: mol_type = unassigned DNA

SEQ ID NO: 22272 - DNA, 5071 bp, Homo sapiens
  source 1..5071: mol_type = unassigned DNA
gctgtccagaaaaggtcccgcgcagccggcgctcggtccagcctccacgcagtcctggcgatgcagggcccccccgcgcccgccccggtccccgggcccggctcccctcggggatccccgcgcggctcccccgggctcttcaggaagcttttggtgaatcagagcatccgcctgcagcggcgcttcacggtggcccatccgctgtgctttgacctggaaaatgggctctcgtgtgggaggagggccctggaccctcagtccagccctggcctgggccggattatgcaggctccagtcccgcacagccagcggcgcgagtccttcctgtaccgctcagatagcgactatgaactctcgcccaaggccatgtctcggaactcctctgtggccagcgacctacatggagaggacatgattgtgacgccctttgcccaggtcctggccagtctgcggaccgttcggagcaacgtggcggcccttgcccgccagcaatgcctaggagcagccaagcagggacccgtcggaaacccttcatccagcaatcagctccctcctgcagaggacacggggcagaagctggcattggagacgctagacgagctggactggtgcctggatcagttggagacgctgcagacccggcactcggtgggggagatggcctccaacaagttcaagcggatcctgaaccgggagttgacccacctgtccgaaaccagccgctccgggaaccaggtgtccgagtacatctcccggaccttcctggaccagcagaccgaggtggagctgcccaaggtgaccgctgaggaggccccacagcccatgtcccggatcagtggcctacatgggctctgccacagtgccagcctctcctcagccactgtcccacgctttggggtccagactgaccaggaggagcaactggccaaggagctagaagacaccaacaagtggggacttgatgtgttcaaggtggcggagctaagtgggaaccggcccctcacagctatcatattcagcatttttcaggagcgggacctgctgaagacattccagatcccagcagacacactggccacctacctgctgatgctggaaggtcactaccacgccaatgtggcctaccacaacagcctacatgccgccgacgtggcccagtccacgcatgtgctgctggctacgcccgccctcgaggctgtgttcacagacttggaaatcctggctgccctctttgcaagcgccatccacgacgtggaccatcctggggtctccaaccagtttctgattaacaccaactcagagctggcgcttatgtacaacgacgcctcggtgctggagaaccatcacctggctgtgggcttcaagctgctgcaggcagagaactgcgatatcttccagaacctcagcgccaagcagcgactgagtctgcgcaggatggtcattgacatggtgctggccacagacatgtccaaacacatgaacctcctggccgacctcaagaccatggtggagaccaagaaggtgacaagcctcggtgtcctcctcctggacaactattccgaccgaatccaggtcttgcagaacctggtgcactgtgctgatctgagcaaccccaccaagccgctgcccctgtaccgccagtggacggaccgcatcatggccgagttcttccagcagggagaccgcgagcgtgagtcgggcctggacatcagtcccatgtgtgacaagcatacggcctcagtggagaagtcccaggtgggtttcattgactacattgctcacccactgtgggagacttgggctgacctggtccacccagatgcacaggacctgctggacacgctggaggacaatcgagagtggtaccagagcaagatcccccgaagtccctcagacctcaccaaccccgagcgggacgggcctgacagattccagtttgaactgactctggaggaggcagaggaagaggatgaggaggaagaagaggagggggaagagacagctttagccaaagaggccttggagttgcctgacactgaactcctgtcccctgaagccggcccagaccctggggacttacccctcgacaaccagaggacttagggccagccctgcgtgaactgcaggggcaatggatggtaaagccctttggctcttggcaggcagactttccaggaagaggctccatgtggctcctgcttcactttcccacccatttagggagacaatcaagctcttagttataggtggctcccagggtctaattggaggcacctggctggggtccactctgaccctagacttgcctaaaagagctctctaaggggcagcctcttacgatgccctggtgtctttctcctgggcttctatccctgtgaggagaggtgctgtctgctggagcctctagtccaccctctccagtggtcactcttgagtcacatctgtcacttaattatttccttctttatcaaatatttattgctcatctacttcgtgccagctttctgcctctgtagtagccctgcacaaagggtggggagtcaggagaccatcccaaaggcatctccctgtcttcctctaccaagcggctctctgcaagagcatggaaatgtgagtggggaaaattttcagcaccaaagcttcactcatacccagttttgtttctgaaactacggtagggggcaggaagaggagcagaaaagaagggctgggcaaggcatagtggcttatgcctgtaatcccggtactttgggaggctgaggtgggaggactgcttaagctcaggagtttgagaccagcctgggcaacatagcaagacccccaccatctctgaaaaaaaaaattagccaggcatggtggtgtgcacctgagaatcccagctactcagaaggttgagacaaaggggatcgcttgagcccaggagttggaggctgaagagagctatgactgcatcactgcactccagcctgggcaacacagcaagatcctgtctaaaaataaaaagaaaagagaaggaaaggaaagagacggggctctgaggccgagcacagtggcccatgcctataatcccagcactttgggaggctgaggcaggtggatcacctgaggttaggagttcgagaccagcctggccaacatggtgaaaccccatctctactaaaaatacaaaaattggctgggcatggtggcgggtgcctgtaatcccagctactggggaggctgaggcaggagaatcacttgaattcaggaggtggaggttgcagtgagccgacatcatgccactgcactccagcctgggcgacagagcaagacactgtctcaaaaaagaaaagaaaaaaaaaaaagccgggccaggtggctcacgcctgtaatcctagcactttgggaggctgagtgggggtggatcgcctgagatcaggagttcaaaatcagcctggccaacatagtgaaaccctgtctctactaaaaatacaaaaaattagaggctgggtgcggcggctcacacctgtaatcccagaactttgggaggccgaggcgggtggatcacgaggtcaggagttcaagaccagcctggccaacacggtgaaaccccatctctactaaaaatacacaaattagctgggcatggtgttgggtgcctgaatcccagctactcgggaggctgaggcaggagaatcgcttgaatccgggaggcggggcttgcagtgagccgagatcgtgccattgcactccagcctgggtgacagagcaagactccgtctcaaaaagaaaaaaaaaaaattagccaggcatggtggcaggtgcctgtaatcccagctacttgagaggctgaggcaggagaatcgcttgaacccgggaggtggaggttgtggtgagccgaggtcgcgccactgcactccagcctgggcaacgacaacaacaataaaaagagggggctctgtgcccggcatgtctctgaagactgattgaacctatgcaccagttgttgctttaagtcgctttattttctgtctttggtgtctctggatgtaggagccccctgctttctctgtccgcagaactccatactgggtcccctacgtgttcctccttccctaggacagcaacaaaaacacacaattttccctctctagcaggtctctaagtctcctgattcctgaaactgcctcagactccccctagagggagggaggcccctgaggctttcttgccatcatagcctcttctgggcctcagtttcccctctgtaacctgatcctagtacttggataaactccgacgaggtgtggggggttgttgtctgtgacctccctgaaatatcttagacatttggggtactgagcatttatctggggttaaataaaatctttacatcttaagacattcgattgaccaaattgagtgtcctggccatttcactgatgaggaaactgaggcgcagagaggtcctcttgccagctcaaagtcaagcatctgggcgcccaatgttagccagcggcaccccctggtggcgggcgtgggagacacggcggggcgcgcttgtcgggggttggggggtgggtcggaggggtggcatcctccagccctgatggtcccacttaccgcacctcgccgggaagagctcgtcctgctggtcgggcctccgagcggactgggcagcaccatgctcaagcctagggttcgatccccgcctccggaagcctcagtatccatccctcccctctgcctccctcttcgcgtgcctgaatatttatacaagatacaggcgtcatcacagccgccctcggcttccagagcagctggcttcgttcataaatattataaccactcagaattcatcatcatcacagttaatgataaaattccacagtgccagaactaaaagtcatccgggttcacgaacttggtgcatttccttccagacttttaaaaagaagatatttagggaatttttttttcaagatttttccccccagtccgcttacaaagtaataccatgttcgctgtaaaaaatttggaaataatggaaatgtataaagaaggaaataaaattctgctgtatctccaccca

SEQ ID NO: 22273 - DNA, 1699 bp, Homo sapiens
  source 1..1699: mol_type = unassigned DNA
gaccgttcggagcaacgtggcggcccttgcccgccagcaatgcctaggagcagccaaaggacacggggcagaagctggcattggagacgctagacgagctggactggtgcctggatcagttggagacgctgcagacccggcactcggtgggggagatggcctccaacaagttcaagcggatcctgaaccgggagttgacccacctgtccgaaaccagccgctccgggaaccaggtgtccgagtacatctcccggaccttcctggaccagcagaccgaggtggagctgcccaaggtgaccgctgaggaggccccacagcccatgtcccggatcagtggcctacatgggctctgccacagtgccagcctctcctcagccactgtcccacgctttggggtccagactgaccaggaggagcaactggccaaggagctagaagacaccaacaagtggggacttgatgtgttcaaggtggcggagctaagtgggaaccggcccctcacagctatcatattcagcatttttcaggagcgggacctgctgaagacattccagatcccagcagacacactggccacctacctgctgatgctggaaggtcactaccacgccaatgtggcctaccacaacagcctacatgccgccgacgtggcccagtccacgcatgtgctgctggctacgcccgccctcgaggctgtgttcacagacttggaaatcctggctgccctctttgcaagcgccatccacgacgtggaccatcctggggtctccaaccagtttctgattaacaccaactcagagctggcgcttatgtacaacgacgcctcggtgctggagaaccatcacctggctgtgggcttcaagctgctgcaggcagagaactgcgatatcttccagaacctcagcgccaagcagcgactgagtctgcgcaggatggtcattgacatggtgctggccacagacatgtccaaacacatgaacctcctggccgacctcaagaccatggtggagaccaagaaggtgacaagcctcggtgtcctcctcctggacaactattccgaccgaatccaggtcttgcagaacctggtgcactgtgctgatctgagcaaccccaccaagccgctgcccctgtaccgccagtggacggaccgcatcatggccgagttcttccagcagggagaccgcgagcgtgagtcgggcctggacatcagtcccatgtgtgacaagcatacggcctcagtggagaagtcccaggtgggtttcattgactacattgctcacccactgtgggagacttgggctgacctggtccacccagatgcacaggacctgctggacacgctggaggacaatcgagagtggtaccagagcaagatcccccgaagtccctcagacctcaccaaccccgagcgggacgggcctgacagattccagtttgaactgactctggaggaggcagaggaagaggatgaggaggaagaagaggagggggaagagacagctttagccaaagaggccttggagttgcctgacactgaactcctgtcccctgaagccggcccagaccctggggacttacccctcgacaaccagaggacttagggccagccctgcgtgaactgcaggggcaatggatggtaaagccctttggctcttggcaggcagactttccaggaagaggctccatgtggctcctgctt

SEQ ID NO: 22274 - DNA, 2692 bp, Homo sapiens
  source 1..2692: mol_type = unassigned DNA
aaagctacctttttctctttcaacacggtgcgagggacaccgtctcggccccgggggtctcctgagaccctgtctccctgccctccatttagcagcgatcagtggacaatttctgtcttctccactccaagtccttgtcttggttcttttccatgcagcgctataggggacggcagacggttttcggggctggtgtgttggggggggtctcttcagcccctagcttcaacaccccctcaccacgttcttctcccctgttctacccttcagcaccatctgggcatcgacagctcctcggtgtcggccccaccttgagccccagttccaccttctaccgcttcagcacctccggcgcggacagctcctcgctgtcgcctccactcccggccctgggccggacccgggagcagacgctcctcggcgcccgctcacggggacgagtcctgctccctgctatcccagacccctttctctggcgcatggagaacctgggggtcggcgaaggggcagaggcttgcagcaggttgagtcgctctcgcggccgccacagcatgaccagagccccgaagcacctgtggcggcaaccccggcgccccatccgcatccaacagcgcttctattcggatccggacaagtccgcgggctgccgcgagagggacctgagcccgcggccggagctcaggaagtcgcggctctcctggcccgtttcctcctgcaggcgctttgacctggaaaatgggctctcgtgtgggaggagggccctggaccctcagtccagccctggcctgggccggattatgcaggctccagtcccgcacagccagcggcgcgagtccttcctgtaccgctcagatagcgactatgaactctcgcccaaggccatgtctcggaactcctctgtggccagcgacctacatggagaggacatgattgtgacgccctttgcccaggtcctggccagtctgcggaccgttcggagcaacgtggcggcccttgcccgccagcaatgcctaggagcagccaagcagggacccgtcggaaacccttcatccagcaatcagctccctcctgcagaggacacggggcagaagctggcattggagacgctagacgagctggactggtgcctggatcagttggagacgctgcagacccggcactcggtgggggagatggcctccaacaagttcaagcggatcctgaaccgggagttgacccacctgtccgaaaccagccgctccgggaaccaggtgtccgagtacatctcccggaccttcctggaccagcagaccgaggtggagctgcccaaggtgaccgctgaggaggccccacagcccatgtcccggatcagtggcctacatgggctctgccacagtgccagcctctcctcagccactgtcccacgctttggggtccagactgaccaggaggagcaactggccaaggagctagaagacaccaacaagtggggacttgatgtgttcaaggtggcggagctaagtgggaaccggcccctcacagctatcatattcagcatttttcaggagcgggacctgctgaagacattccagatcccagcagacacactggccacctacctgctgatgctggaaggtcactaccacgccaatgtggcctaccacaacagcctacatgccgccgacgtggcccagtccacgcatgtgctgctggctacgcccgccctcgaggctgtgttcacagacttggaaatcctggctgccctctttgcaagcgccatccacgacgtggaccatcctggggtctccaaccagtttctgattaacaccaactcagagctggcgcttatgtacaacgacgcctcggtgctggagaaccatcacctggctgtgggcttcaagctgctgcaggcagagaactgcgatatcttccagaacctcagcgccaagcagcgactgagtctgcgcaggatggtcattgacatggtgctggccacagacatgtccaaacacatgaacctcctggccgacctcaagaccatggtggagaccaagaaggtgacaagcctcggtgtcctcctcctggacaactattccgaccgaatccaggtcttgcagaacctggtgcactgtgctgatctgagcaaccccaccaagccgctgcccctgtaccgccagtggacggaccgcatcatggccgagttcttccagcagggagaccgcgagcgtgagtcgggcctggacatcagtcccatgtgtgacaagcatacggcctcagtggagaagtcccaggtgggtttcattgactacattgctcacccactgtgggagacttgggctgacctggtccacccagatgcacaggacctgctggacacgctggaggacaatcgagagtggtaccagagcaagatcccccgaagtccctcagacctcaccaaccccgagcgggacgggcctgacagattccagtttgaactgactctggaggaggcagaggaagaggatgaggaggaagaagaggagggggaagagacagctttagccaaagaggccttggagttgcctgacactgaactcctgtcccctgaagccggcccagaccctggggacttacccctcgacaaccagaggacttagggccagccctgcgtgaactgcaggggcaatggatggtaaagccctttggctcttggcaggcagactttccagga

SEQ ID NO: 22275 - DNA, 4525 bp, Homo sapiens
  source 1..4525: mol_type = unassigned DNA
cccctccggatccggcctctccttcccaccgcctaccacctcctcccaacaggtcctggccagtctgcggaccgttcggagcaacgtggcggcccttgcccgccagcaatgcctaggagcagccaattcaagcggatcctgaaccgggagttgacccacctgtccgaaaccagccgctccgggaaccaggtgtccgagtacatctcccggaccttcctggaccagcagaccgaggtggagctgcccaaggtgaccgctgaggaggccccacagcccatgtcccggatcagtggcctacatgggctctgccacagtgccagcctctcctcagccactgtcccacgctttggggtccagactgaccaggaggagcaactggccaaggagctagaagacaccaacaagtggggacttgatgtgttcaaggtggcggagctaagtgggaaccggcccctcacagctatcatattcagcatttttcaggagcgggacctgctgaagacattccagatcccagcagacacactggccacctacctgctgatgctggaaggtcactaccacgccaatgtggcctaccacaacagcctacatgccgccgacgtggcccagtccacgcatgtgctgctggctacgcccgccctcgaggctgtgttcacagacttggaaatcctggctgccctctttgcaagcgccatccacgacgtggaccatcctggggtctccaaccagtttctgattaacaccaactcagagctggcgcttatgtacaacgacgcctcggtgctggagaaccatcacctggctgtgggcttcaagctgctgcaggcagagaactgcgatatcttccagaacctcagcgccaagcagcgactgagtctgcgcaggatggtcattgacatggtgctggccacagacatgtccaaacacatgaacctcctggccgacctcaagaccatggtggagaccaagaaggtgacaagcctcggtgtcctcctcctggacaactattccgaccgaatccaggtcttgcagaacctggtgcactgtgctgatctgagcaaccccaccaagccgctgcccctgtaccgccagtggacggaccgcatcatggccgagttcttccagcagggagaccgcgagcgtgagtcgggcctggacatcagtcccatgtgtgacaagcatacggcctcagtggagaagtcccaggtgggtttcattgactacattgctcacccactgtgggagacttgggctgacctggtccacccagatgcacaggacctgctggacacgctggaggacaatcgagagtggtaccagagcaagatcccccgaagtccctcagacctcaccaaccccgagcgggacgggcctgacagattccagtttgaactgactctggaggaggcagaggaagaggatgaggaggaagaagaggagggggaagagacagctttagccaaagaggccttggagttgcctgacactgaactcctgtcccctgaagccggcccagaccctggggacttacccctcgacaaccagaggacttagggccagccctgcgtgaactgcaggggcaatggatggtaaagccctttggctcttggcaggcagactttccaggaagaggctccatgtggctcctgcttcactttcccacccatttagggagacaatcaagctcttagttataggtggctcccagggtctaattggaggcacctggctggggtccactctgaccctagacttgcctaaaagagctctctaaggggcagcctcttacgatgccctggtgtctttctcctgggcttctatccctgtgaggagaggtgctgtctgctggagcctctagtccaccctctccagtggtcactcttgagtcacatctgtcacttaattatttccttctttatcaaatatttattgctcatctacttcgtgccagctttctgcctctgtagtagccctgcacaaagggtggggagtcaggagaccatcccaaaggcatctccctgtcttcctctaccaagcggctctctgcaagagcatggaaatgtgagtggggaaaattttcagcaccaaagcttcactcatacccagttttgtttctgaaactacggtagggggcaggaagaggagcagaaaagaagggctgggcaaggcatagtggcttatgcctgtaatcccggtactttgggaggctgaggtgggaggactgcttaagctcaggagtttgagaccagcctgggcaacatagcaagacccccaccatctctgaaaaaaaaaattagccaggcatggtggtgtgcacctgagaatcccagctactcagaaggttgagacaaaggggatcgcttgagcccaggagttggaggctgaagagagctatgactgcatcactgcactccagcctgggcaacacagcaagatcctgtctaaaaataaaaagaaaagagaaggaaaggaaagagacggggctctgaggccgagcacagtggcccatgcctataatcccagcactttgggaggctgaggcaggtggatcacctgaggttaggagttcgagaccagcctggccaacatggtgaaaccccatctctactaaaaatacaaaaattggctgggcatggtggcgggtgcctgtaatcccagctactggggaggctgaggcaggagaatcacttgaattcaggaggtggaggttgcagtgagccgacatcatgccactgcactccagcctgggcgacagagcaagacactgtctcaaaaaagaaaagaaaaaaaaaaaagccgggccaggtggctcacgcctgtaatcctagcactttgggaggctgagtgggggtggatcgcctgagatcaggagttcaaaatcagcctggccaacatagtgaaaccctgtctctactaaaaatacaaaaaattagaggctgggtgcggcggctcacacctgtaatcccagaactttgggaggccgaggcgggtggatcacgaggtcaggagttcaagaccagcctggccaacacggtgaaaccccatctctactaaaaatacacaaattagctgggcatggtgttgggtgcctgaatcccagctactcgggaggctgaggcaggagaatcgcttgaatccgggaggcggggcttgcagtgagccgagatcgtgccattgcactccagcctgggtgacagagcaagactccgtctcaaaaagaaaaaaaaaaaattagccaggcatggtggcaggtgcctgtaatcccagctacttgagaggctgaggcaggagaatcgcttgaacccgggaggtggaggttgtggtgagccgaggtcgcgccactgcactccagcctgggcaacgacaacaacaataaaaagagggggctctgtgcccggcatgtctctgaagactgattgaacctatgcaccagttgttgctttaagtcgctttattttctgtctttggtgtctctggatgtaggagccccctgctttctctgtccgcagaactccatactgggtcccctacgtgttcctccttccctaggacagcaacaaaaacacacaattttccctctctagcaggtctctaagtctcctgattcctgaaactgcctcagactccccctagagggagggaggcccctgaggctttcttgccatcatagcctcttctgggcctcagtttcccctctgtaacctgatcctagtacttggataaactccgacgaggtgtggggggttgttgtctgtgacctccctgaaatatcttagacatttggggtactgagcatttatctggggttaaataaaatctttacatcttaagacattcgattgaccaaattgagtgtcctggccatttcactgatgaggaaactgaggcgcagagaggtcctcttgccagctcaaagtcaagcatctgggcgcccaatgttagccagcggcaccccctggtggcgggcgtgggagacacggcggggcgcgcttgtcgggggttggggggtgggtcggaggggtggcatcctccagccctgatggtcccacttaccgcacctcgccgggaagagctcgtcctgctggtcgggcctccgagcggactgggcagcaccatgctcaagcctagggttcgatccccgcctccggaagcctcagtatccatccctcccctctgcctccctcttcgcgtgcctgaatatttatacaagatacaggcgtcatcacagccgccctcggcttccagagcagctggcttcgttcataaatattataaccactcagaattcatcatcatcacagttaatgataaaattccacagtgccagaactaaaagtcatccgggttcacgaacttggtgcatttccttccagacttttaaaaagaagatatttagggaatttttttttcaagatttttccccccagtccgcttacaaagtaataccatgttcgctgtaaaaaatttggaaataatggaaatgtataaagaaggaaataaaattctgctgtatctccaccca

SEQ ID NO: 22276 - DNA, 8150 bp, Homo sapiens
  source 1..8150: mol_type = unassigned DNA
gctcgcggttgacagctcagctggtgccgagcaactcgtgccagccagtcgtgtctcagcctggagagtgcgcgcaccgccgcccgggcagccgctggctccagctcacgaaacagccccgggcgccgcgccgctctgagtccagcctcctactgagaacagtccctcccttgtgcgggtcgcacggctagccgcaggttcggccacgtcaaatccattttctaaaaaagcagggagcagagctctctcttcgccgccgacgcagaaaggagctggggaggaaaaagctgctgccttttgcgctggagattcgtgggcaaggcttctcattttcccaggctgcttcccctcccgggtgaggagcgtcctgagactaaggaaagagcctggaaaatggagcagacctggacgagagattattttgcagaggatgatggggagatggtacccagaacgagtcacacagcagcttttcttagtgacactaaagatcgaggccctccagtgcagtcacagatctggagaagtggtgaaaaggtcccgtttgtgcagacatattccttgagagcatttgagaaaccccctcaggtacagacccaggctcttcgagactttgagaagcacctcaatgacctgaagaaggagaacttcagcctcaagctgcgcatctacttcctggaggagcgcatgcaacagaagtatgaggccagccgggaggacatctacaagcggaacattgagctgaaggttgaagtggagagcttgaaacgagaactccaggacaagaaacagcatctggataaaacatgggctgatgtggagaatctcaacagtcagaatgaagctgagctccgacgccagtttgaggagcgacagcaggagacggagcatgtttatgagctcttggagaataagatccagcttctgcaggaggaatccaggctagcaaagaatgaagctgcgcggatggcagctctggtggaagcagagaaggagtgtaacctggagctctcagagaaactgaagggagtcaccaaaaactgggaagatgtaccaggagaccaggtcaagcccgaccaatacactgaggccctggcccagagggacaagagaattgaagaactgaatcagagcctggctgcccaggagaggcttgtagaacagctatctcgggagaaacaacaactgctacatctgttggaggagccaactagcatggaagtgcagcccatgactgaagagttgctgaaacaacaaaagctgaattcacatgagaccactataactcagcagtctgtatctgattcccacttggcagaactccaggaaaaaatccagcaaacagaggccaccaacaagattcttcaagagaaacttaatgaaatgagctatgaactaaagtgtgctcaggagtcgtctcaaaagcaagatggtacaattcagaacctcaaggaaactctgaaaagcagggaacgtgagactgaggagttgtaccaggtaattgaaggtcaaaatgacacaatggcaaagcttcgagaaatgctgcaccaaagccagcttggacaacttcacagctcagagggtacttctccagctcagcaacaggtagctctgcttgatcttcagagtgctttattctgcagccaacttgaaatacagaagctccagagggtggtacgacagaaagagcgccaactggctgatgccaaacaatgtgtgcaatttgtagaggctgcagcacacgagagtgaacagcagaaagaggcttcttggaaacataaccaggaattgcgaaaagccttgcagcagctacaagaagaattgcagaataagagccaacagcttcgtgcctgggaggctgaaaaatacaatgagattcgaacccaggaacaaaacatccagcacctaaaccatagtctgagtcacaaggagcagttgcttcaggaatttcgggagctcctacagtatcgagataactcagacaaaacccttgaagcaaatgaaatgttgcttgagaaacttcgccagcgaatacatgataaagctgttgctctggagcgggctatagatgaaaaattctctgctctagaagagaaagaaaaagaactgcgccagcttcgtcttgctgtgagagagcgagatcatgacttagagagactgcgcgatgtcctctcctccaatgaagctactatgcaaagtatggagagtctcctgagggccaaaggcctggaagtggaacagttatctactacctgtcaaaacctccagtggctgaaagaagaaatggaaaccaaatttagccgttggcagaaggaacaagagagtatcattcagcagttacagacgtctcttcatgataggaacaaagaagtggaggatcttagtgcaacactgctctgcaaacttggaccagggcagagtgagatagcagaggagctgtgccagcgtctacagcgaaaggaaaggatgctgcaggaccttctaagtgatcgaaataaacaagtgctggaacatgaaatggagattcaaggcctgcttcagtctgtgagcaccagggagcaggaaagccaagctgctgcagagaagttggtgcaagccttaatggaaagaaattcagaattacaggccctgcgccaatatttaggagggagagactccctgatgtcccaagcacccatctctaaccaacaagctgaagttacccccactggctgtcttggaaaacagactgatcaaggttcaatgcagataccttccagagatgatagcacttcattgactgccaaagaggatgtcagcatacccagatccacattaggagacttggacacagttgcagggctggaaaaagaactgagtaatgccaaagaggaacttgaactcatggctaaaaaagaaagagaaagtcagatggaactttctgctctacagtccatgatggctgtgcaggaagaagagctgcaggtgcaggctgctgatatggagtctctgaccaggaacatacagattaaagaagatctcataaaggacctgcaaatgcaactggttgatcctgaagacataccagctatggaacgcctgacccaggaagtcttacttcttcgggaaaaagttgcttcagtagaatcccagggtcaagaaatttcaggaaaccgaagacaacagttgctgctgatgctagaaggactagtagatgaacggagtcggctcaatgaggccttacaagcagagagacagctctatagcagtctggtgaagttccatgcccatccagagagctctgagagagaccgaactctgcaggtggaactggaaggggctcaggtgttacgcagtcggctagaagaagttcttggaagaagcttggagcgcttaaacaggctggagaccctggccgccattggaggtgcagctgcaggggatgacaccgaagatacaagcactgagttcactgacagtattgaggaggaggctgcacaccatagtcaccagcaacttgtcaaggtggctttggagaaaagtctggcaactgtggagacccagaacccatctttttcccctccttctccgatgggaggggacagtaacaggtgtcttcaggaagaaatgctccacctgagggctgagttccaccagcacttagaagagaagaggaaagctgaggaggaactgaaggagctaaaggctcaaattgaggaagcaggattctcctcagtgtcccacatcaggaacaccatgctgagcctttgccttgagaatgcggagctgaaagagcagatgggagaagcaatgtctgatggatgggagatcgaggaagacaaggagaagggcgagttggataaccagtcccagcctcgtgaccctgggcctcagtcagcgtttagcctaccagggtccacccagcacctgcgctcccagctgtcacaatgcaaacaacgctatcaagatctccaggagaagctgctgctatcagaagccactgtctttgctcaggctaacgagctggagaaatacagagttatgcttacaggtgaatccttggtgaagcaggacagcaagcagatccaggtggacctccaggacctgggctatgagacttgtggccgaagcgagaatgaggctgaacgggaggaaaccaccagtcctgagtgtgaggagcacaacagcctcaaggaaatggtcctgatggaggggctgtgctctgagcagggacgccggggctcaacactggctagttcctctgagaggaagcccttggagaaccagctagggaagcaggaagagttccgggtatatggaaagtcagaaaacatcttggtcctacgaaaggacatcaaagatctgaaggcccagctgcagaatgccaacaaggtcattcaaaacctcaagagccgggtccggtccctctcagttacaagtgattattcgtctagtctggaaagaccctggaagctgagagctgttggcaccttggaggggtcttcacctcatagtgtccctgatgaggatgaggggtggctgtctgatggcactggggctttctactctccagggcttcaggccaaaaaggacctggagagtctcatccagagagtatcccagctggaggcccagctcccaaaaaatggactagaagagaagctggctgaggagctgagatcagcctcgtggcctgggaaatatgattccctgattcaggatcaggcccgggaactgtcttacctacggcaaaaaatacgagaagggagaggtatttgttatcttatcacccggcatgcaaaagatacagtaaaatcttttgaggatctcctaaggagcaatgacattgactactacctgggacagagcttccgggagcaactcgcccagggaagccagctgacagagaggctcaccagcaaactcagcaccaaggatcataaaagtgagaaagatcaagctggacttgagccactggccctcaggctcagcagggagctgcaggagaaggagaaagtgattgaagtcctgcaggccaagctggatgctcggtccctcacaccctccagcagccatgccttgtctgactcccaccgctctcccagcagcacctctttcctgtctgatgaactggaagcctgctctgacatggacatagtcagcgagtacacacactatgaagagaagaaagcttctcccagtcactcagattccatccatcattcgagtcattctgctgtgttgtcttctaaaccatcatcaaccagtgcatctcagggggctaaggccgaatccaacagcaaccccatcagcttgccaactccccagaatacccccaaggaggccaaccaggcccattcaggtgccagcactgttcctcctgcttccacagctacattgctgagcaacgacttggaagccgactcttcctactacctcaactctgcccagcctcactctcctccaaggggcaccatagaactgggaagaatcctagagcctgggtacctgggcagcagtggcaagtgggatgtgatgaggcctcagaaagggagtgtatctggggacctatcctcaggctcctctgtgtaccagcttaactccaaacccacaggggctgacctgctggaagagcatcttggtgaaatccggaacctgcgccagcgcctggaggaatccatctgcatcaatgaccgcctacgggagcaactggaacaccggctgacctctactgctcgtggaaggggatccacttctaacttctacagtcagggcctggagtccatacctcagctctgcaatgagaacagagtcctcagggaagacaatcgaagacttcaggctcaactgagtcatgtttccagagagcactcccaggaaacagaaagcctgagggaggctctgctgtcctctcgatcccaccttcaagagctggaaaaggagctggagcaccagaaggtggaaaggcagcagcttttggaagacttgagggagaagcagcaagaggtcttgcatttcagggaggaacgtctttccctccaggaaaacgactccagactgcagcacaagctggttctcctgcagcaacagtgtgaagagaaacagcagctctttgagtccctccagtcagagctacaaatctacgaggcactttatggcaattccaagaaggggctgaaagcttacagcctggatgcctgtcaccaaatccctttgagcagtgacctgagccacctggtggcagaggtacgagctctgagagggcagctggagcagagcattcaggggaacaattgtctgcgactgcagctgcaacagcagctggagagcggtgctggcaaagccagcctcagcccctcctccattaaccagaacttcccagccagcactgaccctggaaacaagcagctgctcctccaagattcagctgtgtcccctccagtccgggatgttggtatgaattccccagctctggtcttccccagctctgcttcctctactcctggctcagaaacgcccataatcaacagagcaaatggcttgggtttggatacttctccagtaatgaagacccctcccaagctagagggtgatgctactgatggctcctttgccaataagcatggccgccatgtcattggccacattgatgactacagtgccctaagacagcagattgcggagggcaagctgctggtcaaaaagatagtgtctcttgtgagatcagcgtgcagcttccctggccttgaagcccaaggcacagaggtgctaggcagcaaaggtattcatgagcttcggagcagcaccagtgccctgcaccatgccctagaggagtcagcttccctcctcaccatgttctggagagcggccctgccaagcacccacatccctgtgctgcctggcaaagtgggagaatcaacagaaagggaacttctggaactgagaaccaaagtatccaaacaggagcgactccttcagagcacaactgagcatctgaagaacgccaaccagcagaaggagagcatggaacagttcattgtcagccagctaaccagaacacatgatgttttaaagaaggcaaggactaacttagaggtgaaatccctaagggctctgccatgtactccagccttgtgacccttgccttccaggaaccatgcaagaagcgcagccaccagaagtccttaaaacagcaggaaaggtgggcctgtcccccttttgtgcagctacctatctgctgaggagcatctgggcctcattcctccaagtccacgggagggtccagaagagggagtcagagatgtatcctggtggagctgggagaaaggcagaaagcctttctgacggctatggaatacgattagccaaggtccacttggcccagcactaagaaaaagatgcgtagtttgcacagaaggttttgtgatcctgcctctcaacagccccagcagcttgggaactagcaagagcacatttcttgcctcatcagctgtcctgagatggaaaactcagtgaatataggaccctgattccgatgaaaggggcacgtggtcccaatgctggagctcctctggcaggttctaaaagcacactactgagcagcggtgccctgccggacactgctggcgggggctcagtgagcactactcacagatccacacctgaccctgttgggtcgagtcaggctgggccttggtctgcactgtagcacctgtgttctttgagttcacatcatgaatgtggtgacttcccagataccatctcaggcttaacctagcacatcctatttcttttcttctatgatatccaaattggactgacctcacttcaaagttgctgtcccattttgtcaccctatcttatctcggggaaattgcagactgatggccagaccaactctgttgaaattcttgcatagagcaaacctgtgctcatttttaagtggcatgggagaggccccaagcctagtaaagcctagtctgtgtcttcacagtgctggtagaatgtgtttgtgtgtataaatatatgatatagatttatatatgttgctaacgccatatattgaaggccaacataactggtggacagggtgggtgacagaaaatgaaagtctttttggtgattgttaaagcaagatgtgtataaagaaataaatagtttttctttcactg

SEQ ID NO: 22277 - DNA, 5676 bp, Homo sapiens
  source 1..5676: mol_type = unassigned DNA
ggatccttgagggcactggtgcgactttcaggtgaggtcttagcagatgaaagcggctggctgtggcccgcgccagtagtgctttctgctccgcactcgccgtgagccaggtgtgcaaccggatttggggcgagggtcgcgctggctacctcgcatgcgcagagccggaagcccgctgaccggactacagctcccagaagagccttgtggaggccgcagacgcgaagccgctggcgccatcttgaaatctgatcctccatccccgaggctttgcgtctgcgcggccggccgctgctgctccgggagcccagtctgctaaaaggggaggacgttgaggacgcggcggctggcgggagagacagctggggagagacatggcagggtcggagcgcggcctgcgcctctgtcactcagcatcctcttaggcgtttccacgcccgccccctgcccgaggggcggggctgacggctctggtacccggagtcggcgcgcggggcaggggcgcgcccctgcagagtggggaccccactgggctgtgccatgctgaccggagaccaccgaggcgggagacagagcgcggcgaagagccattgagtggtcacccagtagccgccgccgccgccgcctcgggaagcttgccacccgctaggagggaagatgaaggagatttgcaggatctgtgcccgagagctgtgtggaaaccagcggcgctggatcttccacacggcgtccaagctcaatctccaggttctgctttcgcacgtcttgggcaaggatgtcccccgcgatggcaaagccgagttcgcttgcagcaagtgtgctttcatgcttgatcgaatctatcgattcgacacagttattgcccggattgaagcgctttctattgagcgcttgcaaaagctgctactggagaaggatcgcctcaagttctgcattgccagtatgtatcggaagaataacgatgactctggcgcggagatcaaggcggggaatgggacggttgacatgtccgtcttacccgatgcgagatactctgcactgctccaggaggacttcgcctattcagggtttgagtgctgggtggagaatgaggatcagatccaggagccacacagctgccatggttcagaaggccctggaaaccgacccaggagatgccgtggttgtgccgctttgcgggttgctgattctgactatgaagccatttgtaaggtacctcgaaaggtggccagaagtatctcctgcggcccttctagcaggtggtcgaccagcatttgcactgaagaaccagcgttgtctgaggttgggccacccgacttagcaagcacaaaggtacccccagatggagaaagcatggaggaagagacgcctggttcctctgtggaatctttggatgcaagcgtccaggctagccctccacaacagaaagatgaggagactgagagaagtgcaaaggaacttggaaagtgtgactgttgttcagatgatcaggctccgcagcatgggtgtaatcacaagctggaattagctcttagcatgattaaaggtcttgattataagcccatccagagcccccgagggagcaggcttccgattccagtgaaatccagcctacctggagccaagcctggccctagcatgacagatggagttagttccggtttccttaacaggtctttgaaacccctttacaagacacctgtgagttatcccttggagctttcagacctgcaggagctgtgggatgatctctgtgaagattatttgccgctccgggtccagcccatgactgaagagttgctgaaacaacaaaagctgaattcacatgagaccactataactcagcagtctgtatctgattcccacttggcagaactccaggaaaaaatccagcaaacagaggccaccaacaagattcttcaagagaaacttaatgaaatgagctatgaactaaagtgtgctcaggagtcgtctcaaaagcaagatggtacaattcagaacctcaaggaaactctgaaaagcagggaacgtgagactgaggagttgtaccaggtaattgaaggtcaaaatgacacaatggcaaagcttcgagaaatgctgcaccaaagccagcttggacaacttcacagctcagagggtacttctccagctcagcaacaggtagctctgcttgatcttcagagtgctttattctgcagccaacttgaaatacagaagctccagagggtggtacgacagaaagagcgccaactggctgatgccaaacaatgtgtgcaatttgtagaggctgcagcacacgagagtgaacagcagaaagaggcttcttggaaacataaccaggaattgcgaaaagccttgcagcagctacaagaagaattgcagaataagagccaacagcttcgtgcctgggaggctgaaaaatacaatgagattcgaacccaggaacaaaacatccagcacctaaaccatagtctgagtcacaaggagcagttgcttcaggaatttcgggagctcctacagtatcgagataactcagacaaaacccttgaagcaaatgaaatgttgcttgagaaacttcgccagcgaatacatgataaagctgttgctctggagcgggctatagatgaaaaattctctgctctagaagagaaagaaaaagaactgcgccagcttcgtcttgctgtgagagagcgagatcatgacttagagagactgcgcgatgtcctctcctccaatgaagctactatgcaaagtatggagagtctcctgagggccaaaggcctggaagtggaacagttatctactacctgtcaaaacctccagtggctgaaagaagaaatggaaaccaaatttagccgttggcagaaggaacaagagagtatcattcagcagttacagacgtctcttcatgataggaacaaagaagtggaggatcttagtgcaacactgctctgcaaacttggaccagggcagagtgagatagcagaggagctgtgccagcgtctacagcgaaaggaaaggatgctgcaggaccttctaagtgatcgaaataaacaagtgctggaacatgaaatggagattcaaggcctgcttcagtctgtgagcaccagggagcaggaaagccaagctgctgcagagaagttggtgcaagccttaatggaaagaaattcagaattacaggccctgcgccaatatttaggagggagagactccctgatgtcccaagcacccatctctaaccaacaagctgaagttacccccactggctgtcttggaaaacagactgatcaaggttcaatgcagataccttccagagatgatagcacttcattgactgccaaagaggatgtcagcatacccagatccacattaggagacttggacacagttgcagggctggaaaaagaactgagtaatgccaaagaggaacttgaactcatggctaaaaaagaaagagaaagtcagatggaactttctgctctacagtccatgatggctgtgcaggaagaagagctgcaggtgcaggctgctgatatggagtctctgaccaggaacatacagattaaagaagatctcataaaggacctgcaaatgcaactggttgatcctgaagacataccagctatggaacgcctgacccaggaagtcttacttcttcgggaaaaagttgcttcagtagaatcccagggtcaagaaatttcaggaaaccgaagacaacagttgctgctgatgctagaaggactagtagatgaacggagtcggctcaatgaggccttacaagcagagagacagctctatagcagtctggtgaagttccatgcccatccagagagctctgagagagaccgaactctgcaggtggaactggaaggggctcaggtgttacgcagtcggctagaagaagttcttggaagaagcttggagcgcttaaacaggctggagaccctggccgccattggaggtgcagctgcaggggatgacaccgaagatacaagcactgagttcactgacagtattgaggaggaggctgcacaccatagtcaccagcaactatagcttcagaagcatttttacttgcaagacgatggacacattccccttgggctttttgtaactgaaacgcaccacagaagacagggagtcatcgaagggctgctcggggaggtggcagggcggaggacctgcttgggaagaaactccaagaagattggaatgcttccaaagcaagaatctttctcagtgaaatctcattatacaaagagaaccttatgcaacctgacaaaccactgaggtcatggtgactcagtgatcagcagatggtacttcaacagcaatcccctgtcaaacctcagaacttgaggctgaaacattgcttccacccaccatcagtgaagatgtaactagcatgttacaagagtgaataatctggacttcagagattaagtcaccaatagtgatctcacaagcactcaccggaactcctataatgtctccactttgtccatgccatttagcaatctcatctcctaaatggactgtgcctatgattcttaaggagaaagtgaatcattggtagatatcctgcacaagcagctggactttccagtaatagctttcttggggctattaggaaaattaaacaagaaatgaggctttctgggtctgcctgtatgtcttctgcataagacaaagaagagacatcgaatcaaccaataagaagagcccaaataagcatcctcaaatcttttgggatttggcacttggggacatgagtagttgtctgggatacgtcatattctcaacagtttctttgtagtagtaggatcaccttcttataataggatcaccttcttgttgctatagctgtacccgaccttcccttctcccttgagtgcttgcatgagctccacttttccttttgcttgaacagcttctcctgagtcctccttaccgatggttgtgactttaattatatacatctctgtccctccagacagatccctctgtcctcactctctgatttcattgaggatcttgggtgagagagagggacctgcaggatgaacaaatgtctactctaagacagctagattgggaggttggctggtcactgatggttataatgactgtgggacaggattaacttcagaataaatgaacaggagacacagatatgaagaaagtttctgattgatatggtctgaagtactcctggtattgcaagtcatttgctctaattctcaattgtaggcaaactgatttgtaaatttgcttcttcagccttctttcctgtagcctagcatggagaatctgaccagaccccattttgagaaggtcagcctacactggaatgaactttttacattagggcatttgtatttccctcacaatacttgccacattacttggcataggagagatgcttagtgtaattataagttaacaagcctttggatcagggcttgactcatgatagacaaagtatatgcctgctggatggaagaatctcttgggcgagcaccatttttctttccatcacctttccttgaaaatatatcttcagctttgggtaggaggaatcttggtgtatgaaatcattgcaaatttacttcatcttttctggagtttgaagttgtgactctcctgctaccaattaaataaagcttactttgccat

SEQ ID NO: 22278 - DNA, 1137 bp, Homo sapiens
  source 1..1137: mol_type = unassigned DNA
ccagtcccgagtcccggagagagctccagcaataggggccatgtcgccgtagccccagcctctcggtccgcagcctcagcagcgtcccagccggctggcttcatgctgcggtgcagctgcaccatgttcctgggttgagggggcaatcgggcacgctcctccccatgggttgcccatcatgtctaatggatatcgcactctgtcccagcacctcaatgacctgaagaaggagaacttcagcctcaagctgcgcatctacttcctggaggagcgcatgcaacagaagtatgaggccagccgggaggacatctacaagcggaacattgagctgaaggttgaagtggagagcttgaaacgagaactccaggacaagaaacagcatctggataaaacatgggctgatgtggagaatctcaacagtcagaatgaagctgagctccgacgccagtttgaggagcgacagcaggagacggagcatgtttatgagctcttggagaataagatccagcttctgcaggaggaatccaggctagcaaagaatgaagctgcgcggatggcagctctggtggaagcagagaaggagtgtaacctggagctctcagagaaactgaagggagtcaccaaaaactgggaagatgtaccaggagaccaggtcaagcccgaccaatacactgaggccctggcccagagggacaagtaggtgccttcggtgctctttttgtcgcttgtcttttgcccattctcaaggcatacagcagctgtcctgttccctttcaaggactgacagtaggagcttcactatttctaagactttatgggcccacaaccgaagacattcttttcagggttgaattttcagtggtatccattatgaaaactcacttcatggattcagtgggcaaatagcggcaagcaagagacatagattcacttattcagcaaacatttactgggcatgccacatgccagataccgggctaagtatctggcatgtgttacagaaacaaaagacctaattcttgtcaccaagaaacatgttacatgattttaataagttccctgatagaagagcatggggtgctctggggaaatattggagggtcatccattccacattaaaagagcaagttgtctgct

SEQ ID NO: 22279 - DNA, 1690 bp, Homo sapiens
  source 1..1690: mol_type = unassigned DNA
aaacttatctgaggttggaaataaagagaaggtgacattggagcggatagaaaggaagaaacggcgtgggatctgggaatgaggcagtgggtggagagagaatggggagacgacagaggatgaagggcagctgagtgtgtctgcgggagaaggaccaaagcaatctgggcggagcaggtggcagaggcagccgcggaggaggcccagggaactgacggggatgctcagccaggcccagaggatgcgccctggcagtcccggaagacaccaggaaaacaagcaggaaccgtagctaggactggggtggccaggcccaggaaatccatgaagggcacagacagcgggtcctgctgccgccgccgatgcgactttggctgctgctgtcgcgcgtcccgccgggctcactacacgccttaccggtccggggacgcgacgcgaacccctcagtccccacggcagaccccgagccgggaaagacggcgcccggagccagccgggagctgggcagcagcggccgaggaggaagaagcagctgcggcggccacaccctggatgagagattattttgcagaggatgatggggagatggtacccagaacgagtcacacagcagcttttcttagtgacactaaagatcgaggccctccagtgcagtcacagatctggagaagtggtgaaaaggtcccgtttgtgcagacatattccttgagagcatttgagaaaccccctcaggtacagacccaggctcttcgagactttgagaagcacctcaatgacctgaagaaggagaacttcagcctcaagctgcgcatctacttcctggaggagcgcatgcaacagaagtatgaggccagccgggaggacatctacaagcggaacattgagctgaaggttgaagtggagagcttgaaacgagaactccaggacaagaaacagcatctggataaaacatgggctgatgtggagaatctcaacagtcagaatgaagctgagctccgacgccagtttgaggagcgacagcaggagacggagcatgtttatgagctcttggagaataagatccagcttctgcaggaggaatccaggctagcaaagaatgaagctgcgcggatggcagctctggtggaagcagagaaggagtgtaacctggagctctcagagaaactgaagggagtcaccaaaaactgggaagatgtaccaggagaccaggtcaagcccgaccaatacactgaggccctggcccagagggacaagtaggtgccttcggtgctctttttgtcgcttgtcttttgcccattctcaaggcatacagcagctgtcctgttccctttcaaggactgacagtaggagcttcactatttctaagactttatgggcccacaaccgaagacattcttttcagggttgaattttcagtggtatccattatgaaaactcacttcatggattcagtgggcaaatagcggcaagcaagagacatagattcacttattcagcaaacatttactgggcatgccacatgccagataccgggctaagtatctggcatgtgttacagaaacaaaagacctaattcttgtcaccaagaaacatgttacatgattttaataagttccctgatagaagagcatggggtgctctggggaaatattggagggtcatccattccacattaaaagagcaagttgtc

SEQ ID NO: 22280 - DNA, 4677 bp, Homo sapiens
  source 1..4677: mol_type = unassigned DNA
aggggccatgtcgccgtagccccagcctctcggtccgcagcctcagcagcgtcccagccggctggcttcatgctgcggtgcagctgcaccatgttcctgggttgagggggcaatcgggcacgctcctccccatgggttgcccatcatgtctaatggatatcgcactctgtcccagcacctcaatgacctgaagaaggagaacttcagcctcaagctgcgcatctacttcctggaggagcgcatgcaacagaagtatgaggccagccgggaggacatctacaagcggaacattgagctgaaggttgaagtggagagcttgaaacgagaactccaggacaagaaacagcatctggataaaacatgggctgatgtggagaatctcaacagtcagaatgaagctgagctccgacgccagtttgaggagcgacagcaggagacggagcatgtttatgagctcttggagaataagatccagcttctgcaggaggaatccaggctagcaaagaatgaagctgcgcggatggcagctctggtggaagcagagaaggagtgtaacctggagctctcagagaaactgaagggagtcaccaaaaactgggaagatgtaccaggagaccaggtcaagcccgaccaatacactgaggccctggcccagagggacaagagaattgaagaactgaatcagagcctggctgcccaggagaggcttgtagaacagctatctcgggagaaacaacaactgctacatctgttggaggagccaactagcatggaagtgcagcccatgactgaagagttgctgaaacaacaaaagctgaattcacatgagaccactataactcagcagtctgtatctgattcccacttggcagaactccaggaaaaaatccagcaaacagaggccaccaacaagattcttcaagagaaacttaatgaaatgagctatgaactaaagtgtgctcaggagtcgtctcaaaagcaagatggtacaattcagaacctcaaggaaactctgaaaagcagggaacgtgagactgaggagttgtaccaggtaattgaaggtcaaaatgacacaatggcaaagcttcgagaaatgctgcaccaaagccagcttggacaacttcacagctcagagggtacttctccagctcagcaacaggtagctctgcttgatcttcagagtgctttattctgcagccaacttgaaatacagaagctccagagggtggtacgacagaaagagcgccaactggctgatgccaaacaatgtgtgcaatttgtagaggctgcagcacacgagagtgaacagcagaaagaggcttcttggaaacataaccaggaattgcgaaaagccttgcagcagctacaagaagaattgcagaataagagccaacagcttcgtgcctgggaggctgaaaaatacaatgagattcgaacccaggaacaaaacatccagcacctaaaccatagtctgagtcacaaggagcagttgcttcaggaatttcgggagctcctacagtatcgagataactcagacaaaacccttgaagcaaatgaaatgttgcttgagaaacttcgccagcgaatacatgataaagctgttgctctggagcgggctatagatgaaaaattctctgctctagaagagaaagaaaaagaactgcgccagcttcgtcttgctgtgagagagcgagatcatgacttagagagactgcgcgatgtcctctcctccaatgaagctactatgcaaagtatggagagtctcctgagggccaaaggcctggaagtggaacagttatctactacctgtcaaaacctccagtggctgaaagaagaaatggaaaccaaatttagccgttggcagaaggaacaagagagtatcattcagcagttacagacgtctcttcatgataggaacaaagaagtggaggatcttagtgcaacactgctctgcaaacttggaccagggcagagtgagatagcagaggagctgtgccagcgtctacagcgaaaggaaaggatgctgcaggaccttctaagtgatcgaaataaacaagtgctggaacatgaaatggagattcaaggcctgcttcagtctgtgagcaccagggagcaggaaagccaagctgctgcagagaagttggtgcaagccttaatggaaagaaattcagaattacaggccctgcgccaatatttaggagggagagactccctgatgtcccaagcacccatctctaaccaacaagctgaagttacccccactggctgtcttggaaaacagactgatcaaggttcaatgcagataccttccagagatgatagcacttcattgactgccaaagaggatgtcagcatacccagatccacattaggagacttggacacagttgcagggctggaaaaagaactgagtaatgccaaagaggaacttgaactcatggctaaaaaagaaagagaaagtcagatggaactttctgctctacagtccatgatggctgtgcaggaagaagagctgcaggtgcaggctgctgatatggagtctctgaccaggaacatacagattaaagaagatctcataaaggacctgcaaatgcaactggttgatcctgaagacataccagctatggaacgcctgacccaggaagtcttacttcttcgggaaaaagttgcttcagtagaatcccagggtcaagaaatttcaggaaaccgaagacaacagttgctgctgatgctagaaggactagtagatgaacggagtcggctcaatgaggccttacaagcagagagacagctctatagcagtctggtgaagttccatgcccatccagagagctctgagagagaccgaactctgcaggtggaactggaaggggctcaggtgttacgcagtcggctagaagaagttcttggaagaagcttggagcgcttaaacaggctggagaccctggccgccattggaggtgcagctgcaggggatgacaccgaagatacaagcactgagttcactgacagtattgaggaggaggctgcacaccatagtcaccagcaactatagcttcagaagcatttttacttgcaagacgatggacacattccccttgggctttttgtaactgaaacgcaccacagaagacagggagtcatcgaagggctgctcggggaggtggcagggcggaggacctgcttgggaagaaactccaagaagattggaatgcttccaaagcaagaatctttctcagtgaaatctcattatacaaagagaaccttatgcaacctgacaaaccactgaggtcatggtgactcagtgatcagcagatggtacttcaacagcaatcccctgtcaaacctcagaacttgaggctgaaacattgcttccacccaccatcagtgaagatgtaactagcatgttacaagagtgaataatctggacttcagagattaagtcaccaatagtgatctcacaagcactcaccggaactcctataatgtctccactttgtccatgccatttagcaatctcatctcctaaatggactgtgcctatgattcttaaggagaaagtgaatcattggtagatatcctgcacaagcagctggactttccagtaatagctttcttggggctattaggaaaattaaacaagaaatgaggctttctgggtctgcctgtatgtcttctgcataagacaaagaagagacatcgaatcaaccaataagaagagcccaaataagcatcctcaaatcttttgggatttggcacttggggacatgagtagttgtctgggatacgtcatattctcaacagtttctttgtagtagtaggatcaccttcttataataggatcaccttcttgttgctatagctgtacccgaccttcccttctcccttgagtgcttgcatgagctccacttttccttttgcttgaacagcttctcctgagtcctccttaccgatggttgtgactttaattatatacatctctgtccctccagacagatccctctgtcctcactctctgatttcattgaggatcttgggtgagagagagggacctgcaggatgaacaaatgtctactctaagacagctagattgggaggttggctggtcactgatggttataatgactgtgggacaggattaacttcagaataaatgaacaggagacacagatatgaagaaagtttctgattgatatggtctgaagtactcctggtattgcaagtcatttgctctaattctcaattgtaggcaaactgatttgtaaatttgcttcttcagccttctttcctgtagcctagcatggagaatctgaccagaccccattttgagaaggtcagcctacactggaatgaactttttacattagggcatttgtatttccctcacaatacttgccacattacttggcataggagagatgcttagtgtaattataagttaacaagcctttggatcagggcttgactcatgatagacaaagtatatgcctgctggatggaagaatctcttgggcgagcaccatttttctttccatcacctttccttgaaaatatatcttcagctttgggtaggaggaatcttggtgtatgaaatcattgcaaatttacttcatcttttctggagtttgaagttgtgactctcctgctaccaattaaataaagcttactttgccataa

SEQ ID NO: 22281 - DNA, 4922 bp, Homo sapiens
  source 1..4922: mol_type = unassigned DNA
gcagcctcagcagcgtcccagccggctggcttcatgctgcggtgcagctgcaccatgttcctgggttgagggggcaatcgggcacgctcctccccatgggttgcccatcatgtctaatggatatcgcactctgtcccagcacctcaatgacctgaagaaggagaacttcagcctcaagctgcgcatctacttcctggaggagcgcatgcaacagaagtatgaggccagccgggaggacatctacaagcggaacattgagctgaaggttgaagtggagagcttgaaacgagaactccaggacaagaaacagcatctggataaaacatgggctgatgtggagaatctcaacagtcagaatgaagctgagctccgacgccagtttgaggagcgacagcaggagacggagcatgtttatgagctcttggagaataagatccagcttctgcaggaggaatccaggctagcaaagaatgaagctgcgcggatggcagctctggtggaagcagagaaggagtgtaacctggagctctcagagaaactgaagggagtcaccaaaaactgggaagatgtaccaggagaccaggtcaagcccgaccaatacactgaggccctggcccagagggacaagagaattgaagaactgaatcagagcctggctgcccaggagaggcttgtagaacagctatctcgggagaaacaacaactgctacatctgttggaggagccaactagcatggaagtgcagcccatgactgaagagttgctgaaacaacaaaagctgaattcacatgagaccactataactcagcagtctgtatctgattcccacttggcagaactccaggaaaaaatccagcaaacagaggccaccaacaagattcttcaagagaaacttaatgaaatgagctatgaactaaagtgtgctcaggagtcgtctcaaaagcaagatggtacaattcagaacctcaaggaaactctgaaaagcagggaacgtgagactgaggagttgtaccaggtaattgaaggtcaaaatgacacaatggcaaagcttcgagaaatgctgcaccaaagccagcttggacaacttcacagctcagagggtacttctccagctcagcaacaggtagctctgcttgatcttcagagtgctttattctgcagccaacttgaaatacagaagctccagagggtggtacgacagaaagagcgccaactggctgatgccaaacaatgtgtgcaatttgtagaggctgcagcacacgagagtgaacagcagaaagaggcttcttggaaacataaccaggaattgcgaaaagccttgcagcagctacaagaagaattgcagaataagagccaacagcttcgtgcctgggaggctgaaaaatacaatgagattcgaacccaggaacaaaacatccagcacctaaaccatagtctgagtcacaaggagcagttgcttcaggaatttcgggagctcctacagtatcgagataactcagacaaaacccttgaagcaaatgaaatgttgcttgagaaacttcgccagcgaatacatgataaagctgttgctctggagcgggctatagatgaaaaattctctgctctagaagagaaagaaaaagaactgcgccagcttcgtcttgctgtgagagagcgagatcatgacttagagagactgcgcgatgtcctctcctccaatgaagctactatgcaaagtatggagagtctcctgagggccaaaggcctggaagtggaacagttatctactacctgtcaaaacctccagtggctgaaagaagaaatggaaaccaaatttagccgttggcagaaggaacaagagagtatcattcagcagttacagacgtctcttcatgataggaacaaagaagtggaggatcttagtgcaacactgctctgcaaacttggaccagggcagagtgagatagcagaggagctgtgccagcgtctacagcgaaaggaaaggatgctgcaggaccttctaagtgatcgaaataaacaagtgctggaacatgaaatggagattcaaggcctgcttcagtctgtgagcaccagggagcaggaaagccaagctgctgcagagaagttggtgcaagccttaatggaaagaaattcagaattacaggccctgcgccaatatttaggagggagagactccctgatgtcccaagcacccatctctaaccaacaagctgaagttacccccactggctgtcttggaaaacagactgatcaaggttcaatgcagataccttccagagatgatagcacttcattgactgccaaagaggatgtcagcatacccagatccacattaggagacttggacacagttgcagggctggaaaaagaactgagtaatgccaaagaggaacttgaactcatggctaaaaaagaaagagaaagtcagatggaactttctgctctacagtccatgatggctgtgcaggaagaagagctgcaggtgcaggctgctgatatggagtctctgaccaggaacatacagattaaagaagatctcataaaggacctgcaaatgcaactggttgatcctgaagacataccagctatggaacgcctgacccaggaagtcttacttcttcgggaaaaagttgcttcagtagaatcccagggtcaagaaatttcaggaaaccgaagacaacagttgctgctgatgctagaaggactagtagatgaacggagtcggctcaatgaggccttacaagcagagagacagctctatagcagtctggtgaagttccatgcccatccagagagctctgagagagaccgaactctgcaggtggaactggaaggggctcaggtgttacgcagtcggctagaagaagttcttggaagaagcttggagcgcttaaacaggctggagaccctggccgccattggaggtgcagctgcaggggatgacaccgaagatacaagcactgagttcactgacagtattgaggaggaggctgcacaccatagtcaccagcaagtaagtcagtgtcagggtctgggacttccagggtggacagcacacagcccttctgaggtctgatagtctcctgcagcccttgcggacttagtgagaagatatctttttacataaactacttctcagtcatcttcctgttctccttgaacttcccagctgcctttccaacccatatcttcactccatttttctctccaatccaccctttggtttgtattgtatctctttcttctgcttccttccccctcctacccacctttgcccctatttattctctgtagctatagcttcagaagcatttttacttgcaagacgatggacacattccccttgggctttttgtaactgaaacgcaccacagaagacagggagtcatcgaagggctgctcggggaggtggcagggcggaggacctgcttgggaagaaactccaagaagattggaatgcttccaaagcaagaatctttctcagtgaaatctcattatacaaagagaaccttatgcaacctgacaaaccactgaggtcatggtgactcagtgatcagcagatggtacttcaacagcaatcccctgtcaaacctcagaacttgaggctgaaacattgcttccacccaccatcagtgaagatgtaactagcatgttacaagagtgaataatctggacttcagagattaagtcaccaatagtgatctcacaagcactcaccggaactcctataatgtctccactttgtccatgccatttagcaatctcatctcctaaatggactgtgcctatgattcttaaggagaaagtgaatcattggtagatatcctgcacaagcagctggactttccagtaatagctttcttggggctattaggaaaattaaacaagaaatgaggctttctgggtctgcctgtatgtcttctgcataagacaaagaagagacatcgaatcaaccaataagaagagcccaaataagcatcctcaaatcttttgggatttggcacttggggacatgagtagttgtctgggatacgtcatattctcaacagtttctttgtagtagtaggatcaccttcttataataggatcaccttcttgttgctatagctgtacccgaccttcccttctcccttgagtgcttgcatgagctccacttttccttttgcttgaacagcttctcctgagtcctccttaccgatggttgtgactttaattatatacatctctgtccctccagacagatccctctgtcctcactctctgatttcattgaggatcttgggtgagagagagggacctgcaggatgaacaaatgtctactctaagacagctagattgggaggttggctggtcactgatggttataatgactgtgggacaggattaacttcagaataaatgaacaggagacacagatatgaagaaagtttctgattgatatggtctgaagtactcctggtattgcaagtcatttgctctaattctcaattgtaggcaaactgatttgtaaatttgcttcttcagccttctttcctgtagcctagcatggagaatctgaccagaccccattttgagaaggtcagcctacactggaatgaactttttacattagggcatttgtatttccctcacaatacttgccacattacttggcataggagagatgcttagtgtaattataagttaacaagcctttggatcagggcttgactcatgatagacaaagtatatgcctgctggatggaagaatctcttgggcgagcaccatttttctttccatcacctttccttgaaaatatatcttcagctttgggtaggaggaatcttggtgtatgaaatcattgcaaatttacttcatcttttctggagtttgaagttgtgactctcctgctaccaattaaataaagcttactttgccataa

SEQ ID NO: 22282 - DNA, 8560 bp, Homo sapiens
  source 1..8560: mol_type = unassigned DNA
atgaaggagatttgcaggatctgtgcccgagagctgtgtggaaaccagcggcgctggatcttccacacggcgtccaagctcaatctccaggttctgctttcgcacgtcttgggcaaggatgtcccccgcgatggcaaagccgagttcgcttgcagcaagtgtgctttcatgcttgatcgaatctatcgattcgacacagttattgcccggattgaagcgctttctattgagcgcttgcaaaagctgctactggagaaggatcgcctcaagttctgcattgccagtatgtatcggaagaataacgatgactctggcgcggagatcaaggcggggaatgggacggttgacatgtccgtcttacccgatgcgagatactctgcactgctccaggaggacttcgcctattcagggtttgagtgctgggtggagaatgaggatcagatccaggagccacacagctgccatggttcagaaggccctggaaaccgacccaggagatgccgtggttgtgccgctttgcgggttgctgattctgactatgaagccatttgtaaggtacctcgaaaggtggccagaagtatctcctgcggcccttctagcaggtggtcgaccagcatttgcactgaagaaccagcgttgtctgaggttgggccacccgacttagcaagcacaaaggtacccccagatggagaaagcatggaggaagagacgcctggttcctctgtggaatctttggatgcaagcgtccaggctagccctccacaacagaaagatgaggagactgagagaagtgcaaaggaacttggaaagtgtgactgttgttcagatgatcaggctccgcagcatgggtgtaatcacaagctggaattagctcttagcatgattaaaggtcttgattataagcccatccagagcccccgagggagcaggcttccgattccagtgaaatccagcctacctggagccaagcctggccctagcatgacagatggagttagttccggtttccttaacaggtctttgaaacccctttacaagacacctgtgagttatcccttggagctttcagacctgcaggagctgtgggatgatctctgtgaagattatttgccgctccgggtccagcccatgactgaagagttgctgaaacaacaaaagctgaattcacatgagaccactataactcagcagtctgtatctgattcccacttggcagaactccaggaaaaaatccagcaaacagaggccaccaacaagattcttcaagagaaacttaatgaaatgagctatgaactaaagtgtgctcaggagtcgtctcaaaagcaagatggtacaattcagaacctcaaggaaactctgaaaagcagggaacgtgagactgaggagttgtaccaggtaattgaaggtcaaaatgacacaatggcaaagcttcgagaaatgctgcaccaaagccagcttggacaacttcacagctcagagggtacttctccagctcagcaacaggtagctctgcttgatcttcagagtgctttattctgcagccaacttgaaatacagaagctccagagggtggtacgacagaaagagcgccaactggctgatgccaaacaatgtgtgcaatttgtagaggctgcagcacacgagagtgaacagcagaaagaggcttcttggaaacataaccaggaattgcgaaaagccttgcagcagctacaagaagaattgcagaataagagccaacagcttcgtgcctgggaggctgaaaaatacaatgagattcgaacccaggaacaaaacatccagcacctaaaccatagtctgagtcacaaggagcagttgcttcaggaatttcgggagctcctacagtatcgagataactcagacaaaacccttgaagcaaatgaaatgttgcttgagaaacttcgccagcgaatacatgataaagctgttgctctggagcgggctatagatgaaaaattctctgctctagaagagaaagaaaaagaactgcgccagcttcgtcttgctgtgagagagcgagatcatgacttagagagactgcgcgatgtcctctcctccaatgaagctactatgcaaagtatggagagtctcctgagggccaaaggcctggaagtggaacagttatctactacctgtcaaaacctccagtggctgaaagaagaaatggaaaccaaatttagccgttggcagaaggaacaagagagtatcattcagcagttacagacgtctcttcatgataggaacaaagaagtggaggatcttagtgcaacactgctctgcaaacttggaccagggcagagtgagatagcagaggagctgtgccagcgtctacagcgaaaggaaaggatgctgcaggaccttctaagtgatcgaaataaacaagtgctggaacatgaaatggagattcaaggcctgcttcagtctgtgagcaccagggagcaggaaagccaagctgctgcagagaagttggtgcaagccttaatggaaagaaattcagaattacaggccctgcgccaatatttaggagggagagactccctgatgtcccaagcacccatctctaaccaacaagctgaagttacccccactggctgtcttggaaaacagactgatcaaggttcaatgcagataccttccagagatgatagcacttcattgactgccaaagaggatgtcagcatacccagatccacattaggagacttggacacagttgcagggctggaaaaagaactgagtaatgccaaagaggaacttgaactcatggctaaaaaagaaagagaaagtcagatggaactttctgctctacagtccatgatggctgtgcaggaagaagagctgcaggtgcaggctgctgatatggagtctctgaccaggaacatacagattaaagaagatctcataaaggacctgcaaatgcaactggttgatcctgaagacataccagctatggaacgcctgacccaggaagtcttacttcttcgggaaaaagttgcttcagtagaatcccagggtcaagaaatttcaggaaaccgaagacaacagttgctgctgatgctagaaggactagtagatgaacggagtcggctcaatgaggccttacaagcagagagacagctctatagcagtctggtgaagttccatgcccatccagagagctctgagagagaccgaactctgcaggtggaactggaaggggctcaggtgttacgcagtcggctagaagaagttcttggaagaagcttggagcgcttaaacaggctggagaccctggccgccattggaggtgcagctgcaggggatgacaccgaagatacaagcactgagttcactgacagtattgaggaggaggctgcacaccatagtcaccagcaacttgtcaaggtggctttggagaaaagtctggcaactgtggagacccagaacccatctttttcccctccttctccgatgggaggggacagtaacaggtgtcttcaggaagaaatgctccacctgagggctgagttccaccagcacttagaagagaagaggaaagctgaggaggaactgaaggagctaaaggctcaaattgaggaagcaggattctcctcagtgtcccacatcaggaacaccatgctgagcctttgccttgagaatgcggagctgaaagagcagatgggagaagcaatgtctgatggatgggagatcgaggaagacaaggagaagggcgaggtgatggttgagactgtggtaaccaaagagggtctgagtgagagtagccttcaggctgagttcagaaagctccagggaaaactgaagaatgcccacaatatcatcaacctcctcaaagaacaacttgtgctgagtagcaaggaagggaatagtaaacttactccagagctccttgtgcatctgaccagcaccattgaaagaataaacacagaactggttggttcccctgggaagcaccaacaccaagaggaggggaatgtgactgtgaggcctttccccagaccccagagccttgaccttggggctaccttcacagtggatgcccaccaattggataaccagtcccagcctcgtgaccctgggcctcagtcagcgtttagcctaccagggtccacccagcacctgcgctcccagctgtcacaatgcaaacaacgctatcaagatctccaggagaagctgctgctatcagaagccactgtctttgctcaggctaacgagctggagaaatacagagttatgcttacaggtgaatccttggtgaagcaggacagcaagcagatccaggtggacctccaggacctgggctatgagacttgtggccgaagcgagaatgaggctgaacgggaggaaaccaccagtcctgagtgtgaggagcacaacagcctcaaggaaatggtcctgatggaggggctgtgctctgagcagggacgccggggctcaacactggctagttcctctgagaggaagcccttggagaaccagctagggaagcaggaagagttccgggtatatggaaagtcagaaaacatcttggtcctacgaaaggacatcaaagatctgaaggcccagctgcagaatgccaacaaggtcattcaaaacctcaagagccgggtccggtccctctcagttacaagtgattattcgtctagtctggaaagaccctggaagctgagagctgttggcaccttggaggggtcttcacctcatagtgtccctgatgaggatgaggggtggctgtctgatggcactggggctttctactctccagggcttcaggccaaaaaggacctggagagtctcatccagagagtatcccagctggaggcccagctcccaaaaaatggactagaagagaagctggctgaggagctgagatcagcctcgtggcctgggaaatatgattccctgattcaggatcaggcccgggaactgtcttacctacggcaaaaaatacgagaagggagaggtatttgttatcttatcacccggcatgcaaaagatacagtaaaatcttttgaggatctcctaaggagcaatgacattgactactacctgggacagagcttccgggagcaactcgcccagggaagccagctgacagagaggctcaccagcaaactcagcaccaaggatcataaaagtgagaaagatcaagctggacttgagccactggccctcaggctcagcagggagctgcaggagaaggagaaagtgattgaagtcctgcaggccaagctggatgctcggtccctcacaccctccagcagccatgccttgtctgactcccaccgctctcccagcagcacctctttcctgtctgatgaactggaagcctgctctgacatggacatagtcagcgagtacacacactatgaagagaagaaagcttctcccagtcactcagattccatccatcattcgagtcattctgctgtgttgtcttctaaaccatcatcaaccagtgcatctcagggggctaaggccgaatccaacagcaaccccatcagcttgccaactccccagaatacccccaaggaggccaaccaggcccattcaggctttcattttcactccatacccaagctggctagccttcctcaggcaccattgccctcagctccatccagcttcctgcctttcagccccactggccctctcctccttggctgctgtgagacaccagtggtctccttggctgaggctcagcaggagctacagatgctgcagaagcagttgggagaaagtgccagcactgttcctcctgcttccacagctacattgctgagcaacgacttggaagccgactcttcctactacctcaactctgcccagcctcactctcctccaaggggcaccatagaactgggaagaatcctagagcctgggtacctgggcagcagtggcaagtgggatgtgatgaggcctcagaaagggagtgtatctggggacctatcctcaggctcctctgtgtaccagcttaactccaaacccacaggggctgacctgctggaagagcatcttggtgaaatccggaacctgcgccagcgcctggaggaatccatctgcatcaatgaccgcctacgggagcaactggaacaccggctgacctctactgctcgtggaaggggatccacttctaacttctacagtcagggcctggagtccatacctcagctctgcaatgagaacagagtcctcagggaagacaatcgaagacttcaggctcaactgagtcatgtttccagagagcactcccaggaaacagaaagcctgagggaggctctgctgtcctctcgatcccaccttcaagagctggaaaaggagctggagcaccagaaggtggaaaggcagcagcttttggaagacttgagggagaagcagcaagaggtcttgcatttcagggaggaacgtctttccctccaggaaaacgactccagactgcagcacaagctggttctcctgcagcaacagtgtgaagagaaacagcagctctttgagtccctccagtcagagctacaaatctacgaggcactttatggcaattccaagaaggggctgaaagcttacagcctggatgcctgtcaccaaatccctttgagcagtgacctgagccacctggtggcagaggtacgagctctgagagggcagctggagcagagcattcaggggaacaattgtctgcgactgcagctgcaacagcagctggagagcggtgctggcaaagccagcctcagcccctcctccattaaccagaacttcccagccagcactgaccctggaaacaagcagctgctcctccaagattcagctgtgtcccctccagtccgggatgttggtatgaattccccagctctggtcttccccagctctgcttcctctactcctggctcagaaacgcccataatcaacagagcaaatggcttgggtttggatacttctccagtaatgaagacccctcccaagctagagggtgatgctactgatggctcctttgccaataagcatggccgccatgtcattggccacattgatgactacagtgccctaagacagcagattgcggagggcaagctgctggtcaaaaagatagtgtctcttgtgagatcagcgtgcagcttccctggccttgaagcccaaggcacagaggtgctaggcagcaaaggtattcatgagcttcggagcagcaccagtgccctgcaccatgccctagaggagtcagcttccctcctcaccatgttctggagagcggccctgccaagcacccacatccctgtgctgcctggcaaagtgggagaatcaacagaaagggaacttctggaactgagaaccaaagtatccaaacaggagcgactccttcagagcacaactgagcatctgaagaacgccaaccagcagaaggagagcatggaacagttcattgtcagccagctaaccagaacacatgatgttttaaagaaggcaaggactaacttagaggtgaaatccctaagggctctgccatgtactccagccttgtgacccttgccttccaggaaccatgcaagaagcgcagccaccagaagtccttaaaacagcaggaaaggtgggcctgtcccccttttgtgcagctacctatctgctgaggagcatctgggcctcattcctccaagtccacgggagggtccagaagagggagtcagagatgtatcctggtggagctgggagaaaggcagaaagcctttctgacggctatggaatacgattagccaaggtccacttggcccagcactaagaaaaagatgcgtagtttgcacagaaggttttgtgatcctgcctctcaacagccccagcagcttgggaactagcaagagcacatttcttgcctcatcagctgtcctgagatggaaaactcagtgaatataggaccctgattccgatgaaaggggcacgtggtcccaatgctggagctcctctggcaggttctaaaagcacactactgagcagcggtgccctgccggacactgctggcgggggctcagtgagcactactcacagatccacacctgaccctgttgggtcgagtcaggctgggccttggtctgcactgtagcacctgtgttctttgagttcacatcatgaatgtggtgacttcccagataccatctcaggcttaacctagcacatcctatttcttttcttctatgatatccaaattggactgacctcacttcaaagttgctgtcccattttgtcaccctatcttatctcggggaaattgcagactgatggccagaccaactctgttgaaattcttgcatagagcaaacctgtgctcatttttaagtggcatgggagaggccccaagcctagtaaagcctagtctgtgtcttcacagtgctggtagaatgtgtttgtgtgtataaatatatgatatagatttatatatgttgctaacgccatatattgaaggccaacataactggtggacagggtgggtgacagaaaatgaaagtctttttggtgattgttaaagcaagatgtgtataaagaaataaatagtttttctttc

SEQ ID NO: 22283 - DNA, 8262 bp, Homo sapiens
  source 1..8262: mol_type = unassigned DNA
agagcagtgagcccagtcccgagtcccggagagagctccagcaataggggccatgtcgccgtagccccagcctctcggtccgcagcctcagcagcgtcccagccggctggcttcatgctgcggtgcagctgcaccatgttcctgggttgagggggcaatcgggcacgctcctccccatgggttgcccatcatgtctaatggatatcgcactctgtcccagcacctcaatgacctgaagaaggagaacttcagcctcaagctgcgcatctacttcctggaggagcgcatgcaacagaagtatgaggccagccgggaggacatctacaagcggaacattgagctgaaggttgaagtggagagcttgaaacgagaactccaggacaagaaacagcatctggataaaacatgggctgatgtggagaatctcaacagtcagaatgaagctgagctccgacgccagtttgaggagcgacagcaggagacggagcatgtttatgagctcttggagaataagatccagcttctgcaggaggaatccaggctagcaaagaatgaagctgcgcggatggcagctctggtggaagcagagaaggagtgtaacctggagctctcagagaaactgaagggagtcaccaaaaactgggaagatgtaccaggagaccaggtcaagcccgaccaatacactgaggccctggcccagagggacaagagaattgaagaactgaatcagagcctggctgcccaggagaggcttgtagaacagctatctcgggagaaacaacaactgctacatctgttggaggagccaactagcatggaagtgcagcccatgactgaagagttgctgaaacaacaaaagctgaattcacatgagaccactataactcagcagtctgtatctgattcccacttggcagaactccaggaaaaaatccagcaaacagaggccaccaacaagattcttcaagagaaacttaatgaaatgagctatgaactaaagtgtgctcaggagtcgtctcaaaagcaagatggtacaattcagaacctcaaggaaactctgaaaagcagggaacgtgagactgaggagttgtaccaggtaattgaaggtcaaaatgacacaatggcaaagcttcgagaaatgctgcaccaaagccagcttggacaacttcacagctcagagggtacttctccagctcagcaacaggtagctctgcttgatcttcagagtgctttattctgcagccaacttgaaatacagaagctccagagggtggtacgacagaaagagcgccaactggctgatgccaaacaatgtgtgcaatttgtagaggctgcagcacacgagagtgaacagcagaaagaggcttcttggaaacataaccaggaattgcgaaaagccttgcagcagctacaagaagaattgcagaataagagccaacagcttcgtgcctgggaggctgaaaaatacaatgagattcgaacccaggaacaaaacatccagcacctaaaccatagtctgagtcacaaggagcagttgcttcaggaatttcgggagctcctacagtatcgagataactcagacaaaacccttgaagcaaatgaaatgttgcttgagaaacttcgccagcgaatacatgataaagctgttgctctggagcgggctatagatgaaaaattctctgctctagaagagaaagaaaaagaactgcgccagcttcgtcttgctgtgagagagcgagatcatgacttagagagactgcgcgatgtcctctcctccaatgaagctactatgcaaagtatggagagtctcctgagggccaaaggcctggaagtggaacagttatctactacctgtcaaaacctccagtggctgaaagaagaaatggaaaccaaatttagccgttggcagaaggaacaagagagtatcattcagcagttacagacgtctcttcatgataggaacaaagaagtggaggatcttagtgcaacactgctctgcaaacttggaccagggcagagtgagatagcagaggagctgtgccagcgtctacagcgaaaggaaaggatgctgcaggaccttctaagtgatcgaaataaacaagtgctggaacatgaaatggagattcaaggcctgcttcagtctgtgagcaccagggagcaggaaagccaagctgctgcagagaagttggtgcaagccttaatggaaagaaattcagaattacaggccctgcgccaatatttaggagggagagactccctgatgtcccaagcacccatctctaaccaacaagctgaagttacccccactggctgtcttggaaaacagactgatcaaggttcaatgcagataccttccagagatgatagcacttcattgactgccaaagaggatgtcagcatacccagatccacattaggagacttggacacagttgcagggctggaaaaagaactgagtaatgccaaagaggaacttgaactcatggctaaaaaagaaagagaaagtcagatggaactttctgctctacagtccatgatggctgtgcaggaagaagagctgcaggtgcaggctgctgatatggagtctctgaccaggaacatacagattaaagaagatctcataaaggacctgcaaatgcaactggttgatcctgaagacataccagctatggaacgcctgacccaggaagtcttacttcttcgggaaaaagttgcttcagtagaatcccagggtcaagaaatttcaggaaaccgaagacaacagttgctgctgatgctagaaggactagtagatgaacggagtcggctcaatgaggccttacaagcagagagacagctctatagcagtctggtgaagttccatgcccatccagagagctctgagagagaccgaactctgcaggtggaactggaaggggctcaggtgttacgcagtcggctagaagaagttcttggaagaagcttggagcgcttaaacaggctggagaccctggccgccattggaggtgcagctgcaggggatgacaccgaagatacaagcactgagttcactgacagtattgaggaggaggctgcacaccatagtcaccagcaacttgtcaaggtggctttggagaaaagtctggcaactgtggagacccagaacccatctttttcccctccttctccgatgggaggggacagtaacaggtgtcttcaggaagaaatgctccacctgagggctgagttccaccagcacttagaagagaagaggaaagctgaggaggaactgaaggagctaaaggctcaaattgaggaagcaggattctcctcagtgtcccacatcaggaacaccatgctgagcctttgccttgagaatgcggagctgaaagagcagatgggagaagcaatgtctgatggatgggagatcgaggaagacaaggagaagggcgaggtgatggttgagactgtggtaaccaaagagggtctgagtgagagtagccttcaggctgagttcagaaagctccagggaaaactgaagaatgcccacaatatcatcaacctcctcaaagaacaacttgtgctgagtagcaaggaagggaatagtaaacttactccagagctccttgtgcatctgaccagcaccattgaaagaataaacacagaactggttggttcccctgggaagcaccaacaccaagaggaggggaatgtgactgtgaggcctttccccagaccccagagccttgaccttggggctaccttcacagtggatgcccaccaattggataaccagtcccagcctcgtgaccctgggcctcagtcagcgtttagcctaccagggtccacccagcacctgcgctcccagctgtcacaatgcaaacaacgctatcaagatctccaggagaagctgctgctatcagaagccactgtctttgctcaggctaacgagctggagaaatacagagttatgcttacaggtgaatccttggtgaagcaggacagcaagcagatccaggtggacctccaggacctgggctatgagacttgtggccgaagcgagaatgaggctgaacgggaggaaaccaccagtcctgagtgtgaggagcacaacagcctcaaggaaatggtcctgatggaggggctgtgctctgagcagggacgccggggctcaacactggctagttcctctgagaggaagcccttggagaaccagctagggaagcaggaagagttccgggtatatggaaagtcagaaaacatcttggtcctacgaaaggacatcaaagatctgaaggcccagctgcagaatgccaacaaggtcattcaaaacctcaagagccgggtccggtccctctcagttacaagtgattattcgtctagtctggaaagaccctggaagctgagagctgttggcaccttggaggggtcttcacctcatagtgtccctgatgaggatgaggggtggctgtctgatggcactggggctttctactctccagggcttcaggccaaaaaggacctggagagtctcatccagagagtatcccagctggaggcccagctcccaaaaaatggactagaagagaagctggctgaggagctgagatcagcctcgtggcctgggaaatatgattccctgattcaggatcaggcccgggaactgtcttacctacggcaaaaaatacgagaagggagaggtatttgttatcttatcacccggcatgcaaaagatacagtaaaatcttttgaggatctcctaaggagcaatgacattgactactacctgggacagagcttccgggagcaactcgcccagggaagccagctgacagagaggctcaccagcaaactcagcaccaaggatcataaaagtgagaaagatcaagctggacttgagccactggccctcaggctcagcagggagctgcaggagaaggagaaagtgattgaagtcctgcaggccaagctggatgctcggtccctcacaccctccagcagccatgccttgtctgactcccaccgctctcccagcagcacctctttcctgtctgatgaactggaagcctgctctgacatggacatagtcagcgagtacacacactatgaagagaagaaagcttctcccagtcactcagattccatccatcattcgagtcattctgctgtgttgtcttctaaaccatcatcaaccagtgcatctcagggggctaaggccgaatccaacagcaaccccatcagcttgccaactccccagaatacccccaaggaggccaaccaggcccattcaggctttcattttcactccatacccaagctggctagccttcctcaggcaccattgccctcagctccatccagcttcctgcctttcagccccactggccctctcctccttggctgctgtgagacaccagtggtctccttggctgaggctcagcaggagctacagatgctgcagaagcagttgggagaaagtgccagcactgttcctcctgcttccacagctacattgctgagcaacgacttggaagccgactcttcctactacctcaactctgcccagcctcactctcctccaaggggcaccatagaactgggaagaatcctagagcctgggtacctgggcagcagtggcaagtgggatgtgatgaggcctcagaaagggagtgtatctggggacctatcctcaggctcctctgtgtaccagcttaactccaaacccacaggggctgacctgctggaagagcatcttggtgaaatccggaacctgcgccagcgcctggaggaatccatctgcatcaatgaccgcctacgggagcaactggaacaccggctgacctctactgctcgtggaaggggatccacttctaacttctacagtcagggcctggagtccatacctcagctctgcaatgagaacagagtcctcagggaagacaatcgaagacttcaggctcaactgagtcatgtttccagagagcactcccaggaaacagaaagcctgagggaggctctgctgtcctctcgatcccaccttcaagagctggaaaaggagctggagcaccagaaggtggaaaggcagcagcttttggaagacttgagggagaagcagcaagaggtcttgcatttcagggaggaacgtctttccctccaggaaaacgactccagactgcagcacaagctggttctcctgcagcaacagtgtgaagagaaacagcagctctttgagtccctccagtcagagctacaaatctacgaggcactttatggcaattccaagaaggggctgaaagcttacagcctggatgcctgtcaccaaatccctttgagcagtgacctgagccacctggtggcagaggtacgagctctgagagggcagctggagcagagcattcaggggaacaattgtctgcgactgcagctgcaacagcagctggagagcggtgctggcaaagccagcctcagcccctcctccattaaccagaacttcccagccagcactgaccctggaaacaagcagctgctcctccaagattcagctgtgtcccctccagtccgggatgttggtatgaattccccagctctggtcttccccagctctgcttcctctactcctggctcagaaacgcccataatcaacagagcaaatggcttgggtttggatacttctccagtaatgaagacccctcccaagctagagggtgatgctactgatggctcctttgccaataagcatggccgccatgtcattggccacattgatgactacagtgccctaagacagcagattgcggagggcaagctgctggtcaaaaagatagtgtctcttgtgagatcagcgtgcagcttccctggccttgaagcccaaggcacagaggtgctaggcagcaaaggtattcatgagcttcggagcagcaccagtgccctgcaccatgccctagaggagtcagcttccctcctcaccatgttctggagagcggccctgccaagcacccacatccctgtgctgcctggcaaagtgggagaatcaacagaaagggaacttctggaactgagaaccaaagtatccaaacaggagcgactccttcagagcacaactgagcatctgaagaacgccaaccagcagaaggagagcatggaacagttcattgtcagccagctaaccagaacacatgatgttttaaagaaggcaaggactaacttagaggtgaaatccctaagggctctgccatgtactccagccttgtgacccttgccttccaggaaccatgcaagaagcgcagccaccagaagtccttaaaacagcaggaaaggtgggcctgtcccccttttgtgcagctacctatctgctgaggagcatctgggcctcattcctccaagtccacgggagggtccagaagagggagtcagagatgtatcctggtggagctgggagaaaggcagaaagcctttctgacggctatggaatacgattagccaaggtccacttggcccagcactaagaaaaagatgcgtagtttgcacagaaggttttgtgatcctgcctctcaacagccccagcagcttgggaactagcaagagcacatttcttgcctcatcagctgtcctgagatggaaaactcagtgaatataggaccctgattccgatgaaaggggcacgtggtcccaatgctggagctcctctggcaggttctaaaagcacactactgagcagcggtgccctgccggacactgctggcgggggctcagtgagcactactcacagatccacacctgaccctgttgggtcgagtcaggctgggccttggtctgcactgtagcacctgtgttctttgagttcacatcatgaatgtggtgacttcccagataccatctcaggcttaacctagcacatcctatttcttttcttctatgatatccaaattggactgacctcacttcaaagttgctgtcccattttgtcaccctatcttatctcggggaaattgcagactgatggccagaccaactctgttgaaattcttgcatagagcaaacctgtgctcatttttaagtggcatgggagaggccccaagcctagtaaagcctagtctgtgtcttcacagtgctggtagaatgtgtttgtgtgtataaatatatgatatagatttatatatgttgctaacgccatatattgaaggccaacataactggtggacagggtgggtgacagaaaatgaaagtctttttggtgattgttaaagcaagatgtgtataaagaaataaatagtttttctttca

SEQ ID NO: 22284 - DNA, 8307 bp, Homo sapiens
  source 1..8307: mol_type = unassigned DNA
acaccacttgtgtctgagttcacgcagcatgttcctctgtcagggattccgcaaatatctccctgaggtaaaaaaggaaagtgtgctgcgctccagcacccagagcagtgagcccagtcccgagtcccggagagagctccagcaataggggccatgtcgccgtagccccagcctctcggtccgcagcctcagcagcgtcccagccggctggcttcatgctgcggtgcagctgcaccatgttcctgggttgagggggcaatcgggcacgctcctccccatgggttgcccatcatgtctaatggatatcgcactctgtcccagcacctcaatgacctgaagaaggagaacttcagcctcaagctgcgcatctacttcctggaggagcgcatgcaacagaagtatgaggccagccgggaggacatctacaagcggaacattgagctgaaggttgaagtggagagcttgaaacgagaactccaggacaagaaacagcatctggataaaacatgggctgatgtggagaatctcaacagtcagaatgaagctgagctccgacgccagtttgaggagcgacagcaggagacggagcatgtttatgagctcttggagaataagatccagcttctgcaggaggaatccaggctagcaaagaatgaagctgcgcggatggcagctctggtggaagcagagaaggagtgtaacctggagctctcagagaaactgaagggagtcaccaaaaactgggaagatgtaccaggagaccaggtcaagcccgaccaatacactgaggccctggcccagagggacaagagaattgaagaactgaatcagagcctggctgcccaggagaggcttgtagaacagctatctcgggagaaacaacaactgctacatctgttggaggagccaactagcatggaagtgcagcccatgactgaagagttgctgaaacaacaaaagctgaattcacatgagaccactataactcagcagtctgtatctgattcccacttggcagaactccaggaaaaaatccagcaaacagaggccaccaacaagattcttcaagagaaacttaatgaaatgagctatgaactaaagtgtgctcaggagtcgtctcaaaagcaagatggtacaattcagaacctcaaggaaactctgaaaagcagggaacgtgagactgaggagttgtaccaggtaattgaaggtcaaaatgacacaatggcaaagcttcgagaaatgctgcaccaaagccagcttggacaacttcacagctcagagggtacttctccagctcagcaacaggtagctctgcttgatcttcagagtgctttattctgcagccaacttgaaatacagaagctccagagggtggtacgacagaaagagcgccaactggctgatgccaaacaatgtgtgcaatttgtagaggctgcagcacacgagagtgaacagcagaaagaggcttcttggaaacataaccaggaattgcgaaaagccttgcagcagctacaagaagaattgcagaataagagccaacagcttcgtgcctgggaggctgaaaaatacaatgagattcgaacccaggaacaaaacatccagcacctaaaccatagtctgagtcacaaggagcagttgcttcaggaatttcgggagctcctacagtatcgagataactcagacaaaacccttgaagcaaatgaaatgttgcttgagaaacttcgccagcgaatacatgataaagctgttgctctggagcgggctatagatgaaaaattctctgctctagaagagaaagaaaaagaactgcgccagcttcgtcttgctgtgagagagcgagatcatgacttagagagactgcgcgatgtcctctcctccaatgaagctactatgcaaagtatggagagtctcctgagggccaaaggcctggaagtggaacagttatctactacctgtcaaaacctccagtggctgaaagaagaaatggaaaccaaatttagccgttggcagaaggaacaagagagtatcattcagcagttacagacgtctcttcatgataggaacaaagaagtggaggatcttagtgcaacactgctctgcaaacttggaccagggcagagtgagatagcagaggagctgtgccagcgtctacagcgaaaggaaaggatgctgcaggaccttctaagtgatcgaaataaacaagtgctggaacatgaaatggagattcaaggcctgcttcagtctgtgagcaccagggagcaggaaagccaagctgctgcagagaagttggtgcaagccttaatggaaagaaattcagaattacaggccctgcgccaatatttaggagggagagactccctgatgtcccaagcacccatctctaaccaacaagctgaagttacccccactggctgtcttggaaaacagactgatcaaggttcaatgcagataccttccagagatgatagcacttcattgactgccaaagaggatgtcagcatacccagatccacattaggagacttggacacagttgcagggctggaaaaagaactgagtaatgccaaagaggaacttgaactcatggctaaaaaagaaagagaaagtcagatggaactttctgctctacagtccatgatggctgtgcaggaagaagagctgcaggtgcaggctgctgatatggagtctctgaccaggaacatacagattaaagaagatctcataaaggacctgcaaatgcaactggttgatcctgaagacataccagctatggaacgcctgacccaggaagtcttacttcttcgggaaaaagttgcttcagtagaatcccagggtcaagaaatttcaggaaaccgaagacaacagttgctgctgatgctagaaggactagtagatgaacggagtcggctcaatgaggccttacaagcagagagacagctctatagcagtctggtgaagttccatgcccatccagagagctctgagagagaccgaactctgcaggtggaactggaaggggctcaggtgttacgcagtcggctagaagaagttcttggaagaagcttggagcgcttaaacaggctggagaccctggccgccattggaggtgcagctgcaggggatgacaccgaagatacaagcactgagttcactgacagtattgaggaggaggctgcacaccatagtcaccagcaacttgtcaaggtggctttggagaaaagtctggcaactgtggagacccagaacccatctttttcccctccttctccgatgggaggggacagtaacaggtgtcttcaggaagaaatgctccacctgagggctgagttccaccagcacttagaagagaagaggaaagctgaggaggaactgaaggagctaaaggctcaaattgaggaagcaggattctcctcagtgtcccacatcaggaacaccatgctgagcctttgccttgagaatgcggagctgaaagagcagatgggagaagcaatgtctgatggatgggagatcgaggaagacaaggagaagggcgaggtgatggttgagactgtggtaaccaaagagggtctgagtgagagtagccttcaggctgagttcagaaagctccagggaaaactgaagaatgcccacaatatcatcaacctcctcaaagaacaacttgtgctgagtagcaaggaagggaatagtaaacttactccagagctccttgtgcatctgaccagcaccattgaaagaataaacacagaactggttggttcccctgggaagcaccaacaccaagaggaggggaatgtgactgtgaggcctttccccagaccccagagccttgaccttggggctaccttcacagtggatgcccaccaattggataaccagtcccagcctcgtgaccctgggcctcagtcagcgtttagcctaccagggtccacccagcacctgcgctcccagctgtcacaatgcaaacaacgctatcaagatctccaggagaagctgctgctatcagaagccactgtctttgctcaggctaacgagctggagaaatacagagttatgcttacaggtgaatccttggtgaagcaggacagcaagcagatccaggtggacctccaggacctgggctatgagacttgtggccgaagcgagaatgaggctgaacgggaggaaaccaccagtcctgagtgtgaggagcacaacagcctcaaggaaatggtcctgatggaggggctgtgctctgagcagggacgccggggctcaacactggctagttcctctgagaggaagcccttggagaaccagctagggaagcaggaagagttccgggtatatggaaagtcagaaaacatcttggtcctacgaaaggacatcaaagatctgaaggcccagctgcagaatgccaacaaggtcattcaaaacctcaagagccgggtccggtccctctcagttacaagtgattattcgtctagtctggaaagaccctggaagctgagagctgttggcaccttggaggggtcttcacctcatagtgtccctgatgaggatgaggggtggctgtctgatggcactggggctttctactctccagggcttcaggccaaaaaggacctggagagtctcatccagagagtatcccagctggaggcccagctcccaaaaaatggactagaagagaagctggctgaggagctgagatcagcctcgtggcctgggaaatatgattccctgattcaggatcaggcccgggaactgtcttacctacggcaaaaaatacgagaagggagaggtatttgttatcttatcacccggcatgcaaaagatacagtaaaatcttttgaggatctcctaaggagcaatgacattgactactacctgggacagagcttccgggagcaactcgcccagggaagccagctgacagagaggctcaccagcaaactcagcaccaaggatcataaaagtgagaaagatcaagctggacttgagccactggccctcaggctcagcagggagctgcaggagaaggagaaagtgattgaagtcctgcaggccaagctggatgctcggtccctcacaccctccagcagccatgccttgtctgactcccaccgctctcccagcagcacctctttcctgtctgatgaactggaagcctgctctgacatggacatagtcagcgagtacacacactatgaagagaagaaagcttctcccagtcactcagattccatccatcattcgagtcattctgctgtgttgtcttctaaaccatcatcaaccagtgcatctcagggggctaaggccgaatccaacagcaaccccatcagcttgccaactccccagaatacccccaaggaggccaaccaggcccattcaggctttcattttcactccatacccaagctggctagccttcctcaggcaccattgccctcagctccatccagcttcctgcctttcagccccactggccctctcctccttggctgctgtgagacaccagtggtctccttggctgaggctcagcaggagctacagatgctgcagaagcagttgggagaaagtgccagcactgttcctcctgcttccacagctacattgctgagcaacgacttggaagccgactcttcctactacctcaactctgcccagcctcactctcctccaaggggcaccatagaactgggaagaatcctagagcctgggtacctgggcagcagtggcaagtgggatgtgatgaggcctcagaaagggagtgtatctggggacctatcctcaggctcctctgtgtaccagcttaactccaaacccacaggggctgacctgctggaagagcatcttggtgaaatccggaacctgcgccagcgcctggaggaatccatctgcatcaatgaccgcctacgggagcaactggaacaccggctgacctctactgctcgtggaaggggatccacttctaacttctacagtcagggcctggagtccatacctcagctctgcaatgagaacagagtcctcagggaagacaatcgaagacttcaggctcaactgagtcatgtttccagagagcactcccaggaaacagaaagcctgagggaggctctgctgtcctctcgatcccaccttcaagagctggaaaaggagctggagcaccagaaggtggaaaggcagcagcttttggaagacttgagggagaagcagcaagaggtcttgcatttcagggaggaacgtctttccctccaggaaaacgactccagactgcagcacaagctggttctcctgcagcaacagtgtgaagagaaacagcagctctttgagtccctccagtcagagctacaaatctacgaggcactttatggcaattccaagaaggggctgaaagcttacagcctggatgcctgtcaccaaatccctttgagcagtgacctgagccacctggtggcagaggtacgagctctgagagggcagctggagcagagcattcaggggaacaattgtctgcgactgcagctgcaacagcagctggagagcggtgctggcaaagccagcctcagcccctcctccattaaccagaacttcccagccagcactgaccctggaaacaagcagctgctcctccaagattcagctgtgtcccctccagtccgggatgttggtatgaattccccagctctggtcttccccagctctgcttcctctactcctggctcagaaacgcccataatcaacagagcaaatggcttgggtttggatacttctccagtaatgaagacccctcccaagctagagggtgatgctactgatggctcctttgccaataagcatggccgccatgtcattggccacattgatgactacagtgccctaagacagcagattgcggagggcaagctgctggtcaaaaagatagtgtctcttgtgagatcagcgtgcagcttccctggccttgaagcccaaggcacagaggtgctaggcagcaaaggtattcatgagcttcggagcagcaccagtgccctgcaccatgccctagaggagtcagcttccctcctcaccatgttctggagagcggccctgccaagcacccacatccctgtgctgcctggcaaagtgggagaatcaacagaaagggaacttctggaactgagaaccaaagtatccaaacaggagcgactccttcagagcacaactgagcatctgaagaacgccaaccagcagaaggagagcatggaacagttcattgtcagccagctaaccagaacacatgatgttttaaagaaggcaaggactaacttagaggaaccatgcaagaagcgcagccaccagaagtccttaaaacagcaggaaaggtgggcctgtcccccttttgtgcagctacctatctgctgaggagcatctgggcctcattcctccaagtccacgggagggtccagaagagggagtcagagatgtatcctggtggagctgggagaaaggcagaaagcctttctgacggctatggaatacgattagccaaggtccacttggcccagcactaagaaaaagatgcgtagtttgcacagaaggttttgtgatcctgcctctcaacagccccagcagcttgggaactagcaagagcacatttcttgcctcatcagctgtcctgagatggaaaactcagtgaatataggaccctgattccgatgaaaggggcacgtggtcccaatgctggagctcctctggcaggttctaaaagcacactactgagcagcggtgccctgccggacactgctggcgggggctcagtgagcactactcacagatccacacctgaccctgttgggtcgagtcaggctgggccttggtctgcactgtagcacctgtgttctttgagttcacatcatgaatgtggtgacttcccagataccatctcaggcttaacctagcacatcctatttcttttcttctatgatatccaaattggactgacctcacttcaaagttgctgtcccattttgtcaccctatcttatctcggggaaattgcagactgatggccagaccaactctgttgaaattcttgcatagagcaaacctgtgctcatttttaagtggcatgggagaggccccaagcctagtaaagcctagtctgtgtcttcacagtgctggtagaatgtgtttgtgtgtataaatatatgatatagatttatatatgttgctaacgccatatattgaaggccaacataactggtggacagggtgggtgacagaaaatgaaagtctttttggtgattgttaaagcaagatgtgtataaagaaataaatagtttttctttca

SEQ ID NO: 22285 - DNA, 2599 bp, Homo sapiens
  source 1..2599: mol_type = unassigned DNA
agttccttatttggtagcttttgacaggactagcctttcttgcaactaagcatcttgacatacattattcattaagccctggagctcgggagagaaagatgcagacccttagatctttagatattcctttatcacgtggattttctttattcagaatagttgctgaattttgtgccattctggagtcttacaaatggcatgtattcgatgggaagacggctggatgggatttaatgcgaggctttcttatgtatacttaattaccaaaaatctttaaaaactcatactctgcgtggcttgtggaggttgttaaagtgtcgagattttgaagctaaatacattttagagcttactatatatatacatatatatatatatacatataatcaatcaaaaatgcctgaagcaaactatttactgtcagtgtcttggggctacataaagtttaaaaggatgcttaatcgggagctcacccatctctctgaaatgagtcggtctggaaatcaagtgtcagagtttatatcaaacacattcttagataagcaacatgaagtggaaattccttctccaactcagaaggaaaaggagaaaaagaaaagaccaatgtctcagatcagtggagtcaagaaattgatgcacagctctagtctgactaattcaagtatcccaaggtttggagttaaaactgaacaagaagatgtccttgccaaggaactagaagatgtgaacaaatggggtcttcatgttttcagaatagcagagttgtctggtaaccggcccttgactgttatcatgcacaccatttttcaggaacgggatttattaaaaacatttaaaattccagtagatactttaattacatatcttatgactctcgaagaccattaccatgctgatgtggcctatcacaacaatatccatgctgcagatgttgtccagtctactcatgtgctattatctacacctgctttggaggctgtgtttacagatttggagattcttgcagcaatttttgccagtgcaatacatgatgtagatcatcctggtgtgtccaatcaatttctgatcaatacaaactctgaacttgccttgatgtacaatgattcctcagtcttagagaaccatcatttggctgtgggctttaaattgcttcaggaagaaaactgtgacattttccagaatttgaccaaaaaacaaagacaatctttaaggaaaatggtcattgacatcgtacttgcaacagatatgtcaaaacacatgaatctactggctgatttgaagactatggttgaaactaagaaagtgacaagctctggagttcttcttcttgataattattccgataggattcaggttcttcagaatatggtgcactgtgcagatctgagcaacccaacaaagcctctccagctgtaccgccagtggacggaccggataatggaggagttcttccgccaaggagaccgagagagggaacgtggcatggagataagccccatgtgtgacaagcacaatgcttccgtggaaaaatcacaggtgggcttcatagactatattgttcatcccctctgggagacatgggcagacctcgtccaccctgacgcccaggatattttggacactttggaggacaatcgtgaatggtaccagagcacaatccctcagagcccctctcctgcacctgatgacccagaggagggccggcagggtcaaactgagaaattccagtttgaactaactttagaggaagatggtgagtcagacacggaaaaggacagtggcagtcaagtggaagaagacactagctgcagtgactccaagactctttgtactcaagactcagagtctactgaaattccccttgatgaacaggttgaagaggaggcagtaggggaagaagaggaaagccagcctgaagcctgtgtcatagatgatcgttctcctgacacgtaacagtgcaaaaactttcatgccttttttttttttaagtagaaaaattgtttccaaagtgcatgtcacatgccacaaccacggtcacacctcactgtcatctgccaggacgtttgttgaacaaaactgaccttgactactcagtccagcgctcaggaatatcgtaaccagttttttcacctccatgtcatccgagcaaggtggacatcttcacgaacagcgtttttaacaagatttcagcttggtagagctgacaaagcagataaaatctactccaaattattttcaagagagtgtgactcatcaggcagcccaaaagtttattggacttggggtttctattcctttttatttgtttgcaatattttcagaagaaaggcattgcacagagtgaacttaatggacgaagcaacaaatatgtcaagaacaggacatagcacgaatctgttaccagtaggaggaggatgagccacagaaattgcataattttctaatttcaagtcttcctgatacatgactgaatagtgtggttcagtgagctgcactgacctctacattttgtatgatatgtaaaacagattttttgtagagcttacttttattattaaatgtattgaggtattatatttaaaaaaaactatgttcagaa

SEQ ID NO: 22286 - DNA, 8232 bp, Homo sapiens
  source 1..8232: mol_type = unassigned DNA
gggccccctctcggtagccctgaggctctggcgccttcaagtgagaagctaagcaccagcctctgctgggctgcagaagcggcggcggcggcagcagcagcagcagcatcaggaaggcgctcgggccagcgcggtgaacccgggctgggcagcaggtcgcggagccgcgagccaggatggaggcagagggcagcagcgcgccggcccgggcgggcagcggagagggcagcgacagcgccggcggggccacgctcaaagcccccaagcatctctggaggcacgagcagcaccaccagtacccgctccggcagccccagttccgcctcctgcatccccatcaccacctgcccccgccgccgccaccctcgccccagccccagccccagtgtccgctacagccgccgccgccgccccccctgccgccgcccccgccgccgcccggggctgcccgcggccgctacgcctcgagcggggccaccggccgcgtccggcatcgcggctactcggacaccgagcgctacctgtactgtcgcgccatggaccgcacctcctacgcggtggagaccggccaccggcccggcctgaagaaatccaggatgtcctggccctcctcgttccagggactcaggcgttttgatgtggacaatggcacatctgcgggacggagtcccttggatcccatgaccagcccaggatccgggctaattctccaagcaaattttgtccacagtcaacgacgggagtccttcctgtatcgatccgacagcgattatgacctctctccaaagtctatgtcccggaactcctccattgccagtgatatacacggagatgacttgattgtgactccatttgctcaggtcttggccagtctgcgaactgtacgaaacaactttgctgcattaactaatttgcaagatcgagcacctagcaaaagatcacccatgtgcaaccaaccatccatcaacaaagccaccataacagaggaggcctaccagaaactggccagcgagaccctggaggagctggactggtgtctggaccagctagagaccctacagaccaggcactccgtcagtgagatggcctccaacaagtttaaaaggatgcttaatcgggagctcacccatctctctgaaatgagtcggtctggaaatcaagtgtcagagtttatatcaaacacattcttagataagcaacatgaagtggaaattccttctccaactcagaaggaaaaggagaaaaagaaaagaccaatgtctcagatcagtggagtcaagaaattgatgcacagctctagtctgactaattcaagtatcccaaggtttggagttaaaactgaacaagaagatgtccttgccaaggaactagaagatgtgaacaaatggggtcttcatgttttcagaatagcagagttgtctggtaaccggcccttgactgttatcatgcacaccatttttcaggaacgggatttattaaaaacatttaaaattccagtagatactttaattacatatcttatgactctcgaagaccattaccatgctgatgtggcctatcacaacaatatccatgctgcagatgttgtccagtctactcatgtgctattatctacacctgctttggaggctgtgtttacagatttggagattcttgcagcaatttttgccagtgcaatacatgatgtagatcatcctggtgtgtccaatcaatttctgatcaatacaaactctgaacttgccttgatgtacaatgattcctcagtcttagagaaccatcatttggctgtgggctttaaattgcttcaggaagaaaactgtgacattttccagaatttgaccaaaaaacaaagacaatctttaaggaaaatggtcattgacatcgtacttgcaacagatatgtcaaaacacatgaatctactggctgatttgaagactatggttgaaactaagaaagtgacaagctctggagttcttcttcttgataattattccgataggattcaggttcttcagaatatggtgcactgtgcagatctgagcaacccaacaaagcctctccagctgtaccgccagtggacggaccggataatggaggagttcttccgccaaggagaccgagagagggaacgtggcatggagataagccccatgtgtgacaagcacaatgcttccgtggaaaaatcacaggtgggcttcatagactatattgttcatcccctctgggagacatgggcagacctcgtccaccctgacgcccaggatattttggacactttggaggacaatcgtgaatggtaccagagcacaatccctcagagcccctctcctgcacctgatgacccagaggagggccggcagggtcaaactgagaaattccagtttgaactaactttagaggaagatggtgagtcagacacggaaaaggacagtggcagtcaagtggaagaagacactagctgcagtgactccaagactctttgtactcaagactcagagtctactgaaattccccttgatgaacaggttgaagaggaggcagtaggggaagaagaggaaagccagcctgaagcctgtgtcatagatgatcgttctcctgacacgtaacagtgcaaaaactttcatgccttttttttttttaagtagaaaaattgtttccaaagtgcatgtcacatgccacaaccacggtcacacctcactgtcatctgccaggacgtttgttgaacaaaactgaccttgactactcagtccagcgctcaggaatatcgtaaccagttttttcacctccatgtcatccgagcaaggtggacatcttcacgaacagcgtttttaacaagatttcagcttggtagagctgacaaagcagataaaatctactccaaattattttcaagagagtgtgactcatcaggcagcccaaaagtttattggacttggggtttctattcctttttatttgtttgcaatattttcagaagaaaggcattgcacagagtgaacttaatggacgaagcaacaaatatgtcaagaacaggacatagcacgaatctgttaccagtaggaggaggatgagccacagaaattgcataattttctaatttcaagtcttcctgatacatgactgaatagtgtggttcagtgagctgcactgacctctacattttgtatgatatgtaaaacagattttttgtagagcttacttttattattaaatgtattgaggtattatatttaaaaaaaactatgttcagaacttcatctgccactggttatttttttctaaggagtaacttgcaagttttcagtacaaatctgtgctacactggataaaaatctaatttatgaattttacttgcaccttatagttcatagcaattaactgatttgtagtgattcattgtttgttttatataccaatgacttccatattttaaaagagaaaaacaactttatgttgcaggaaaccctttttgtaagtctttattatttactttgcattttgtttcactctttccagataagcagagttgctcttcaccagtgtttttcttcatgtgcaaagtgactatttgttctataatacttttatgtgtgttatatcaaatgtgtcttaagcttcatgcaaactcagtcatcagttcgtgttgtctgaagcaagtgggagatatataaatacccagtagctaaaatggtcagtcttttttagatgttttcctacttagtatctcctaataacgttttgctgtgtcactagatgttcatttcacaagtgcatgtctttctaataatccacacatttcatgctctaataatccacacatttcatgctcatttttattgtttttacagccagttatagtaagaaaaaggtttttccccttgtgctgctttataatttagcgtgtgtctgaaccttatccatgtttgctagatgaggtcttgtcaaatatatcactaccattgtcaccggtgaaaagaaacaggtagttaagttagggttaacattcatttcaaccacgaggttgtatatcatgactagcttttactcttggtttacagagaaaagttaaacagccaactaggcagtttttaagaatattaacaatatattaacaaacaccaatacaactaatcctatttggttttaatgatttcaccatgggattaagaactatatcaggaacatccctgagaaacggttttaagtgtagcaactactcttccttaatggacagccacataacgtgtaggaagtcctttatcacttatcctcgatccataagcatatcttgcagaggggaactacttctttaaacacatggagggaaagaagatgatgccactggcaccagagggttagtactgtgatgcatcctaaaatatttattatattggtaaaaattctggttaaataaaaaattagagatcactcttggctgatttcagcaccaggaactgtattacagttttagagattaattcctagtgtttacctgattatagcagttggcatcatggggcatttaattctgactttatccccacgtcagccttaataaagtcttctttaccttctctatgaagactttaaagcccaaataatcatttttcacattgatattcaagaattgagatagatagaagccaaagtgggtatctgacaagtggaaaatcaaacgtttaagaagaattacaactctgaaaagcatttatatgtggaacttctcaaggagcctcctggggactggaaagtaagtcatcagccaggcaaatgactcatgctgaagagagtccccatttcagtcccctgagatctagctgatgcttagatcctttgaaataaaaattatgtctttataactctgatcttttacataaagcagaagaggaatcaactagttaattgcaaggtttctactctgtttcctctgtaaagatcagatggtaatctttcaaataagaaaaaaataaagacgtatgtttgaccaagtagtttcacaagaatatttgggaacttgtttcttttaattttatttgtccctgagtgaagtctagaaagaaaggtaaagagtctagagtttattcctctttccaaaacattctcattcctctcctccctacacttagtatttcccccacagagtgcctagaatcttaataatgaataaaataaaaagcagcaatatgtcattaacaaatccagacctgaaagggtaaagggtttataactgcactaataaagagaggctctttttttttcttccagtttgttggtttttaatggtaccgtgttgtaaagatacccactaatggacaatcaaattgcagaaaaggctcaatatccaagagacagggactaatgcactgtacaatctgcttatccttgcccttctctcttgccaaagtgtgcttcagaaatatatactgctttaaaaaagaataaaagaatatccttttacaagtggctttacatttcctaaaatgccataagaaaatgcaatatctgggtactgtatggggaaaaaaatgtccaagtttgtgtaaaaccagtgcatttcagcttgcaagttactgaacacaataatgctgttttaattttgttttatatcagttaaaattcacaataatgtagatagaacaaattacagacaaggaaagaaaaaacttgaatgaaatggattttacagaaagctttatgataatttttgaatgcattatttattttttgtgccatgcattttttttctcaccaaatgaccttacctgtaatacagtcttgtttgtctgtttacaaccatgtatttattgcaatgtacatactgtaatgttaattgtaaattatctgttcttattaaaacatcatcccatgatgggatggtgttgatatatttggaaactcttggtgagagaatgaatggtgtgtatacatactctgtacatttttcttttctcctgtaatatagtcttgtcaccttagagcttgtttatggaagattcaagaaaactataaaatacttaaagatatataaatttaaaaaaacatagctgcaggtctttggtcccagggctgtgccttaactttaaccaatattttcttctgttttgctgcatttgaaaggtaacagtggagctagggctgggcattttacatccaggcttttaattgattagaattctgccaataggtggattttacaaaaccacagacaacctctgaaagattctgagacccttttgagacagaagctcttaagtacttcttgccagggagcagcactgcatgtgtgatggttgtttgccatctgttgatcaggaactacttcagctacttgcatttgattatttcctttttttttttttttaactcggaaacacaactggggaaatatattctttcccagtgattataaacaatctttttcttttttttaagtccttttggcttctagagctcataggaaaatggacttgatttgaaattggagccagagtttactcgtgttggttatctattcatcagcttcctgacatgttaagagaatacattaaagagaaaatactgttttttaatcctaaaatttttcttccactaagataaaccaaatgtccttacatatatgtaaacccatctatttaaacgcaaaggtgggttgatgtcagtttacatagcagaaagcattcactatcctctaagatttgtttctgcaaaactttcattgctttagaattttaaaatttcaccttgtacaatggccagcccctaaagcaggaaacatttataatggattatatggaaacatcctcccagtacttgcccagcccttgaatcatgtggcttttcagtgaaaggaaagattctttttctaggaaaaatgagcctattttattttattttattttattttttgacacaaactgtagattttagcagccctggcccaaaggaatttgattacttttgttttaaacagtacaaaggggacactataattacaaaaacatccttaactgatttgagttgtttttatttctttggatatattttcagagtggtaaattgtgtgtgagaattacaaatgattattcttttagtggtttcttagcctctcttacagcccacggggatagtactgtacatcaataccttcatatgaaatttttatatgcaatgaaaataaaagcatgggttgattctgcctatttatgactcaatcttttacaaataaaagattattcattttaaattatagttcaatcagcatgtctcttaggatactgaacgtggttgaaatgaaaggatagtgacatcataagttagtactgatattcataaccaaataaagccaacttgagtaattttgctacattaaaaattaccaaaattacttagatggcctataagattaagcatggtgttttctaagcaagctttgaaaggggccttccatacttacttaattgaatattctgggatattgaaaattattcagatacttgacaattatttttggttacctactccgcaaactacaaagttttaaggactcaacaataagttaatgagacacagtgtttgctttcatggagcttacagtctggaggggacaaaggcttaaacaatactcatataattatatatgtgatcagtacaatgaaggagctcagtggggtaaataagcaggaacctgaacttgatctgttccggagggccacagaaggcttccttgaggccttgagaaagtgatttgcatctgagttctgaaggattgtaagaggtaactagggaaaaagttgacaggaagaggaaggggatccagacaagaaacatttgcaaagatcttgaggcataaatgagcttgagacatctggagaaactgaggaaaagtgagagagtaggcagggcctggagccgcagagccattgctaaccatcctgtgtgagatatcccccattctgtagctttattctcataaccctgctcaattttctttataacacttctcacagatttatatacgtgtttgtttttgttatctgtctctcccaccagaccacagctccatgagagcaaggtctttgcttaccaatatatcactagcacttaaaactatgcctggtacacagtaggttcttaatatgtgttgaatatagccatcaaattgatattggatataattcaatctgataagatattttgagatattaaagagtttttaacttgataccataaaaa

SEQ ID NO: 22287 - DNA, 7690 bp, Homo sapiens
  source 1..7690: mol_type = unassigned DNA
ggaaaatattaatgacagcaaaacttgaattcacatgtttatttattctttcaacaagtttttctttaaaaccacacactgctgggctatcataagttttgatgtggacaatggcacatctgcgggacggagtcccttggatcccatgaccagcccaggatccgggctaattctccaagcaaattttgtccacagtcaacgacgggagtccttcctgtatcgatccgacagcgattatgacctctctccaaagtctatgtcccggaactcctccattgccagtgatatacacggagatgacttgattgtgactccatttgctcaggtcttggccagtctgcgaactgtacgaaacaactttgctgcattaactaatttgcaagatcgagcacctagcaaaagatcacccatgtgcaaccaaccatccatcaacaaagccaccataacagaggaggcctaccagaaactggccagcgagaccctggaggagctggactggtgtctggaccagctagagaccctacagaccaggcactccgtcagtgagatggcctccaacaagtttaaaaggatgcttaatcgggagctcacccatctctctgaaatgagtcggtctggaaatcaagtgtcagagtttatatcaaacacattcttagataagcaacatgaagtggaaattccttctccaactcagaaggaaaaggagaaaaagaaaagaccaatgtctcagatcagtggagtcaagaaattgatgcacagctctagtctgactaattcaagtatcccaaggtttggagttaaaactgaacaagaagatgtccttgccaaggaactagaagatgtgaacaaatggggtcttcatgttttcagaatagcagagttgtctggtaaccggcccttgactgttatcatgcacaccatttttcaggaacgggatttattaaaaacatttaaaattccagtagatactttaattacatatcttatgactctcgaagaccattaccatgctgatgtggcctatcacaacaatatccatgctgcagatgttgtccagtctactcatgtgctattatctacacctgctttggaggctgtgtttacagatttggagattcttgcagcaatttttgccagtgcaatacatgatgtagatcatcctggtgtgtccaatcaatttctgatcaatacaaactctgaacttgccttgatgtacaatgattcctcagtcttagagaaccatcatttggctgtgggctttaaattgcttcaggaagaaaactgtgacattttccagaatttgaccaaaaaacaaagacaatctttaaggaaaatggtcattgacatcgtacttgcaacagatatgtcaaaacacatgaatctactggctgatttgaagactatggttgaaactaagaaagtgacaagctctggagttcttcttcttgataattattccgataggattcaggttcttcagaatatggtgcactgtgcagatctgagcaacccaacaaagcctctccagctgtaccgccagtggacggaccggataatggaggagttcttccgccaaggagaccgagagagggaacgtggcatggagataagccccatgtgtgacaagcacaatgcttccgtggaaaaatcacaggtgggcttcatagactatattgttcatcccctctgggagacatgggcagacctcgtccaccctgacgcccaggatattttggacactttggaggacaatcgtgaatggtaccagagcacaatccctcagagcccctctcctgcacctgatgacccagaggagggccggcagggtcaaactgagaaattccagtttgaactaactttagaggaagatggtgagtcagacacggaaaaggacagtggcagtcaagtggaagaagacactagctgcagtgactccaagactctttgtactcaagactcagagtctactgaaattccccttgatgaacaggttgaagaggaggcagtaggggaagaagaggaaagccagcctgaagcctgtgtcatagatgatcgttctcctgacacgtaacagtgcaaaaactttcatgccttttttttttttaagtagaaaaattgtttccaaagtgcatgtcacatgccacaaccacggtcacacctcactgtcatctgccaggacgtttgttgaacaaaactgaccttgactactcagtccagcgctcaggaatatcgtaaccagttttttcacctccatgtcatccgagcaaggtggacatcttcacgaacagcgtttttaacaagatttcagcttggtagagctgacaaagcagataaaatctactccaaattattttcaagagagtgtgactcatcaggcagcccaaaagtttattggacttggggtttctattcctttttatttgtttgcaatattttcagaagaaaggcattgcacagagtgaacttaatggacgaagcaacaaatatgtcaagaacaggacatagcacgaatctgttaccagtaggaggaggatgagccacagaaattgcataattttctaatttcaagtcttcctgatacatgactgaatagtgtggttcagtgagctgcactgacctctacattttgtatgatatgtaaaacagattttttgtagagcttacttttattattaaatgtattgaggtattatatttaaaaaaaactatgttcagaacttcatctgccactggttatttttttctaaggagtaacttgcaagttttcagtacaaatctgtgctacactggataaaaatctaatttatgaattttacttgcaccttatagttcatagcaattaactgatttgtagtgattcattgtttgttttatataccaatgacttccatattttaaaagagaaaaacaactttatgttgcaggaaaccctttttgtaagtctttattatttactttgcattttgtttcactctttccagataagcagagttgctcttcaccagtgtttttcttcatgtgcaaagtgactatttgttctataatacttttatgtgtgttatatcaaatgtgtcttaagcttcatgcaaactcagtcatcagttcgtgttgtctgaagcaagtgggagatatataaatacccagtagctaaaatggtcagtcttttttagatgttttcctacttagtatctcctaataacgttttgctgtgtcactagatgttcatttcacaagtgcatgtctttctaataatccacacatttcatgctctaataatccacacatttcatgctcatttttattgtttttacagccagttatagtaagaaaaaggtttttccccttgtgctgctttataatttagcgtgtgtctgaaccttatccatgtttgctagatgaggtcttgtcaaatatatcactaccattgtcaccggtgaaaagaaacaggtagttaagttagggttaacattcatttcaaccacgaggttgtatatcatgactagcttttactcttggtttacagagaaaagttaaacagccaactaggcagtttttaagaatattaacaatatattaacaaacaccaatacaactaatcctatttggttttaatgatttcaccatgggattaagaactatatcaggaacatccctgagaaacggttttaagtgtagcaactactcttccttaatggacagccacataacgtgtaggaagtcctttatcacttatcctcgatccataagcatatcttgcagaggggaactacttctttaaacacatggagggaaagaagatgatgccactggcaccagagggttagtactgtgatgcatcctaaaatatttattatattggtaaaaattctggttaaataaaaaattagagatcactcttggctgatttcagcaccaggaactgtattacagttttagagattaattcctagtgtttacctgattatagcagttggcatcatggggcatttaattctgactttatccccacgtcagccttaataaagtcttctttaccttctctatgaagactttaaagcccaaataatcatttttcacattgatattcaagaattgagatagatagaagccaaagtgggtatctgacaagtggaaaatcaaacgtttaagaagaattacaactctgaaaagcatttatatgtggaacttctcaaggagcctcctggggactggaaagtaagtcatcagccaggcaaatgactcatgctgaagagagtccccatttcagtcccctgagatctagctgatgcttagatcctttgaaataaaaattatgtctttataactctgatcttttacataaagcagaagaggaatcaactagttaattgcaaggtttctactctgtttcctctgtaaagatcagatggtaatctttcaaataagaaaaaaataaagacgtatgtttgaccaagtagtttcacaagaatatttgggaacttgtttcttttaattttatttgtccctgagtgaagtctagaaagaaaggtaaagagtctagagtttattcctctttccaaaacattctcattcctctcctccctacacttagtatttcccccacagagtgcctagaatcttaataatgaataaaataaaaagcagcaatatgtcattaacaaatccagacctgaaagggtaaagggtttataactgcactaataaagagaggctctttttttttcttccagtttgttggtttttaatggtaccgtgttgtaaagatacccactaatggacaatcaaattgcagaaaaggctcaatatccaagagacagggactaatgcactgtacaatctgcttatccttgcccttctctcttgccaaagtgtgcttcagaaatatatactgctttaaaaaagaataaaagaatatccttttacaagtggctttacatttcctaaaatgccataagaaaatgcaatatctgggtactgtatggggaaaaaaatgtccaagtttgtgtaaaaccagtgcatttcagcttgcaagttactgaacacaataatgctgttttaattttgttttatatcagttaaaattcacaataatgtagatagaacaaattacagacaaggaaagaaaaaacttgaatgaaatggattttacagaaagctttatgataatttttgaatgcattatttattttttgtgccatgcattttttttctcaccaaatgaccttacctgtaatacagtcttgtttgtctgtttacaaccatgtatttattgcaatgtacatactgtaatgttaattgtaaattatctgttcttattaaaacatcatcccatgatgggatggtgttgatatatttggaaactcttggtgagagaatgaatggtgtgtatacatactctgtacatttttcttttctcctgtaatatagtcttgtcaccttagagcttgtttatggaagattcaagaaaactataaaatacttaaagatatataaatttaaaaaaacatagctgcaggtctttggtcccagggctgtgccttaactttaaccaatattttcttctgttttgctgcatttgaaaggtaacagtggagctagggctgggcattttacatccaggcttttaattgattagaattctgccaataggtggattttacaaaaccacagacaacctctgaaagattctgagacccttttgagacagaagctcttaagtacttcttgccagggagcagcactgcatgtgtgatggttgtttgccatctgttgatcaggaactacttcagctacttgcatttgattatttcctttttttttttttttaactcggaaacacaactggggaaatatattctttcccagtgattataaacaatctttttcttttttttaagtccttttggcttctagagctcataggaaaatggacttgatttgaaattggagccagagtttactcgtgttggttatctattcatcagcttcctgacatgttaagagaatacattaaagagaaaatactgttttttaatcctaaaatttttcttccactaagataaaccaaatgtccttacatatatgtaaacccatctatttaaacgcaaaggtgggttgatgtcagtttacatagcagaaagcattcactatcctctaagatttgtttctgcaaaactttcattgctttagaattttaaaatttcaccttgtacaatggccagcccctaaagcaggaaacatttataatggattatatggaaacatcctcccagtacttgcccagcccttgaatcatgtggcttttcagtgaaaggaaagattctttttctaggaaaaatgagcctattttattttattttattttattttttgacacaaactgtagattttagcagccctggcccaaaggaatttgattacttttgttttaaacagtacaaaggggacactataattacaaaaacatccttaactgatttgagttgtttttatttctttggatatattttcagagtggtaaattgtgtgtgagaattacaaatgattattcttttagtggtttcttagcctctcttacagcccacggggatagtactgtacatcaataccttcatatgaaatttttatatgcaatgaaaataaaagcatgggttgattctgcctatttatgactcaatcttttacaaataaaagattattcattttaaattatagttcaatcagcatgtctcttaggatactgaacgtggttgaaatgaaaggatagtgacatcataagttagtactgatattcataaccaaataaagccaacttgagtaattttgctacattaaaaattaccaaaattacttagatggcctataagattaagcatggtgttttctaagcaagctttgaaaggggccttccatacttacttaattgaatattctgggatattgaaaattattcagatacttgacaattatttttggttacctactccgcaaactacaaagttttaaggactcaacaataagttaatgagacacagtgtttgctttcatggagcttacagtctggaggggacaaaggcttaaacaatactcatataattatatatgtgatcagtacaatgaaggagctcagtggggtaaataagcaggaacctgaacttgatctgttccggagggccacagaaggcttccttgaggccttgagaaagtgatttgcatctgagttctgaaggattgtaagaggtaactagggaaaaagttgacaggaagaggaaggggatccagacaagaaacatttgcaaagatcttgaggcataaatgagcttgagacatctggagaaactgaggaaaagtgagagagtaggcagggcctggagccgcagagccattgctaaccatcctgtgtgagatatcccccattctgtagctttattctcataaccctgctcaattttctttataacacttctcacagatttatatacgtgtttgtttttgttatctgtctctcccaccagaccacagctccatgagagcaaggtctttgcttaccaatatatcactagcacttaaaactatgcctggtacacagtaggttcttaatatgtgttgaatatagccatcaaattgatattggatataattcaatctgataagatattttgagatattaaagagtttttaacttgatacc

SEQ ID NO: 22288 - DNA, 2969 bp, Homo sapiens
  source 1..2969: mol_type = unassigned DNA
gtggtggccgcgcacccggccgcggctgattcattcacttcaagtgccgtgcagaaggctcggcaggcggggcgggcgtggggccgcggctccgggttggggaccgaggagatccggctgtggaccagacgctcctctgcggggcgggcacccaagcgcgctcgccaccccctcgccatccgctagagccgggctcctggactgggactcgggcccgccgcacagttgaaaagtcgcatagtggtttttccgctcgcgtcgctgtgtgaaagttggctcgccgctctttgcacgccctccctggaggccgacccgagacgccaagctggagagaccgtgcctccccgaggccggccgccccgcgagcacagcctccgcccccgttgcactgccgggctgggcaatatgaaggagcagccctcatgtgccggcaccgggcatccgagcatggcgggaggaggcctaccagaaactggccagcgagaccctggaggagctggactggtgtctggaccagctagagaccctacagaccaggcactccgtcagtgagatggcctccaacaagtttaaaaggatgcttaatcgggagctcacccatctctctgaaatgagtcggtctggaaatcaagtgtcagagtttatatcaaacacattcttagataagcaacatgaagtggaaattccttctccaactcagaaggaaaaggagaaaaagaaaagaccaatgtctcagatcagtggagtcaagaaattgatgcacagctctagtctgactaattcaagtatcccaaggtttggagttaaaactgaacaagaagatgtccttgccaaggaactagaagatgtgaacaaatggggtcttcatgttttcagaatagcagagttgtctggtaaccggcccttgactgttatcatgcacaccatttttcaggaacgggatttattaaaaacatttaaaattccagtagatactttaattacatatcttatgactctcgaagaccattaccatgctgatgtggcctatcacaacaatatccatgctgcagatgttgtccagtctactcatgtgctattatctacacctgctttggaggctgtgtttacagatttggagattcttgcagcaatttttgccagtgcaatacatgatgtagatcatcctggtgtgtccaatcaatttctgatcaatacaaactctgaacttgccttgatgtacaatgattcctcagtcttagagaaccatcatttggctgtgggctttaaattgcttcaggaagaaaactgtgacattttccagaatttgaccaaaaaacaaagacaatctttaaggaaaatggtcattgacatcgtacttgcaacagatatgtcaaaacacatgaatctactggctgatttgaagactatggttgaaactaagaaagtgacaagctctggagttcttcttcttgataattattccgataggattcaggttcttcagaatatggtgcactgtgcagatctgagcaacccaacaaagcctctccagctgtaccgccagtggacggaccggataatggaggagttcttccgccaaggagaccgagagagggaacgtggcatggagataagccccatgtgtgacaagcacaatgcttccgtggaaaaatcacaggtgggcttcatagactatattgttcatcccctctgggagacatgggcagacctcgtccaccctgacgcccaggatattttggacactttggaggacaatcgtgaatggtaccagagcacaatccctcagagcccctctcctgcacctgatgacccagaggagggccggcagggtcaaactgagaaattccagtttgaactaactttagaggaagatggtgagtcagacacggaaaaggacagtggcagtcaagtggaagaagacactagctgcagtgactccaagactctttgtactcaagactcagagtctactgaaattccccttgatgaacaggttgaagaggaggcagtaggggaagaagaggaaagccagcctgaagcctgtgtcatagatgatcgttctcctgacacgtaacagtgcaaaaactttcatgccttttttttttttaagtagaaaaattgtttccaaagtgcatgtcacatgccacaaccacggtcacacctcactgtcatctgccaggacgtttgttgaacaaaactgaccttgactactcagtccagcgctcaggaatatcgtaaccagttttttcacctccatgtcatccgagcaaggtggacatcttcacgaacagcgtttttaacaagatttcagcttggtagagctgacaaagcagataaaatctactccaaattattttcaagagagtgtgactcatcaggcagcccaaaagtttattggacttggggtttctattcctttttatttgtttgcaatattttcagaagaaaggcattgcacagagtgaacttaatggacgaagcaacaaatatgtcaagaacaggacatagcacgaatctgttaccagtaggaggaggatgagccacagaaattgcataattttctaatttcaagtcttcctgatacatgactgaatagtgtggttcagtgagctgcactgacctctacattttgtatgatatgtaaaacagattttttgtagagcttacttttattattaaatgtattgaggtattatatttaaaaaaaactatgttcagaacttcatctgccactggttatttttttctaaggagtaacttgcaagttttcagtacaaatctgtgctacactggataaaaatctaatttatgaattttacttgcaccttatagttcatagcaattaactgatttgtagtgattcattgtttgttttatataccaatgacttccatattttaaaagagaaaaacaactttatgttgcaggaaaccctttttgtaagtctttattatttactttgcatt

SEQ ID NO: 22289 - DNA, 3122 bp, Homo sapiens
  source 1..3122: mol_type = unassigned DNA
caatacttgttgcaataattgcccacgatagctgctcaaacaagagagttggaattcatctgtaaaaatcactacatgtaacgtaggagacaagaaaaatattaatgacagaagatctgcgaacatgatgcacgtgaataattttccctttagaaggcattcctggatatgttttgatgtggacaatggcacatctgcgggacggagtcccttggatcccatgaccagcccaggatccgggctaattctccaagcaaattttgtccacagtcaacgacgggagtccttcctgtatcgatccgacagcgattatgacctctctccaaagtctatgtcccggaactcctccattgccagtgatatacacggagatgacttgattgtgactccatttgctcaggtcttggccagtctgcgaactgtacgaaacaactttgctgcattaactaatttgcaagatcgagcacctagcaaaagatcacccatgtgcaaccaaccatccatcaacaaagccaccataacagaggaggcctaccagaaactggccagcgagaccctggaggagctggactggtgtctggaccagctagagaccctacagaccaggcactccgtcagtgagatggcctccaacaagtttaaaaggatgcttaatcgggagctcacccatctctctgaaatgagtcggtctggaaatcaagtgtcagagtttatatcaaacacattcttagataagcaacatgaagtggaaattccttctccaactcagaaggaaaaggagaaaaagaaaagaccaatgtctcagatcagtggagtcaagaaattgatgcacagctctagtctgactaattcaagtatcccaaggtttggagttaaaactgaacaagaagatgtccttgccaaggaactagaagatgtgaacaaatggggtcttcatgttttcagaatagcagagttgtctggtaaccggcccttgactgttatcatgcacaccatttttcaggaacgggatttattaaaaacatttaaaattccagtagatactttaattacatatcttatgactctcgaagaccattaccatgctgatgtggcctatcacaacaatatccatgctgcagatgttgtccagtctactcatgtgctattatctacacctgctttggaggctgtgtttacagatttggagattcttgcagcaatttttgccagtgcaatacatgatgtagatcatcctggtgtgtccaatcaatttctgatcaatacaaactctgaacttgccttgatgtacaatgattcctcagtcttagagaaccatcatttggctgtgggctttaaattgcttcaggaagaaaactgtgacattttccagaatttgaccaaaaaacaaagacaatctttaaggaaaatggtcattgacatcgtacttgcaacagatatgtcaaaacacatgaatctactggctgatttgaagactatggttgaaactaagaaagtgacaagctctggagttcttcttcttgataattattccgataggattcaggttcttcagaatatggtgcactgtgcagatctgagcaacccaacaaagcctctccagctgtaccgccagtggacggaccggataatggaggagttcttccgccaaggagaccgagagagggaacgtggcatggagataagccccatgtgtgacaagcacaatgcttccgtggaaaaatcacaggtgggcttcatagactatattgttcatcccctctgggagacatgggcagacctcgtccaccctgacgcccaggatattttggacactttggaggacaatcgtgaatggtaccagagcacaatccctcagagcccctctcctgcacctgatgacccagaggagggccggcagggtcaaactgagaaattccagtttgaactaactttagaggaagatggtgagtcagacacggaaaaggacagtggcagtcaagtggaagaagacactagctgcagtgactccaagactctttgtactcaagactcagagtctactgaaattccccttgatgaacaggttgaagaggaggcagtaggggaagaagaggaaagccagcctgaagcctgtgtcatagatgatcgttctcctgacacgtaacagtgcaaaaactttcatgccttttttttttttaagtagaaaaattgtttccaaagtgcatgtcacatgccacaaccacggtcacacctcactgtcatctgccaggacgtttgttgaacaaaactgaccttgactactcagtccagcgctcaggaatatcgtaaccagttttttcacctccatgtcatccgagcaaggtggacatcttcacgaacagcgtttttaacaagatttcagcttggtagagctgacaaagcagataaaatctactccaaattattttcaagagagtgtgactcatcaggcagcccaaaagtttattggacttggggtttctattcctttttatttgtttgcaatattttcagaagaaaggcattgcacagagtgaacttaatggacgaagcaacaaatatgtcaagaacaggacatagcacgaatctgttaccagtaggaggaggatgagccacagaaattgcataattttctaatttcaagtcttcctgatacatgactgaatagtgtggttcagtgagctgcactgacctctacattttgtatgatatgtaaaacagattttttgtagagcttacttttattattaaatgtattgaggtattatatttaaaaaaaactatgttcagaacttcatctgccactggttatttttttctaaggagtaacttgcaagttttcagtacaaatctgtgctacactggataaaaatctaatttatgaattttacttgcaccttatagttcatagcaattaactgatttgtagtgattcattgtttgttttatataccaatgacttccatattttaaaagagaaaaacaactttatgttgcaggaaaccctttttgtaagtctttattatttactttgcattttgtttcactctttccagataagcagagttgctcttcaccagtgtttttcttcatgtgcaaagtgactatttgttctataatac

SEQ ID NO: 22290 - DNA, 2294 bp, Homo sapiens
  source 1..2294: mol_type = unassigned DNA
actgcacaaaggaaatgccctcactcagctacaagtgcctcctgctccgtgcggggcctcagggccccagagccccgcaccagctctgacttctcgtggttcctggggatcttggcatcgtccttaaaaatggcttttgtttgggatcctctgggagccacggtgccaggaccatctacaagagccaaatcaagattgcgtttctcaaagtcctacagttttgatgtggacaatggcacatctgcgggacggagtcccttggatcccatgaccagcccaggatccgggctaattctccaagcaaattttgtccacagtcaacgacgggagtccttcctgtatcgatccgacagcgattatgacctctctccaaagtctatgtcccggaactcctccattgccagtgatatacacggagatgacttgattgtgactccatttgctcaggtcttggccagtctgcgaactgtacgaaacaactttgctgcattaactaatttgcaagatcgagcacctagcaaaagatcacccatgtgcaaccaaccatccatcaacaaagccaccataacagaggaggcctaccagaaactggccagcgagaccctggaggagctggactggtgtctggaccagctagagaccctacagaccaggcactccgtcagtgagatggcctccaacaagtttaaaaggatgcttaatcgggagctcacccatctctctgaaatgagtcggtctggaaatcaagtgtcagagtttatatcaaacacattcttagataagcaacatgaagtggaaattccttctccaactcagaaggaaaaggagaaaaagaaaagaccaatgtctcagatcagtggagtcaagaaattgatgcacagctctagtctgactaattcaagtatcccaaggtttggagttaaaactgaacaagaagatgtccttgccaaggaactagaagatgtgaacaaatggggtcttcatgttttcagaatagcagagttgtctggtaaccggcccttgactgttatcatgcacaccatttttcaggaacgggatttattaaaaacatttaaaattccagtagatactttaattacatatcttatgactctcgaagaccattaccatgctgatgtggcctatcacaacaatatccatgctgcagatgttgtccagtctactcatgtgctattatctacacctgctttggaggctgtgtttacagatttggagattcttgcagcaatttttgccagtgcaatacatgatgtagatcatcctggtgtgtccaatcaatttctgatcaatacaaactctgaacttgccttgatgtacaatgattcctcagtcttagagaaccatcatttggctgtgggctttaaattgcttcaggaagaaaactgtgacattttccagaatttgaccaaaaaacaaagacaatctttaaggaaaatggtcattgacatcgtacttgcaacagatatgtcaaaacacatgaatctactggctgatttgaagactatggttgaaactaagaaagtgacaagctctggagttcttcttcttgataattattccgataggattcaggttcttcagaatatggtgcactgtgcagatctgagcaacccaacaaagcctctccagctgtaccgccagtggacggaccggataatggaggagttcttccgccaaggagaccgagagagggaacgtggcatggagataagccccatgtgtgacaagcacaatgcttccgtggaaaaatcacaggtgggcttcatagactatattgttcatcccctctgggagacatgggcagacctcgtccaccctgacgcccaggatattttggacactttggaggacaatcgtgaatggtaccagagcacaatccctcagagcccctctcctgcacctgatgacccagaggagggccggcagggtcaaactgagaaattccagtttgaactaactttagaggaagatggtgagtcagacacggaaaaggacagtggcagtcaagtggaagaagacactagctgcagtgactccaagactctttgtactcaagactcagagtctactgaaattccccttgatgaacaggttgaagaggaggcagtaggggaagaagaggaaagccagcctgaagcctgtgtcatagatgatcgttctcctgacacgtaacagtgcaaaaactttcatgccttttttttttttaagtagaaaaattgtttccaaagtgcatgtcacatgccacaaccacggtcacacctcactgtcatctg

SEQ ID NO: 22291 - DNA, 2478 bp, Homo sapiens
  source 1..2478: mol_type = unassigned DNA
aagcacgagtcctatagttggcgtaccctgaggcctgccagttcctgccttaatgcatatgtagtcgtaattgagttctgacacggccttggatgtttctgtcctaaatagctgacattgcatcttcaagactgtcattccagttggcttttgagtggatacgtgcagtgagatcattgacactggaaacactagttcccattttaattacttaaaacaccacgatgaaaagaaatacctgtgatttgctttctcggagcaaaagtgcctctgaggaaacactacattccagtaatgaagaggaagaccctttccgcggaatggaaccctatcttgtccggagactttcatgtcgcaatattcagcttccccctctcgccttcagacagttggaacaagctgacttgaaaagtgaatcagagaacattcaacgaccaaccagcctccccctgaagattctgccgctgattgctatcacttctgcagaatccagtggttttgatgtggacaatggcacatctgcgggacggagtcccttggatcccatgaccagcccaggatccgggctaattctccaagcaaattttgtccacagtcaacgacgggagtccttcctgtatcgatccgacagcgattatgacctctctccaaagtctatgtcccggaactcctccattgccagtgatatacacggagatgacttgattgtgactccatttgctcaggtcttggccagtctgcgaactgtacgaaacaactttgctgcattaactaatttgcaagatcgagcacctagcaaaagatcacccatgtgcaaccaaccatccatcaacaaagccaccataacagaggaggcctaccagaaactggccagcgagaccctggaggagctggactggtgtctggaccagctagagaccctacagaccaggcactccgtcagtgagatggcctccaacaagtttaaaaggatgcttaatcgggagctcacccatctctctgaaatgagtcggtctggaaatcaagtgtcagagtttatatcaaacacattcttagataagcaacatgaagtggaaattccttctccaactcagaaggaaaaggagaaaaagaaaagaccaatgtctcagatcagtggagtcaagaaattgatgcacagctctagtctgactaattcaagtatcccaaggtttggagttaaaactgaacaagaagatgtccttgccaaggaactagaagatgtgaacaaatggggtcttcatgttttcagaatagcagagttgtctggtaaccggcccttgactgttatcatgcacaccatttttcaggaacgggatttattaaaaacatttaaaattccagtagatactttaattacatatcttatgactctcgaagaccattaccatgctgatgtggcctatcacaacaatatccatgctgcagatgttgtccagtctactcatgtgctattatctacacctgctttggaggctgtgtttacagatttggagattcttgcagcaatttttgccagtgcaatacatgatgtagatcatcctggtgtgtccaatcaatttctgatcaatacaaactctgaacttgccttgatgtacaatgattcctcagtcttagagaaccatcatttggctgtgggctttaaattgcttcaggaagaaaactgtgacattttccagaatttgaccaaaaaacaaagacaatctttaaggaaaatggtcattgacatcgtacttgcaacagatatgtcaaaacacatgaatctactggctgatttgaagactatggttgaaactaagaaagtgacaagctctggagttcttcttcttgataattattccgataggattcaggttcttcagaatatggtgcactgtgcagatctgagcaacccaacaaagcctctccagctgtaccgccagtggacggaccggataatggaggagttcttccgccaaggagaccgagagagggaacgtggcatggagataagccccatgtgtgacaagcacaatgcttccgtggaaaaatcacaggtgggcttcatagactatattgttcatcccctctgggagacatgggcagacctcgtccaccctgacgcccaggatattttggacactttggaggacaatcgtgaatggtaccagagcacaatccctcagagcccctctcctgcacctgatgacccagaggagggccggcagggtcaaactgagaaattccagtttgaactaactttagaggaagatggtgagtcagacacggaaaaggacagtggcagtcaagtggaagaagacactagctgcagtgactccaagactctttgtactcaagactcagagtctactgaaattccccttgatgaacaggttgaagaggaggcagtaggggaagaagaggaaagccagcctgaagcctgtgtcatagatgatcgttctcctgacacgtaacagtgca

SEQ ID NO: 22292 - DNA, 1040 bp, Homo sapiens
  source 1..1040: mol_type = unassigned DNA
gaggcaggcgactgaatgcactaacagcagcaggctcagacctgcttccctggacatttccgggaccgtgagcgagggaaccacgttgccctggattcttgccagctgtacaaagttgaccaggaaaatggctcagcagacaagcccggacactttaacagtacctgaagtggataatccgcattgtccaaacccgtggctgaacgaagaccttgtgaaatccttgcgagaaaacctgttgcagcatgagaagtccaagacagcgaggaaatcggtttctcccaagctctctccagtgatctctccgagaaattcccccaggcttctgcgcagaatgcttctcagcagcaacatccccaaacagcggcgtttcacggtggcacatacatgttttgatgtggacaatggcacatctgcgggacggagtcccttggatcccatgaccagcccaggatccgggctaattctccaagcaaattttgtccacagtcaacgacgggagtccttcctgtatcgatccgacagcgattatgacctctctccaaagtctatgtcccggaactcctccattgccagtgatatacacggagatgacttgattgtgactccatttgctcaggtcttggccagtctgcgaactgtacgaaacaactttgctgcattaactaatttgcaagatcgagcacctagcaaaagatcacccatgtgcaaccaaccatccatcaacaaagccaccataacaggatcctggatggaattgaacccatatacgttacttgacatgtgaaacacgtgtgaccctggcagatgatttggctgaccttgaaaactacagctgtttagtcactttgaaaacaatgcaatacaagtgatttactaggcttcagttttaaccattttatgctgactggtggaaattctaacccttcagaaagaaaaaaaaattgtgaagcaatggaaatgtaccatcctgggtattaatgtcattaattttcaatacattttctcacaaaaagtataaagaagtctttgcttgacct

SEQ ID NO: 22293 - DNA, 2860 bp, Homo sapiens
  source 1..2860: mol_type = unassigned DNA
ttctcactgccctgcggtgttttgaactgccttcttacagacgtcatacagcccttgaggaatagtttctgcctggtgagattgaatgatagttctcattcacaaaaccctggattctaagcagggacacacagaaattactttcgcaggtaaatcagcccacccagccaaagtgtggagagatttgttccttggctgacttctttgctccacggagaggagtgttttcctgtgcttgccctgaaatggaacttccttgacagctctcccgtgttacagtacctcccggtcattttctttttctctctctctacctgcgctcttcgagtgtcagaaacctttaaagctgttactatggaattgcaaaaaagagatcaagtgactctttcactatgctggtttcccttgtgacccagatgaagaatcaattcagaattcagttcctcccttggcattgcaagacacagaagaaactgtcacttcctaacagcctagtactggagtaaattcagtatgaaggaagaaagcgctcctgcgtgttagaaccttgcccatgagctggaccgaggacaggagatggactccaggaaaattggatttcttcaagcagcctcccttggaaatggaatatctttaaaatcttctttgcagaaagacagttagaatgtattaatcagaatagttgaagacttattttcctttttattttttttcaaaatgagcattattatgaagccaagatcccgatctacaagttccctaaggactgcagaggcagtttgttttgatgtggacaatggcacatctgcgggacggagtcccttggatcccatgaccagcccaggatccgggctaattctccaagcaaattttgtccacagtcaacgacgggagtccttcctgtatcgatccgacagcgattatgacctctctccaaagtctatgtcccggaactcctccattgccagtgatatacacggagatgacttgattgtgactccatttgctcaggtcttggccagtctgcgaactgtacgaaacaactttgctgcattaactaatttgcaagatcgagcacctagcaaaagatcacccatgtgcaaccaaccatccatcaacaaagccaccataacagaggaggcctaccagaaactggccagcgagaccctggaggagctggactggtgtctggaccagctagagaccctacagaccaggcactccgtcagtgagatggcctccaacaagtttaaaaggatgcttaatcgggagctcacccatctctctgaaatgagtcggtctggaaatcaagtgtcagagtttatatcaaacacattcttagataagcaacatgaagtggaaattccttctccaactcagaaggaaaaggagaaaaagaaaagaccaatgtctcagatcagtggagtcaagaaattgatgcacagctctagtctgactaattcaagtatcccaaggtttggagttaaaactgaacaagaagatgtccttgccaaggaactagaagatgtgaacaaatggggtcttcatgttttcagaatagcagagttgtctggtaaccggcccttgactgttatcatgcacaccatttttcaggaacgggatttattaaaaacatttaaaattccagtagatactttaattacatatcttatgactctcgaagaccattaccatgctgatgtggcctatcacaacaatatccatgctgcagatgttgtccagtctactcatgtgctattatctacacctgctttggaggctgtgtttacagatttggagattcttgcagcaatttttgccagtgcaatacatgatgtagatcatcctggtgtgtccaatcaatttctgatcaatacaaactctgaacttgccttgatgtacaatgattcctcagtcttagagaaccatcatttggctgtgggctttaaattgcttcaggaagaaaactgtgacattttccagaatttgaccaaaaaacaaagacaatctttaaggaaaatggtcattgacatcgtacttgcaacagatatgtcaaaacacatgaatctactggctgatttgaagactatggttgaaactaagaaagtgacaagctctggagttcttcttcttgataattattccgataggattcaggttcttcagaatatggtgcactgtgcagatctgagcaacccaacaaagcctctccagctgtaccgccagtggacggaccggataatggaggagttcttccgccaaggagaccgagagagggaacgtggcatggagataagccccatgtgtgacaagcacaatgcttccgtggaaaaatcacaggtgggcttcatagactatattgttcatcccctctgggagacatgggcagacctcgtccaccctgacgcccaggatattttggacactttggaggacaatcgtgaatggtaccagagcacaatccctcagagcccctctcctgcacctgatgacccagaggagggccggcagggtcaaactgagaaattccagtttgaactaactttagaggaagatggtgagtcagacacggaaaaggacagtggcagtcaagtggaagaagacactagctgcagtgactccaagactctttgtactcaagactcagagtctactgaaattccccttgatgaacaggttgaagaggaggcagtaggggaagaagaggaaagccagcctgaagcctgtgtcatagatgatcgttctcctgacacgtaacagtgcaaaaactttcatgccttttttttttttaagtagaaaaattgtttccaaagtgcatgtcacatgccacaaccacggtcacacctcactgtcatctgcc

SEQ ID NO: 22294 - DNA, 1430 bp, Homo sapiens
  source 1..1430: mol_type = unassigned DNA
gacagaagatctgcgaacatgatgcacgtgaataattttccctttagaaggcattcctggatatgaggaggcctaccagaaactggccagcgagaccctggaggagctggactggtgtctggaccagctagagaccctacagaccaggcactccgtcagtgagatggcctccaacaagtttaaaaggatgcttaatcgggagctcacccatctctctgaaatgagtcggtctggaaatcaagtgtcagagtttatatcaaacacattcttagataagcaacatgaagtggaaattccttctccaactcagaaggaaaaggagaaaaagaaaagaccaatgtctcagatcagtggagtcaagaaattgatgcacagctctagtctgactaattcaagtatcccaaggtttggagttaaaactgaacaagaagatgtccttgccaaggaactagaagatgtgaacaaatggggtcttcatgttttcagaatagcagagttgtctggtaaccggcccttgactgttatcatgcacaccatttttcaggaacgggatttattaaaaacatttaaaattccagtagatactttaattacatatcttatgactctcgaagaccattaccatgctgatgtggcctatcacaacaatatccatgctgcagatgttgtccagtctactcatgtgctattatctacacctgctttggaggctgtgtttacagatttggagattcttgcagcaatttttgccagtgcaatacatgatgtagatcatcctggtgtgtccaatcaatttctgatcaatacaaactctgaacttgccttgatgtacaatgattcctcagtcttagagaaccatcatttggctgtgggctttaaattgcttcaggaagaaaactgtgacattttccagaatttgaccaaaaaacaaagacaatctttaaggaaaatggtcattgacatcgtacttgcaacagatatgtcaaaacacatgaatctactggctgatttgaagactatggttgaaactaagaaagtgacaagctctggagttcttcttcttgataattattccgataggattcaggttcttcagaatatggtgcactgtgcagatctgagcaacccaacaaagcctctccagctgtaccgccagtggacggaccggataatggaggagttcttccgccaaggagaccgagagagggaacgtggcatggagataagccccatgtgtgacaagcacaatgcttccgtggaaaaatcacaggtgggcttcatagactatattgttcatcccctctgggagacatgggcagacctcgtccaccctgacgcccaggatattttggacactttggaggacaatcgtgaatggtaccagagcacaatccctcagagcccctctcctgcacctgatgacccagagg

SEQ ID NO: 22295 - DNA, 577 bp, Homo sapiens
  source 1..577: mol_type = unassigned DNA
atagttggcgtaccctgaggcctgccagttcctgccttaatgcatatgtagtcgtaattgagttctgacacggccttggatgtttctgtcctaaatagctgacattgcatcttcaagactgtggtctagctgtgtcccagagagcaacttcccttttcaaggcagcccactctgtgtgatgctttttcctaggtatgggcaacccatccctcctagggtgaaaacttcgctgttgctagttccagcattccagttggcttttgagtggatacgtgcagtgagatcattgacactggaaacactagttcccattttaattacttaaaacaccacgatgaaaagaaatacctgtgatttgctttctcggagcaaaagtgcctctgaggaaacactacattccagtaatgaagaggaagaccctttccgcggaatggaaccctatcttgtccggagactttcatgtcgcaatattcagcttccccctctcgccttcagacagttggaacaagctgacttgaaaagtgaatcagagaacattcaacgaccaaccagcctccccctgaagattctgccgctg

SEQ ID NO: 22296 - DNA, 3350 bp, Homo sapiens
  source 1..3350: mol_type = unassigned DNA
agagagactgaggcaggcgactgaatgcactaacagcagcaggctcagacctgcttccctggacatttccgggaccgtgagcgagggaaccacgttgccctggattcttgccagctgtacaaagttgaccaggaaaatggctcagcagacaagcccggacactttaacagtacctgaagtggataatccgcattgtccaaacccgtggctgaacgaagaccttgtgaaatccttgcgagaaaacctgttgcagcatgagaagtccaagacagcgaggaaatcggtttctcccaagctctctccagtgatctctccgagaaattcccccaggcttctgcgcagaatgcttctcagcagcaacatccccaaacagcggcgtttcacggtggcacatacatgttttgatgtggacaatggcacatctgcgggacggagtcccttggatcccatgaccagcccaggatccgggctaattctccaagcaaattttgtccacagtcaacgacgggagtccttcctgtatcgatccgacagcgattatgacctctctccaaagtctatgtcccggaactcctccattgccagtgatatacacggagatgacttgattgtgactccatttgctcaggtcttggccagtctgcgaactgtacgaaacaactttgctgcattaactaatttgcaagatcgagcacctagcaaaagatcacccatgtgcaaccaaccatccatcaacaaagccaccataacagaggaggcctaccagaaactggccagcgagaccctggaggagctggactggtgtctggaccagctagagaccctacagaccaggcactccgtcagtgagatggcctccaacaagtttaaaaggatgcttaatcgggagctcacccatctctctgaaatgagtcggtctggaaatcaagtgtcagagtttatatcaaacacattcttagataagcaacatgaagtggaaattccttctccaactcagaaggaaaaggagaaaaagaaaagaccaatgtctcagatcagtggagtcaagaaattgatgcacagctctagtctgactaattcaagtatcccaaggtttggagttaaaactgaacaagaagatgtccttgccaaggaactagaagatgtgaacaaatggggtcttcatgttttcagaatagcagagttgtctggtaaccggcccttgactgttatcatgcacaccatttttcaggaacgggatttattaaaaacatttaaaattccagtagatactttaattacatatcttatgactctcgaagaccattaccatgctgatgtggcctatcacaacaatatccatgctgcagatgttgtccagtctactcatgtgctattatctacacctgctttggaggctgtgtttacagatttggagattcttgcagcaatttttgccagtgcaatacatgatgtagatcatcctggtgtgtccaatcaatttctgatcaatacaaactctgaacttgccttgatgtacaatgattcctcagtcttagagaaccatcatttggctgtgggctttaaattgcttcaggaagaaaactgtgacattttccagaatttgaccaaaaaacaaagacaatctttaaggaaaatggtcattgacatcgtacttgcaacagatatgtcaaaacacatgaatctactggctgatttgaagactatggttgaaactaagaaagtgacaagctctggagttcttcttcttgataattattccgataggattcaggttcttcagaatatggtgcactgtgcagatctgagcaacccaacaaagcctctccagctgtaccgccagtggacggaccggataatggaggagttcttccgccaaggagaccgagagagggaacgtggcatggagataagccccatgtgtgacaagcacaatgcttccgtggaaaaatcacaggtgggcttcatagactatattgttcatcccctctgggagacatgggcagacctcgtccaccctgacgcccaggatattttggacactttggaggacaatcgtgaatggtaccagagcacaatccctcagagcccctctcctgcacctgatgacccagaggagggccggcagggtcaaactgagaaattccagtttgaactaactttagaggaagatggtgagtcagacacggaaaaggacagtggcagtcaagtggaagaagacactagctgcagtgactccaagactctttgtactcaagactcagagtctactgaaattccccttgatgaacaggttgaagaggaggcagtaggggaagaagaggaaagccagcctgaagcctgtgtcatagatgatcgttctcctgacacgtaacagtgcaaaaactttcatgccttttttttttttaagtagaaaaattgtttccaaagtgcatgtcacatgccacaaccacggtcacacctcactgtcatctgccaggacgtttgttgaacaaaactgaccttgactactcagtccagcgctcaggaatatcgtaaccagttttttcacctccatgtcatccgagcaaggtggacatcttcacgaacagcgtttttaacaagatttcagcttggtagagctgacaaagcagataaaatctactccaaattattttcaagagagtgtgactcatcaggcagcccaaaagtttattggacttggggtttctattcctttttatttgtttgcaatattttcagaagaaaggcattgcacagagtgaacttaatggacgaagcaacaaatatgtcaagaacaggacatagcacgaatctgttaccagtaggaggaggatgagccacagaaattgcataattttctaatttcaagtcttcctgatacatgactgaatagtgtggttcagtgagctgcactgacctctacattttgtatgatatgtaaaacagattttttgtagagcttacttttattattaaatgtattgaggtattatatttaaaaaaaactatgttcagaacttcatctgccactggttatttttttctaaggagtaacttgcaagttttcagtacaaatctgtgctacactggataaaaatctaatttatgaattttacttgcaccttatagttcatagcaattaactgatttgtagtgattcattgtttgttttatataccaatgacttccatattttaaaagagaaaaacaactttatgttgcaggaaaccctttttgtaagtctttattatttactttgcattttgtttcactctttccagataagcagagttgctcttcaccagtgtttttcttcatgtgcaaagtgactatttgttctataatac

SEQ ID NO: 22297 - DNA, 494 bp, Homo sapiens
  source 1..494: mol_type = unassigned DNA
ggtcacacagagagtacgtgtcaaaggaaactcaaaagaacacattttctcagtgattacaggttttagagaagaggaacaatgcttcctctgagcctgaagaaaagaatgaaataagggctgcaagggaacatgcaggtttcacactacaggagcttgtctgtcttggtgcaagtgggagcattccagttggcttttgagtggatacgtgcagtgagatcattgacactggaaacactagttcccattttaattacttaaaacaccacgatgaaaagaaatacctgtgatttgctttctcggagcaaaagtgcctctgaggaaacactacattccagtaatgaagaggaagaccctttccgcggaatggaaccctatcttgtccggagactttcatgtcgcaatattcagcttccccctctcgccttcagacagttggaacaagctgacttgaaaagtgaatcagagaacattcaacgaccaaccagcctccc

SEQ ID NO: 22298 - DNA, 2247 bp, Homo sapiens
  source 1..2247: mol_type = unassigned DNA
atgaaaagaaatacctgtgatttgctttctcggagcaaaagtgcctctgaggaaacactacattccagtaatgaagaggaagaccctttccgcggaatggaaccctatcttgtccggagactttcatgtcgcaatattcagcttccccctctcgccttcagacagttggaacaagctgacttgaaaagtgaatcagagaacattcaacgaccaaccagcctccccctgaagattctgccgctgattgctatcacttctgcagaatccagtggttttgatgtggacaatggcacatctgcgggacggagtcccttggatcccatgaccagcccaggatccgggctaattctccaagcaaattttgtccacagtcaacgacgggagtccttcctgtatcgatccgacagcgattatgacctctctccaaagtctatgtcccggaactcctccattgccagtgatatacacggagatgacttgattgtgactccatttgctcaggtcttggccagtctgcgaactgtacgaaacaactttgctgcattaactaatttgcaagatcgagcacctagcaaaagatcacccatgtgcaaccaaccatccatcaacaaagccaccataacagaggaggcctaccagaaactggccagcgagaccctggaggagctggactggtgtctggaccagctagagaccctacagaccaggcactccgtcagtgagatggcctccaacaagtttaaaaggatgcttaatcgggagctcacccatctctctgaaatgagtcggtctggaaatcaagtgtcagagtttatatcaaacacattcttagataagcaacatgaagtggaaattccttctccaactcagaaggaaaaggagaaaaagaaaagaccaatgtctcagatcagtggagtcaagaaattgatgcacagctctagtctgactaattcaagtatcccaaggtttggagttaaaactgaacaagaagatgtccttgccaaggaactagaagatgtgaacaaatggggtcttcatgttttcagaatagcagagttgtctggtaaccggcccttgactgttatcatgcacaccatttttcaggaacgggatttattaaaaacatttaaaattccagtagatactttaattacatatcttatgactctcgaagaccattaccatgctgatgtggcctatcacaacaatatccatgctgcagatgttgtccagtctactcatgtgctattatctacacctgctttggaggctgtgtttacagatttggagattcttgcagcaatttttgccagtgcaatacatgatgtagatcatcctggtgtgtccaatcaatttctgatcaatacaaactctgaacttgccttgatgtacaatgattcctcagtcttagagaaccatcatttggctgtgggctttaaattgcttcaggaagaaaactgtgacattttccagaatttgaccaaaaaacaaagacaatctttaaggaaaatggtcattgacatcgtacttgcaacagatatgtcaaaacacatgaatctactggctgatttgaagactatggttgaaactaagaaagtgacaagctctggagttcttcttcttgataattattccgataggattcaggttcttcagaatatggtgcactgtgcagatctgagcaacccaacaaagcctctccagctgtaccgccagtggacggaccggataatggaggagttcttccgccaaggagaccgagagagggaacgtggcatggagataagccccatgtgtgacaagcacaatgcttccgtggaaaaatcacaggtgggcttcatagactatattgttcatcccctctgggagacatgggcagacctcgtccaccctgacgcccaggatattttggacactttggaggacaatcgtgaatggtaccagagcacaatccctcagagcccctctcctgcacctgatgacccagaggagggccggcagggtcaaactgagaaattccagtttgaactaactttagaggaagatggtgagtcagacacggaaaaggacagtggcagtcaagtggaagaagacactagctgcagtgactccaagactctttgtactcaagactcagagtctactgaaattccccttgatgaacaggttgaagaggaggcagtaggggaagaagaggaaagccagcctgaagcctgtgtcatagatgatcgttctcctgacacgtaa

SEQ ID NO: 22299 - DNA, 3020 bp, Homo sapiens
  source 1..3020: mol_type = unassigned DNA
gtggagcagagagtgcttggcgggcgggtgccccgaagcctgaggaattgatgcatagtcggggtgcgtggactccaggacgcgcccctttgcagaaagagtccgtgccccgctgccgcctgctctgggcagcggccgtcgggcagcgggtgctggccgtcttggccgggagggtgacacacgcccggcagtgatggtcgaggagcccgcccgggttcgacgcccgggtcccactcgccggcgcgcggccgcggctctgccggtcgctccccgccagggggcggcgcagcgcggggcgagcgggaggcgacgggcggcggcgcggaggccggggccgtgagggagctggttctgagtcgccgacctcacctcacctcacctgcgcgcgttgttgcccctacggagcctcctggagtccaggatcggcggagttcgaaaacgaacttcccacgtttgctatgttgccctttggagacaaaacaagagaaatggtcaatgcatggtttgctgagagagttcacaccatccctgtgtgcaaggaaggtatcagaggccacaccgaatcttgctcttgtcccttgcagcagagtcctcgtgcagataacagtgcccctggaacaccaaccaggaaaatctctgcctctgaatttgaccggcctcttagacccattgttgtcaaggattctgagggaactgtgagcttcctctctgactcagaaaagaaggaacagatgcctctaacccctccaaggtttgatcatgatgaaggggaccagtgctcaagactcttggaattagtgaaggatatttctagtcatttggatgtcacagccttatgtcacaaaattttcttgcatatccatggactgatatctgctgaccgctattccctgttccttgtctgtgaagacagctccaatgacaagtttcttatcagccgcctctttgatgttgctgaaggttcaacactggaagaagtttcaaataactgtatccgcttagaatggaacaaaggcattgtgggacatgtggcagcgcttggtgagcccttgaacatcaaagatgcatatgaggatcctcggttcaatgcagaagttgaccaaattacaggctacaagacacaaagcattctttgtatgccaattaagaatcatagggaagaggttgttggtgtagcccaggccatcaacaagaaatcaggaaacggtgggacatttactgaaaaagatgaaaaggactttgctgcttatttggcattttgtggtattgttcttcataatgctcagctctatgagacttcactgctggagaacaagagaaatcaggtgctgcttgaccttgctagtttaatttttgaagaacaacaatcattagaagtaattttgaagaaaatagctgccactattatctctttcatgcaagtgcagaaatgcaccattttcatagtggatgaagattgctccgattctttttctagtgtgtttcacatggagtgtgaggaattagaaaaatcatctgatacattaacaagggaacatgatgcaaacaaaatcaattacatgtatgctcagtatgtcaaaaatactatggaaccacttaatatcccagatgtcagtaaggataaaagatttccctggacaactgaaaatacaggaaatgtaaaccagcagtgcattagaagtttgctttgtacacctataaaaaatggaaagaagaataaagttataggggtttgccaacttgttaataagatggaggagaatactggcaaggttaagcctttcaaccgaaatgacgaacagtttctggaagcttttgtcatcttttgtggcttggggatccagaacacgcagatgtatgaagcagtggagagagccatggccaagcaaatggtcacattggaggttctgtcgtatcatgcttcagcagcagaggaagaaacaagagagctacagtcgttagcggctgctgtggtgccatctgcccagacccttaaaattactgactttagcttcagtgactttgagctgtctgatctggaaacagcactgtgtacaattcggatgtttactgacctcaaccttgtgcagaacttccagatgaaacatgaggttctttgcagatggattttaagtgttaagaagaattatcggaagaatgttgcctatcataattggagacatgcctttaatacagctcagtgcatgtttgctgctctaaaagcaggcaaaattcagaacaagctgactgacctggagatacttgcattgctgattgctgcactaagccacgatttggatcaccgtggtgtgaataactcttacatacagcgaagtgaacatccacttgcccagctttactgccattcaatcatggaacaccatcattttgaccagtgcctgatgattcttaatagtccaggcaatcagattctcagtggcctctccattgaagaatataagaccacgttgaaaataatcaagcaagctattttagctacagacctagcactgtacattaagaggcgaggagaattttttgaacttataagaaaaaatcaattcaatttggaagatcctcatcaaaaggagttgtttttggcaatgctgatgacagcttgtgatctttctgcaattacaaaaccctggcctattcaacaacggatagcagaacttgtagcaactgaattttttgatcaaggagacagagagagaaaagaactcaacatagaacccactgatctaatgaacagggagaagaaaaacaaaatcccaagtatgcaagttgggttcatagatgccatctgcttgcaactgtatgaggccctgacccacgtgtcagaggactgtttccctttgctagatggctgcagaaagaacaggcagaaatggcaggcccttgcagaacagcaggagaagatgctgattaatggggaaagcggccaggccaagcggaactgagtggcctatttcatgcagagttgaagtttacagagatggtgtgttctgcaatatgcctag

SEQ ID NO: 22300 - DNA, 7154 bp, Homo sapiens
  source 1..7154: mol_type = unassigned DNA
gctgccgccgccgccgccgcctcctgggaaccaggggactgaagagcctgcgagagcggaacactgccggaccccgggtggggggggcgcagcagctgcgcctggccccgcccaccacacctgggcgcccgtagaaccgcgcggggcggggcggggcaggaggctggcctggcgctccggccgctttgtcgaaagccggcccgactggagcaggacgaagggggagggtctcgaggccgagtcctgttcttctgagggacggaccccagctggggtggaaaagcagtaccagagagcctccgaggcgcgcggtgccaaccatggagcgggccggccccagcttcgggcagcagcgacagcagcagcagccccagcagcagaagcagcagcagagggatcaggactcggtcgaagcatggctggacgatcactgggactttaccttctcatactttgttagaaaagccaccagagaaatggtcaatgcatggtttgctgagagagttcacaccatccctgtgtgcaaggaaggtatcagaggccacaccgaatcttgctcttgtcccttgcagcagagtcctcgtgcagataacagtgcccctggaacaccaaccaggaaaatctctgcctctgaatttgaccggcctcttagacccattgttgtcaaggattctgagggaactgtgagcttcctctctgactcagaaaagaaggaacagatgcctctaacccctccaaggtttgatcatgatgaaggggaccagtgctcaagactcttggaattagtgaaggatatttctagtcatttggatgtcacagccttatgtcacaaaattttcttgcatatccatggactgatatctgctgaccgctattccctgttccttgtctgtgaagacagctccaatgacaagtttcttatcagccgcctctttgatgttgctgaaggttcaacactggaagaagtttcaaataactgtatccgcttagaatggaacaaaggcattgtgggacatgtggcagcgcttggtgagcccttgaacatcaaagatgcatatgaggatcctcggttcaatgcagaagttgaccaaattacaggctacaagacacaaagcattctttgtatgccaattaagaatcatagggaagaggttgttggtgtagcccaggccatcaacaagaaatcaggaaacggtgggacatttactgaaaaagatgaaaaggactttgctgcttatttggcattttgtggtattgttcttcataatgctcagctctatgagacttcactgctggagaacaagagaaatcaggtgctgcttgaccttgctagtttaatttttgaagaacaacaatcattagaagtaattttgaagaaaatagctgccactattatctctttcatgcaagtgcagaaatgcaccattttcatagtggatgaagattgctccgattctttttctagtgtgtttcacatggagtgtgaggaattagaaaaatcatctgatacattaacaagggaacatgatgcaaacaaaatcaattacatgtatgctcagtatgtcaaaaatactatggaaccacttaatatcccagatgtcagtaaggataaaagatttccctggacaactgaaaatacaggaaatgtaaaccagcagtgcattagaagtttgctttgtacacctataaaaaatggaaagaagaataaagttataggggtttgccaacttgttaataagatggaggagaatactggcaaggttaagcctttcaaccgaaatgacgaacagtttctggaagcttttgtcatcttttgtggcttggggatccagaacacgcagatgtatgaagcagtggagagagccatggccaagcaaatggtcacattggaggttctgtcgtatcatgcttcagcagcagaggaagaaacaagagagctacagtcgttagcggctgctgtggtgccatctgcccagacccttaaaattactgactttagcttcagtgactttgagctgtctgatctggaaacagcactgtgtacaattcggatgtttactgacctcaaccttgtgcagaacttccagatgaaacatgaggttctttgcagatggattttaagtgttaagaagaattatcggaagaatgttgcctatcataattggagacatgcctttaatacagctcagtgcatgtttgctgctctaaaagcaggcaaaattcagaacaagctgactgacctggagatacttgcattgctgattgctgcactaagccacgatttggatcaccgtggtgtgaataactcttacatacagcgaagtgaacatccacttgcccagctttactgccattcaatcatggaacaccatcattttgaccagtgcctgatgattcttaatagtccaggcaatcagattctcagtggcctctccattgaagaatataagaccacgttgaaaataatcaagcaagctattttagctacagacctagcactgtacattaagaggcgaggagaattttttgaacttataagaaaaaatcaattcaatttggaagatcctcatcaaaaggagttgtttttggcaatgctgatgacagcttgtgatctttctgcaattacaaaaccctggcctattcaacaacggatagcagaacttgtagcaactgaattttttgatcaaggagacagagagagaaaagaactcaacatagaacccactgatctaatgaacagggagaagaaaaacaaaatcccaagtatgcaagttgggttcatagatgccatctgcttgcaactgtatgaggccctgacccacgtgtcagaggactgtttccctttgctagatggctgcagaaagaacaggcagaaatggcaggcccttgcagaacagcaggagaagatgctgattaatggggaaagcggccaggccaagcggaactgagtggcctatttcatgcagagttgaagtttacagagatggtgtgttctgcaatatgcctagtttcttacacactgtctgtatagtgtctgtatttggtatatactttgccactgctgtatttttatttttgcacaacttttgagagtatagcatgaatgtttttagaggactattacatattttttgtatatttgttttatgctactgaactgaaaggatcaacaacatccactgttagcacattgataaaagcattgtttgtgatatttcgtgtactgcaaagtgtatgcagtattcttgcactgaggtttttttgcttggggattattttaaataattggtttttgtgttttctgaattaccattttttcaagaatgtttggaatctttcctttttcaaaagtaggttaggagcaaattatcatacattctgtgacatttaaagcctttataggatagtgaaaaatgctggctgagtggattttaagagaaataattgtatttgttaacagtgtctttttttaaaaagttaaggcactctgaaacaaatggaaagtcctatgaaactgtattgtaaagaaaacattatttaattgatatgctgttttgtgagagaacaggcaagacagaactttgtcacttcagtgcagtacatttttctgaaagctacccataaaatcactttcatctcacctacctgatgcaaagcaggtgaaaccttaggagatgatccagtcactgacttgattgagggataagtgtgatttagaaatggaatggccttggatgtctatcagtgaagaaaaatgttctgttagaagatctctctaagagtttttttccttctgagcttccttttcaaaataaaagtgacaattgtagcattgacttgaagtgagacatggttatagataagagagtacaaaatgactctttttcctgtcaattgaaatttaaagaaaagttttaattatataaatagcaaagggctattgccaatactagggtcaaaaatgaatttgagggaacagtgggtaagaaactttatgcctgaataacatttagcagtattgtgattgaaaaattgccatattttgatgtataggacaagtcaactgagatccagagaatcctggatgtgaatgctaaacactggcccttaactcacattcaatgtattttcttcccataacatttagtatagttaatattttcttagaatttgagcccatttaagtggattaatattctacatgtgtgcccctaaagacacatttactcaatattggagaagtagataatgaattaagcaactggtctaggaaaggaaaatttgtttcaaatatgcaggaatgtttggatttggggagagtagaaggagagatttgcttgatttgttaacttctacctccaacccacaaaaaagatatttgatctgagtttctatcactaatttggatagaaaatttctaagggacatggtaatccagcattctcaaggacctttcgccaaaatgtgttttccatctatgtcccgattcccctaaattttgcctaaaattcagtatgttccttaagtttttaaaattctgagtgtgtacaaatatcttgacataatgcagttttatttttatcattctggtaaaaaaacaaaaaatagaagcaaaacacattgtattgccattattttgtatttggtaaaggttaatctaggaagttaccaactgtttaatgctatatgtattgtatacttgtattttcaggatattttattttttttgccatacagataaaatttgtaaggttgcccctttgtggcactggtgtgtaaaatacacagactatcactaaaataatagttatatatacatacaggtgtatacttatgcatgcatacataaatccttagtatagaaaaattgcataaagaatagcaatctttaataaacctttttattacattgtgatttagcagttatgctaaaatatgtacttatgctttagtagtttgtttggtcccctctagtatgtgtcactgagaaattttttaaagacatggtagatcgtgtttagaggctttgtatgtgtgtcattttaataagcaagaagatatatttagattagaaatggtttggtctgcctttgaatattgtttattttactttactagttgagacattaaaggaagctgggcaatgcctattttatttctttgttggatattttagttcatacaaagcagagtacttctttagggctggttaattggttcaaataatttttaatttcctttctagtatcttctcaagttggaaaaatatacatacagtcctccttcaccttactctgtatttatattacccataactagcaagaagttcttgttctagattttttgtttgtttagttataacagagtaacataccatttaattacaatttttagccagaaaagtccccactattttactaacttgttaaaagatatctatataattgcctggccttatatttttcagtagattagaccgtgccaatcacaatcctgggtggatttgtgtaagtcacttaacctctgtgtgcctaaacaagttgtgcttttttaaaaggagttatgtttgggcaaagcctttgtcttcaagcagaatgtcacagaaggcagctactttataagccccaatgggccatggagaccactgtcagaaatgggatattagtctagagagaaggtgatctattcccacatgtcatttctaatgttgagtttccatgactgaacaaagagaatatatttattcagcttcacttgcagatcactagtgaatgtgagatttagagctcattgagtatattgcttcaaggtacaaacccaggatgatgatgttgtcaccactgtctcttaattttgaataatagtttcctttaataggagtattagagataagaaagtatatgaaaatatactggaaatattggattcttggagaaaactgttcagtcacagatatattcttgcctagcagtgaagtgcctttattttcagcatagcaaataaatattagacctgttccaatttgatctacaatttttttctgtgtttttcaccagattgtactcctaaaacttaacaggccatcacaagcaattgtcttttgtttacaagattgatttaatatgagaggatacaaaatgtcatcgttatcctctcttatgaacaactgtagtcaaaataaggtggcacaatttaattgttttgtatcagaaatacactgacccaccttttattgagtcctgccacatgttaggtaccgtgctctgctgtggagacagagcagtgaccccaaggagctcacggtccctgaaggaggtgctagagaagagacttagcttctgatactgccaatttaatgtgagaacatggggtatactgcatcatttccattttcatcaataacatatgttttatgcaccttctttacctgaaacttactaagaatctaccagtaaacaaacatcctgtctttttgcaagtatgaatcacttaacctgctgatagttgaagaacactttaggagttttgtattcttgtatatagtttattttttccatgtgctagccaggtaaagattacacagttcttctggactgttaaattgtgcatggttttggaccccttctgctctactacagagagtgaagaagaaagtattaaagctcactttaccattccatatacttactaaaagcctgtgtaaacatgtcttaatgaatgttgttgaaagcaatgtaaatagttgaaaatataaatttatattacagtttaagaaaaccttatgaggcatcactagccactgttaatatctatttgtattcttataccttttcaatatatttgaacaaatatagtttctggcactatttttatactaggaaaaggagttactatgtatattatgcttagcttttaaggcattttaaataaccatgaatgttgatttcattactttcctttcctccatcacgagagtcatttcagatgactctttcatgacaaaatcactttaaaggaacacttacctccgattcctgtataaagtcatgagatggtcaaggtggttttccattgtgcaaattcttcacctgtcagtggtttcctcattttgccatgctttgtaaaaataaaaagaatgatcaagtaggtatgaa

SEQ ID NO: 22301 - DNA, 6733 bp, Homo sapiens
  source 1..6733: mol_type = unassigned DNA
gagggacgagtccacgggacagcccaaaggcaacatgacggaaccttgccaaaagaaatggtcaatgcatggtttgctgagagagttcacaccatccctgtgtgcaaggaaggtatcagaggccacaccgaatcttgctcttgtcccttgcagcagagtcctcgtgcagataacagtgcccctggaacaccaaccaggaaaatctctgcctctgaatttgaccggcctcttagacccattgttgtcaaggattctgagggaactgtgagcttcctctctgactcagaaaagaaggaacagatgcctctaacccctccaaggtttgatcatgatgaaggggaccagtgctcaagactcttggaattagtgaaggatatttctagtcatttggatgtcacagccttatgtcacaaaattttcttgcatatccatggactgatatctgctgaccgctattccctgttccttgtctgtgaagacagctccaatgacaagtttcttatcagccgcctctttgatgttgctgaaggttcaacactggaagaagtttcaaataactgtatccgcttagaatggaacaaaggcattgtgggacatgtggcagcgcttggtgagcccttgaacatcaaagatgcatatgaggatcctcggttcaatgcagaagttgaccaaattacaggctacaagacacaaagcattctttgtatgccaattaagaatcatagggaagaggttgttggtgtagcccaggccatcaacaagaaatcaggaaacggtgggacatttactgaaaaagatgaaaaggactttgctgcttatttggcattttgtggtattgttcttcataatgctcagctctatgagacttcactgctggagaacaagagaaatcaggtgctgcttgaccttgctagtttaatttttgaagaacaacaatcattagaagtaattttgaagaaaatagctgccactattatctctttcatgcaagtgcagaaatgcaccattttcatagtggatgaagattgctccgattctttttctagtgtgtttcacatggagtgtgaggaattagaaaaatcatctgatacattaacaagggaacatgatgcaaacaaaatcaattacatgtatgctcagtatgtcaaaaatactatggaaccacttaatatcccagatgtcagtaaggataaaagatttccctggacaactgaaaatacaggaaatgtaaaccagcagtgcattagaagtttgctttgtacacctataaaaaatggaaagaagaataaagttataggggtttgccaacttgttaataagatggaggagaatactggcaaggttaagcctttcaaccgaaatgacgaacagtttctggaagcttttgtcatcttttgtggcttggggatccagaacacgcagatgtatgaagcagtggagagagccatggccaagcaaatggtcacattggaggttctgtcgtatcatgcttcagcagcagaggaagaaacaagagagctacagtcgttagcggctgctgtggtgccatctgcccagacccttaaaattactgactttagcttcagtgactttgagctgtctgatctggaaacagcactgtgtacaattcggatgtttactgacctcaaccttgtgcagaacttccagatgaaacatgaggttctttgcagatggattttaagtgttaagaagaattatcggaagaatgttgcctatcataattggagacatgcctttaatacagctcagtgcatgtttgctgctctaaaagcaggcaaaattcagaacaagctgactgacctggagatacttgcattgctgattgctgcactaagccacgatttggatcaccgtggtgtgaataactcttacatacagcgaagtgaacatccacttgcccagctttactgccattcaatcatggaacaccatcattttgaccagtgcctgatgattcttaatagtccaggcaatcagattctcagtggcctctccattgaagaatataagaccacgttgaaaataatcaagcaagctattttagctacagacctagcactgtacattaagaggcgaggagaattttttgaacttataagaaaaaatcaattcaatttggaagatcctcatcaaaaggagttgtttttggcaatgctgatgacagcttgtgatctttctgcaattacaaaaccctggcctattcaacaacggatagcagaacttgtagcaactgaattttttgatcaaggagacagagagagaaaagaactcaacatagaacccactgatctaatgaacagggagaagaaaaacaaaatcccaagtatgcaagttgggttcatagatgccatctgcttgcaactgtatgaggccctgacccacgtgtcagaggactgtttccctttgctagatggctgcagaaagaacaggcagaaatggcaggcccttgcagaacagcaggagaagatgctgattaatggggaaagcggccaggccaagcggaactgagtggcctatttcatgcagagttgaagtttacagagatggtgtgttctgcaatatgcctagtttcttacacactgtctgtatagtgtctgtatttggtatatactttgccactgctgtatttttatttttgcacaacttttgagagtatagcatgaatgtttttagaggactattacatattttttgtatatttgttttatgctactgaactgaaaggatcaacaacatccactgttagcacattgataaaagcattgtttgtgatatttcgtgtactgcaaagtgtatgcagtattcttgcactgaggtttttttgcttggggattattttaaataattggtttttgtgttttctgaattaccattttttcaagaatgtttggaatctttcctttttcaaaagtaggttaggagcaaattatcatacattctgtgacatttaaagcctttataggatagtgaaaaatgctggctgagtggattttaagagaaataattgtatttgttaacagtgtctttttttaaaaagttaaggcactctgaaacaaatggaaagtcctatgaaactgtattgtaaagaaaacattatttaattgatatgctgttttgtgagagaacaggcaagacagaactttgtcacttcagtgcagtacatttttctgaaagctacccataaaatcactttcatctcacctacctgatgcaaagcaggtgaaaccttaggagatgatccagtcactgacttgattgagggataagtgtgatttagaaatggaatggccttggatgtctatcagtgaagaaaaatgttctgttagaagatctctctaagagtttttttccttctgagcttccttttcaaaataaaagtgacaattgtagcattgacttgaagtgagacatggttatagataagagagtacaaaatgactctttttcctgtcaattgaaatttaaagaaaagttttaattatataaatagcaaagggctattgccaatactagggtcaaaaatgaatttgagggaacagtgggtaagaaactttatgcctgaataacatttagcagtattgtgattgaaaaattgccatattttgatgtataggacaagtcaactgagatccagagaatcctggatgtgaatgctaaacactggcccttaactcacattcaatgtattttcttcccataacatttagtatagttaatattttcttagaatttgagcccatttaagtggattaatattctacatgtgtgcccctaaagacacatttactcaatattggagaagtagataatgaattaagcaactggtctaggaaaggaaaatttgtttcaaatatgcaggaatgtttggatttggggagagtagaaggagagatttgcttgatttgttaacttctacctccaacccacaaaaaagatatttgatctgagtttctatcactaatttggatagaaaatttctaagggacatggtaatccagcattctcaaggacctttcgccaaaatgtgttttccatctatgtcccgattcccctaaattttgcctaaaattcagtatgttccttaagtttttaaaattctgagtgtgtacaaatatcttgacataatgcagttttatttttatcattctggtaaaaaaacaaaaaatagaagcaaaacacattgtattgccattattttgtatttggtaaaggttaatctaggaagttaccaactgtttaatgctatatgtattgtatacttgtattttcaggatattttattttttttgccatacagataaaatttgtaaggttgcccctttgtggcactggtgtgtaaaatacacagactatcactaaaataatagttatatatacatacaggtgtatacttatgcatgcatacataaatccttagtatagaaaaattgcataaagaatagcaatctttaataaacctttttattacattgtgatttagcagttatgctaaaatatgtacttatgctttagtagtttgtttggtcccctctagtatgtgtcactgagaaattttttaaagacatggtagatcgtgtttagaggctttgtatgtgtgtcattttaataagcaagaagatatatttagattagaaatggtttggtctgcctttgaatattgtttattttactttactagttgagacattaaaggaagctgggcaatgcctattttatttctttgttggatattttagttcatacaaagcagagtacttctttagggctggttaattggttcaaataatttttaatttcctttctagtatcttctcaagttggaaaaatatacatacagtcctccttcaccttactctgtatttatattacccataactagcaagaagttcttgttctagattttttgtttgtttagttataacagagtaacataccatttaattacaatttttagccagaaaagtccccactattttactaacttgttaaaagatatctatataattgcctggccttatatttttcagtagattagaccgtgccaatcacaatcctgggtggatttgtgtaagtcacttaacctctgtgtgcctaaacaagttgtgcttttttaaaaggagttatgtttgggcaaagcctttgtcttcaagcagaatgtcacagaaggcagctactttataagccccaatgggccatggagaccactgtcagaaatgggatattagtctagagagaaggtgatctattcccacatgtcatttctaatgttgagtttccatgactgaacaaagagaatatatttattcagcttcacttgcagatcactagtgaatgtgagatttagagctcattgagtatattgcttcaaggtacaaacccaggatgatgatgttgtcaccactgtctcttaattttgaataatagtttcctttaataggagtattagagataagaaagtatatgaaaatatactggaaatattggattcttggagaaaactgttcagtcacagatatattcttgcctagcagtgaagtgcctttattttcagcatagcaaataaatattagacctgttccaatttgatctacaatttttttctgtgtttttcaccagattgtactcctaaaacttaacaggccatcacaagcaattgtcttttgtttacaagattgatttaatatgagaggatacaaaatgtcatcgttatcctctcttatgaacaactgtagtcaaaataaggtggcacaatttaattgttttgtatcagaaatacactgacccaccttttattgagtcctgccacatgttaggtaccgtgctctgctgtggagacagagcagtgaccccaaggagctcacggtccctgaaggaggtgctagagaagagacttagcttctgatactgccaatttaatgtgagaacatggggtatactgcatcatttccattttcatcaataacatatgttttatgcaccttctttacctgaaacttactaagaatctaccagtaaacaaacatcctgtctttttgcaagtatgaatcacttaacctgctgatagttgaagaacactttaggagttttgtattcttgtatatagtttattttttccatgtgctagccaggtaaagattacacagttcttctggactgttaaattgtgcatggttttggaccccttctgctctactacagagagtgaagaagaaagtattaaagctcactttaccattccatatacttactaaaagcctgtgtaaacatgtcttaatgaatgttgttgaaagcaatgtaaatagttgaaaatataaatttatattacagtttaagaaaaccttatgaggcatcactagccactgttaatatctatttgtattcttataccttttcaatatatttgaacaaatatagtttctggcactatttttatactaggaaaaggagttactatgtatattatgcttagcttttaaggcattttaaataaccatgaatgttgatttcattactttcctttcctccatcacgagagtcatttcagatgactctttcatgacaaaatcactttaaaggaacacttacctccgattcctgtataaagtcatgagatggtcaaggtggttttccattgtgcaaattcttcacctgtcagtggtttcctcattttgccatgctttgtaaaaataaaaagaatgatcaagtaggtatg
